United States Patent Application Publication US 2004/0259086 A1 - sequence listing, part 4

SEQ ID NO: 17884 - DNA, 338 bp, Homo sapiens
  misc_feature 298, 322, 323, 327, 328, 329: n = A,T,C or G
agtacttctagaattaattaaggcggggtgagttcagtgactgctattaaaaaagtatagtacatagagcaaaaaactaaaacattgagaagatttaaaaaattgaaagcaacagactgttttctccacttctaagaatctctgaaacaccatacatactacctgaaaaggtaatgtagttgtaagtttctttctcataaattattgcattcagccataaaatctggtcctttgacttttacccctcacaatcatggcaagccaacgccacttatccagtgaaccactatcaccgaanaaaaaaaaaaaaaaaaaaaaaaanngggnnnccccccccc

SEQ ID NO: 17885 - DNA, 443 bp, Homo sapiens
agtacttctagaattaattaaggcgggtcattttaatccttgaaaactgagtttacttcctacctaagcttccatccgcttaataccaaggtgatcaagtctgtgtgctaaatacaggaaaagccttgataggagaccctgctaccaatttgtaggaaataggacaaaaaaaaaacaaaccacaacactttgaacttccactgttgagtatgcaaacagcaaaatccagactatagggaagtcaacaagtcacaaggcccaagtttttcaacagataaagtagaagcaaaaaactgtaagaaaggaatgaagagagaacctacagattaagaaacttaaacgacttaccagtatagccacatgataaataccattaaaagaaaaaggaatgaactttcggctgggcgcggtggctcacgcctgtaatcccagcacttcgggag

SEQ ID NO: 17886 - DNA, 466 bp, Homo sapiens
agtacttctagaattaattaaggcgggagaatcatttgaacctgggaggcggaggttgcagtgagccaagattgcaccactgcactccagcctgggtgacagagtgagaccctgtctcaaaaggaaaaaaagagaaatcctactaagagtcgttgattcaatcattattttatttataaattcaacagctatatttataagtatcattttctcctactgtctgtcaaattttggaactgggttattctgatctggctaacatgaattaatgatgtcctaccattttcaatgtttggagataattttctacaggaactggcagttccttgaacgtttatgagacagaacttacccataaaatcatccagtactttttggggaaggagtggaatcttttactatattcaccatatttttctggttatgggtttactctatttttctacttcttcttgagggacaattt

SEQ ID NO: 17887 - DNA, 444 bp, Homo sapiens
  misc_feature 433: n = A,T,C or G
agtacttctagaattaattaaggcgggtcattttaatccttgaaaactgagtttacttcctacctaagcttccatccgcttaataccaaggtgatcaagtctgtgtgctaaatacaggaaaagccttgataggagaccctgctaccaatttgtaggaaataggacaaaaaaaaaacaaaccacaacactttgaacttccactgttgagtatgcaaacagcaaaatccagactatagggaagtcaacaagtcacaaggcccaagtttttcaacagataaagtagaagcaaaaaactgtaagaaaggaatgaagagagaacctacagattaagaaacttaaacgacttaccagtatagccacatgataaataccattaaaagaaaaaggaatgaactttcggctgggcgcggtggctcacgcctgtaatcccagnacttcgggagg

SEQ ID NO: 17888 - DNA, 394 bp, Homo sapiens
  misc_feature 23, 30, 32, 35, 43, 44, 46, 48, 50, 55, 61, 62, 69, 84: n = A,T,C or G
actggccgtcgttttcaccccgnaacaagngntanccttgatnntngncngtccntttctnnagagaantagtagaattacttnaggcggggcaggaaggaagcgtctggtaagacaaccagcaagttaacaatggtcacctccagaaatgggctgggtaaaccaaagaatttttttgtttttgttttttttgagtcagggtctagctctgtcacccaggctggaacgcactggtgtgatcacggctcactgcagccttgacctccctggctcaagcaatcctcccagctcagcctcctgagtcgttgggactacaggcacgtgccaccacgcctgacacattttttaaatttttgtagagacagtgtttcaccatgttgcccaggcaggtctc

SEQ ID NO: 17889 - DNA, 499 bp, Homo sapiens
  misc_feature 1, 26, 29, 31, 34, 43, 45, 49, 54, 59, 71, 74, 84, 85, 120,201, 288: n = A,T,C or G
nactgccgcgttttcaccccggaacnagngntanccttgatgntnggcngtccntttcncgagagaactantanaattactttnntgcgggggacaaagcctgggccgggcctgcgcttncgttcgcttgactggctgcgcttgttttcagggttttggtctgaaaacggatcttacctgcgcagagcaaaatcggttgtngattatatccacgaaaattccttctattaaaatgaatttcaagtcccacctaccctggaagcagaaagagagagaagagagagagtnaagagaaagagaaaagaaagagaagttgaaaaagagaaagaaaaccaagaaagaaagagaaaaaaaccgaaaataaatggacaagaaagaaaagtcactgggatcctggactacggcactgctccaggcaggcctggttatcctgcttgaggcagcaatcctcttgagcctagtgaaatgcaactggctgtacctcaatgatgttgccctg

SEQ ID NO: 17890 - DNA, 327 bp, Homo sapiens
  misc_feature 295, 311, 314: n = A,T,C or G
agtacttctagaattaattaaggcgggtaaactgtcatggaagtggtcccccatccccacagtgcaccctccccactgaagcctgactgaccttcgtggaagagtcatatcacagcactctgctgcttcacatctttgtgtgctgcccatctcaccagagcaagagccaaggtcttgccctctgcccgtaaggccactctgaccttcctgttcttcctaccactcaccctagcattacttatatgatatgtctccatacccattacaatctccagcattccccctcaaaccgaanaaaaaaaaaaaaaaanttnaaaaaagcggccg

SEQ ID NO: 17891 - DNA, 465 bp, Homo sapiens
agtacttctagaattaattaaggcgggtggatcatttgagcccaggagttcaagaccagactaggggccaggcacggtggcatatgcctgtaatcccagctactcaggtggctgaggtgggaggatagcttaggcccaggaggcagaggttgcagtgaactgaaataacaccactgcactccagcctgggcaacagagccagatcctgtctcaggaaaaaaaaagaaaacaataaatatacaaaggggtggaaattgtgagagaaaataagataaagaattagttcaacaggactaatattatgtgaaaaagagaaaacaaagttaatgaaggacagaaaattattgaaaaaataatgcaagacaatttcctagaactgaaagaatccactagtgcagaaccaaaagaaaaaaaaattcaaccatgtgaaatgtttgaactctaaatataaagaagattctaagt

SEQ ID NO: 17892 - DNA, 352 bp, Homo sapiens
  misc_feature 334: n = A,T,C or G
agtacttctagaattaattaaggcggggaggggttgagtaggattttaaatttagtaaactattttgtgcaaataagacttggtttcctttgtcttaccttaaagtggtgtgagacttcttttcatttcaaggaagggttatatttttacatttgtgcaccggcgaagatagaattaaatctgtactccaatacaagagtatacagaaagtattgtcctgaatttagtgattttatcacaaaatattactcgagtgaatattagaaaagcaaattttgccttaataaaaatcaaggaatattatataaatgatgtctaagaagcaaataaaatnctaaagtgagactcccta

SEQ ID NO: 17893 - DNA, 409 bp, Homo sapiens
agtacttctagaattaattaaggcgggcagatcacttgaggtcaggaattcgagaccagcctgtgcaacatggtgaaacctcatctctactaaaaatacaaaaattagctgggtgtggtggcatgcacctgtaatcccagctacttgggaggctgaggcaagagaatcgcttgaacctgggaggcggaggctgcagtgaactgagatcacgccactccagcgtaagcaacaaagcgagaccctctctcaaacacacacacacacacacacacacatacacacaaacacacacacccacaagagggtttagacctggtgcctgctggtttcagccactctaaaaccaatgggaggattttattattttatttctttgcaaaataattggttctgtggacaccatcgccct

SEQ ID NO: 17894 - DNA, 416 bp, Homo sapiens
  misc_feature 35, 39, 54, 60, 63, 66, 97, 99, 101, 102, 109, 110, 111,125, 135, 149, 151, 153, 157, 163, 164, 165, 171, 172, 174,183, 184, 185, 202, 206, 207, 210, 211, 215, 216, 217, 218,219, 220, 229, 230, 231, 232, 244, 245, 246, 252, 253: n = A,T,C or G
  misc_feature 256, 400: n = A,T,C or G
ctcgagagtacttctagaattaattaaggcgggangccncacgcagactgacancgtttntancangatcaggtgagctgtgtccagaaaaccaacnananngagtggnnngaggaatgaacgtntcattctcgntaataaaggcattntncnaaanaaaaannntaaaanngntaaagtggnnncccccccccctaggggnaccnnctnntccnnnnnngtgatgaannnngccccccccctnnngtcctnnatnaatgtggaggtttggagaaaattgaagttttacagcaacatgaaaatgaagacatatataaattagcatttgaaatcatagatcagtatttctctggtgatgatattgatgaagatccctgcctcattcctgaagcaacacaangaggtacctacaattt

SEQ ID NO: 17895 - DNA, 429 bp, Homo sapiens
  misc_feature 424: n = A,T,C or G
agtacttctagaattaattaaggcggggggagagagagagaaggcagcgagggaaggaggaccccggcaggcagcagcatgaaattcagcccagcgcactacctgctgcctctcctgcctgcgctggtcctcagcaccagccctgctttcctaattaatagtctcttgattgcaagatgactgcttctgctggaacctccatatccatattcaaggaagaaagactggttgagtttgtcaggtatcaatgattttcattcattcctctttaatcaagaaagcaaattatttcccacaactccccaaaagactgttgctgatgtctcattggccataactgtgtccagtagtttctccaaactgcaaggtaacttgaaatgcaaatatttcgctggataacatgcttctcatgtcactggtctgngtcag

SEQ ID NO: 17896 - DNA, 337 bp, Homo sapiens
  misc_feature 266: n = A,T,C or G
agtacttctagaattaattaaggcgggagaaagaacacagaagcaaacaagaacttttaagtgctgcaggtattaaaataaggcacaaaagtgggggaggtgtgctctgaaaagcttcagggtgaagataaatttgaaatgccaggaactcaaagagtgaactattctggaagtgatcactaggattcaaaatcttatactttctaattttatcgtattagcttttatatgttaatatttgattttattaatcacagaattttatnaaaagaaaaaattatggaagaaaaaattttatccttctccattagatttatttattttaaatgtattaaaa

SEQ ID NO: 17897 - DNA, 263 bp, Homo sapiens
agtacttctagaattaattaaggcggggcttcgtgaactgtccaatcagaggcgccacgtggaaggtgggtggggcaatgcggcataaaagaggtgggcgtcgtacgtcgttacgcagcgcggttgctgggcacctcgactatcacctgaccgtagtaatatctcccgctacgcgcgttgtgaccaatgctgcatacaggagatgagggaggacggccagacacctggaagccgaaaaaaaaaaaaaaaaaaaaaaaaaaaaa

SEQ ID NO: 17898 - DNA, 417 bp, Homo sapiens
  misc_feature 60, 63, 80, 86, 119, 127, 227, 234, 235, 238, 244, 290, 323,347, 352, 380, 382, 390, 392, 398: n = A,T,C or G
agtacttctagaattaattaaggcgggagggatgggatattattgatgataggccttctnacntctggcaatagattccngagtancatcggtcatggataaatttttttttaactaantgactganccaaagttaattgtcttttgagtgattttgcacaatatctcaaaatgaactgtactttttttcttgtgaaaccaaaatgcaccactgcgttccaacctgngagacannaanacttcncgtaaaaaaaataaataaataaaaagcaatttctggctgggcacantggctcatacctgtaaccccatcactttgggangacaaaggtgggccaatcacttgncccanaatttcgagaccagcctgggcaacatgnanaaacccgnanctctcnggaggctgagttgggaaaa

SEQ ID NO: 17899 - DNA, 441 bp, Homo sapiens
agtacttctagaattaattaaggcgggctgcaaacctttataagaaatgaagctttcctttctaaatttgaatttcatctttcttcagttgacatgatagaagtttcaggccagcagatctctacattcctttccagtgctaagattctctgaaacctagacccatgtgtttttaaagaaggagaccccttctccttgactctccacctgcagatgcgtctgcatttaagtgatacatgacctgacaaccaaaggaaattttaggatccaaaagcaatcggaatctcaaagaaattattctaattatatataatatcaccttatgtaaactgactttaaatggaggttgttgcattattaccctcactgtcaacccaacacaggcatgctcataaggaaagggtaaaaaaagtaaaaggaactcggcaaatcttaaaaaaa

SEQ ID NO: 17900 - DNA, 574 bp, Homo sapiens
  misc_feature 1, 3, 30, 36, 37, 39, 41, 45, 49, 51, 53, 77: n = A,T,C or G
nanactggccgtcgttttacaccccggaanaagagnnancnatgntggntngncgggccccccctcgagagtacttntagaattaattaaattcctataagaagcccctagccgccctccctgttcccactctcaccgccactctagtttctattcagcagccaagagtgatcctttacaaacctgaatcaggtttcatcactcctctcaaaatcctaaaccagctgaagtctcattcggagggaaaggtggagtcctgaagtgtcccgcgaggcccttgggagcaatctgactttcacctctcttatctcatctccccactcactccataccagcctggcagcctcgctgctgtcctgcaagcactttaggacttttgcactgactgttctttctgcctaaggcacactctccaccgacatgtccacacggctgctccttcacctcatttgagtctttactcaaatgtcacgttctcaaggaagccagccctgaccaccctatgtaacactgtaacctgctccccaactctaccctgccctatgcacagcagtaccagttttccttaaccata

SEQ ID NO: 17901 - DNA, 445 bp, Homo sapiens
  misc_feature 71, 164, 192, 195, 197, 199, 200, 209, 220, 222, 223, 224,225, 226, 242, 245, 246, 247, 257, 258, 259, 260, 266, 272,283, 285, 289, 290, 297, 401: n = A,T,C or G
gtaccgggccccccctcgagagtacttctagaattaattaagggggcaggcggagcttgaggaaaccgcanataagtttttttctctttgaaagatagagattaatacaactacttaaaaaatatagtcaataggttactaagatattgcttagcgttaagttnttaacgtaattttaatagcttaagattncananannaaaaaaaanaaaaaaaaaangnnnnnccccccccgggggggnccnnncatcgccccnnnntggggntatttnccccccccccntngggnngtttttnaaaaattctcctttcccaaggttttctaattataattccctaaattccacttataaatatccattactttggatttagactttctgtctttggggcctttttgntaatatgaagattaatcttttggaacaatgggtaataactggga

SEQ ID NO: 17902 - DNA, 354 bp, Homo sapiens
  misc_feature 217: n = A,T,C or G
agtacttctagaattaattaaggcggggcagcccctggcccggcgccgggaagtacacagccacctgatctttttgtaagaagaaaaagaaaaacgaccctgatgagcttttcttctccaggaaggctacctgtgtcctagtctgtcgatgcagtcaaccaacagtcactgtgcacctactatgcgtcaggcactgggccaggcgctggggacgcanagatggaaacacacacacacacacacacacacacacacacacaccctacacaccctacccacacacaccctacctggaagtccttgccctcgaggtatctacattgtagagggaattgggggccgggacagacaata

SEQ ID NO: 17903 - DNA, 216 bp, Homo sapiens
agtacttctagaattaattaaggcggggtttatactatatacactggagacagaatggcaaataaaattagtccacctccaagaggctataatctagaacacaatcctgattcttgacaatgtttaatactaaaaacttcaatgatttttttctctaattggtccccttcccattcttctctaatccaaaaaaaaaaaaaaaaaaaaaaaaaaaaa

SEQ ID NO: 17904 - DNA, 181 bp, Homo sapiens
agtacttctagaattaattaaggcgggcagttgaaagagtagaaataaggaaaaacatgaacttgagggtagagatgagagccaaattgataacaaatagattactaaatggggagactccctcagtctcagtctcaccaccctttagctcctaaaaaaaaaaaaaaaaaaaaaaaaaaaa

SEQ ID NO: 17905 - DNA, 403 bp, Homo sapiens
  misc_feature 66, 166, 192, 295, 312, 315, 336: n = A,T,C or G
agtacttctagaattaattaaggcgggcggctgaggcgggaatggctgctgtactgcagcgcgtcnagcggctgtccaatcgagtcgtgcgtgtgttgggctgtaacccgggtcccatgaccctccaaggcaccaacacctacctagtggggaccggccccaggtnaacgtccctctccaacctccccaacnttcgcagccggccccggagcccgggctttgactgatcgcggctgcgcgggcagtggagagcgccgcgtcctgtccctagctgggcagccccgcgcctagcatncccgtcaggactgcacncanacactcggatctcgaagctanctaaaatacgaccaccccaggtgatagctctctaatttagggagaaatggaaaaaaaaaaaaaaaaa

SEQ ID NO: 17906 - DNA, 314 bp, Homo sapiens
agtacttctagaattaattaaggcgggggttggaggatggcctgggcctgggagactgaggccgtggtgagctgaggtcacaccactttgctccagcctgggtgacagagtgaggccatgtctcaaaataataggagactatgatgaacaattttaggccagtaaatgtagcaatttcaatgcaatggataaactcttggaagaatataacttgtcaaaagcaatggaaatctgcatggtcctctttctgttcaggaaattgaattaattaccagagaacctacctaccaaaaaaaaaaaaaaaaaaaaaaaaa

SEQ ID NO: 17907 - DNA, 449 bp, Homo sapiens
agtacttctagaattaattaaggcggggtatttcagtattataattttataaccacatatcaagtagatgctataatttcatgccttacatgtacctaatttaatcatttatattattaaggcctatatttgtctctaatattagtatattctaagagtatgctttatgaattttaatcataaaaaatacattatatatggcaaagaggagaaaaataaggttccttccatctggggcagggtttcaacctcagcattatttacactttgggcttgataattctgtgttgtggggggagttctatgcattgtaggatgtttggcagcatctctggcttttactcactagatccagcactctcttgctagttgtagcgatgaaaaataactacagacattgcgaaacccacccgcttcctgcccagaaaccaaaaaaaaaaaaaaaaaaa

SEQ ID NO: 17908 - DNA, 463 bp, Homo sapiens
  misc_feature 402, 448: n = A,T,C or G
agtacttctagaattaattaaggcgggtgtcactccttgccaaagctttagaaagccttcctcttcaatgatccctagagctgtgcgcaccattcccctatagggggcagattctcttgcaccgtctcccaaccgagcaagagctgcttctccttgcatttggagtcgagtttttgtgagatccaggggaaaggttgctaacaaaaacacaaatgcagggaaaaacccacaacattcagagaaacaaacaaaaatctaaaatcataggagtaatattttcccaagactggttgttctcaaattttagaatatatcagaatcagctagggagattttaaaaattagaaatttcctagccccgtgcccatggattctaattcagtaggttgaagagggtttaanaaactttgattctcacacagtccccaaattttaaagaatcactacncaaggagcatcctgg

SEQ ID NO: 17909 - DNA, 393 bp, Homo sapiens
  misc_feature 28, 31, 35, 36, 37, 38, 39, 41, 93, 104, 108, 111, 122, 125,128, 133, 138, 139, 142, 144, 149, 153, 167, 169, 170, 172,175, 176, 181, 182, 187, 194, 219, 220, 221, 222, 228, 236,239, 242, 300: n = A,T,C or G
agtacttctagaattaattaaggcgggntgngccnnnnnanataagaaaaatgattatataccatatccaactgggactcaccctaagaacancatggtggttnaccntcnttgcaatacanctnatnacctnacccnnaananatggnatgnaattaaagaatggntnntnccnnctggnngcatnatttccncgctccatatggttctacatggaannnntgtcangagagcangancantgacttcacctgagaacatcccagcgggaggacaagagaaatcatgtttattcctcangaatactgaagtgccctggagtaagctgccattcttcttgtaacaatgttatcagtaatgctttaaactccagcacctggttatgcatttgaa

SEQ ID NO: 17910 - DNA, 504 bp, Homo sapiens
agtacttctagaattaattaaggcggggtagagacggggtttcaccattttggccaggatggtctcaatcccctgacctcgtgatccacctgcctcggcctcccaaagtgttgggattacaggcatgagccactgtgcttggcctgttattttattttcttataactacaacttttcttcttgaattttcaggtcagaggcaagaaaaactctttacaggtttttagtggggggcttatggagtatttcaggagttctttgcaattaaatcatcttttcacttgtattgtttttcaaaactttgttgatttataaaatgtgccaactgtgagtaaactatggtatttgcaagtggtttttacataatatttgagatgaggaagtgagattgtgcatgacatacttctcctttgtattctctcagtgccttacagcaggttactccattctgctatgacaacttgtttcaaatgttaatttacatagggattttttataagccat

SEQ ID NO: 17911 - DNA, 475 bp, Homo sapiens
agtacttctagaattaattaagtctattataaatcacaaataacaaagccctttaactttatatatatataatgttgttggtttctgtcctatattaagaataaagcaaagcaatgtaaatattttaaaagtcattttgtagaagataaaactgaaagctaatgttgactgaaagttctctgccgtgtacttaaaacccagtaataactgaaatgtcaggaaattgaaatattaatattttaccctcacaaaatattaactccttatgttcaatactttttttttgatgtttaactttggtatttcaaggaagaatgaatgtactaaaaaacacacacacacacgtctttccttttgcaatgggtgaaaatttctagcaatcttgttccaaggtaatttattgtattttttaatggatgctttaatataaggataaataataccaaaggcattgttttaaaaatattttatattt

SEQ ID NO: 17912 - DNA, 393 bp, Homo sapiens
  misc_feature 24, 33, 34, 41, 43, 54, 55, 57, 70, 78, 89, 135, 136, 145,183, 184, 185, 189, 190, 195, 197, 201, 202, 204, 207, 209,211, 215, 216, 219, 227, 229, 237, 242, 262, 266, 268, 270,274, 286, 290, 291, 313, 319, 378, 393: n = A,T,C or G
agtacttctagaattaattaaggngggagagannaggaacntnattgaacttcnntnttaaaaaaatgcnagcatatnttgcaactaanaatttgtctgagacaggtggatgtatataattagaagtttatggtnngataatcangaaagcaataatccacctatttcataccctaaaaaaannnaaannacccnanaaannanatngngncccnnccnggggggancnccagttcnccttnttaagacgtttttttaaccncctncngngccncattttttaaanctgnnccaaaacaaaaagcctgttctnacatcncagtgtcattttgataggagcgttttgttatttttacaaggcagaatggggtgtaacanttgaattaaacttan

SEQ ID NO: 17913 - DNA, 480 bp, Homo sapiens
  misc_feature 402, 455: n = A,T,C or G
agtacttctagaattaattaaggcgggagagtgatatacatatcattataaaatagtgggttctcagccttctgagatttttgacaattcaataatgatcttgaagatctctaaaatgtaatcacaggttattctgcagagacactaattcaaaatatatgtattaaacttaactattggtgacggagcatctttgttattctctcctcacactcccatatgcatttaacagagaaataatactgtacacaaaagtggtatttaggacctcaaacttttcctcattaacacaagatctaatgacataatttagtgtcaaaataaaaatactgggggagggatgtataagtgaaataaacatccagttagaaaccacaagcataaagtttaataagaaaatgnaagtgaaatagactgggaaaagagcattccagttacagctatgattccgcttncaggctatttacatttataacatac

SEQ ID NO: 17914 - DNA, 551 bp, Homo sapiens
  misc_feature 66, 114, 224, 258, 275, 301, 316, 320, 363, 364, 419, 431,445, 469, 474, 485, 495, 497, 500, 518, 523, 535: n = A,T,C or G
agtacttctagaattaattaaggcaggcagatcacaaggtcaggagttcagcctaaccaacatggngaaaccgtgtctctactaaaaatacaaaaattagccaggcgtggtggngcacacctgtaatcccagcactttgggaggccgaggcagacgggtcacttgaggccaggagttcgagaccagcctgggcaatatggccgagactccgtctctactacaantccaaaaaaaaaaaaaaaaaaagtaaaaaataanggcggcccgccacccgnggggggagcctcccaatttcgccccntatagtggagttcgnaatnaacggcgccgctacactgggcccgtcggttttttaccaaccgnncgtggacctgggaaaaaacccctggccgtttacccaaccttaaatccgcctttgncaggcaacaatnccccccttttcgcncagcctggggcgttaaaattagcngaaangagggccccgnaaccccggancngcnctttccccaaacaaggtntgccnccaagcccttgnaattgggccaaatggg

SEQ ID NO: 17915 - DNA, 341 bp, Homo sapiens
agtacttctagaattaattaaggcgggggtctcaggcaccatcacatgcatacatacccaatggatgtgtcacccgctcacccatacataacattccttacagaacaatctcgtgagtagacgctttctccagcaaactttctattttagaataactaaatagtagggttcatgtctaaaattttcccttggggtgggagtaggtgagtacagaaacaagtaaatacaactctgcattgccatgtgggggtgaaagctgggatacattgtaaagatcattttcgtaagcctgtacctttcttttgctatcaatgacgtgttcccatattcattctcagtgt

SEQ ID NO: 17916 - DNA, 455 bp, Homo sapiens
  misc_feature 351: n = A,T,C or G
agtacttctagaattaattaaggcgggatatgaattaacttacccaagatcgtgttgcttgtaagtatcagaattagtgttcaaacctaggcaatgtggctcagagtcaatgctcttaacaatcacactataagaacagatataataaatatctacttacctggaggatataaattctatttttattccgagttctgaatcaaaatggtaattcaaaggcaatgagaacattaacctcatcaccatcatttaggctcaaaagaaaatggtacatattctattgcaaccagtcaggattaattctcaaatgtatgaaacttgaagagggaggacaatgcaaaggaaaccgtncttagtagcagaataagttattactataagcagacttcaaagtatgttggcaaaccatcacttatgctgaaagtgacaataaaagacttgggaaaaaaaaaaaa

SEQ ID NO: 17917 - DNA, 416 bp, Homo sapiens
  misc_feature 28, 32, 38, 41, 47, 54, 56, 64, 65, 67, 70, 72, 78, 87, 88,97, 116, 120, 125, 131, 152, 208, 278: n = A,T,C or G
agtacttctagaattaattaaggcgggngcgngctganatnactccnctgcatncnaacccggnnanagngngagacnccatctggnngaaataagnaaagaaccgaaaagaaaanttanccagntatggnggcatgcatttgtgatcccanctactctagaggctgagacaggaggactgcttgagcctaacaagtcaaggttgcantaagccatgatcatgctactgcattccagcttaaacaactgagatgctatctcttaaaaacagaagtacnaagcaaacaactataggggaaaatgagggatacatactttaagaatttttaaaaatttacatggaaaaacaccaggattctatagaaaataaaacagtattaaataactatttataaaatagatactagcaaattacc

SEQ ID NO: 17918 - DNA, 303 bp, Homo sapiens
  misc_feature 242, 243, 244, 252, 256, 257, 259, 262, 264, 268, 269, 271,281, 291: n = A,T,C or G
aattaaggcgggaggatgacttgaggccaggagttcgagaccagcccaggcatgtttacagttttgatgaaaaaggtaatatcaatttatactaccatcagcaacgtattaatacactgcatactcacaagcactaggtattataatatttaaatatgtttgctaatttagcagcacaaaatttttccctttattgatttgtacttttcttctctcttttttttttttttttaaaaggggtnnntttttttncccnngnttntngaanncnaggggaaaanttttttaaanaaaaaaaaaaaa

SEQ ID NO: 17919 - DNA, 277 bp, Homo sapiens
  misc_feature 35, 36, 163, 180: n = A,T,C or G
agttcttctagaattaattaaggcgggtgatggtnnctatgatggtggggatgatgaggctattgttttttgtgaattcttcgataatggcccatttgggcaaaaagccggttagcgggggcagggggaaggggcccttggccacaggtggaattaagaaatntggcaaaaagtaagctntccttgtgcctgaggagatggtgaccctttatttcatctgtatttaaacctctctattccctgccataacatcttttgccacgtatagctggaatta

SEQ ID NO: 17920 - DNA, 405 bp, Homo sapiens
agtacttctagaattaattaaggcggggacctcttgattcatagatttaaaatattctggcataaagggccttgtcccagatctcaagtgttagggaagcacttggtcattttcttccctttctggcatattagagaaaatgatgtgtacataaaatttcctcataattttcagcttcacaatttatactacggtaatgagcgccggtagcccagacaagtacatgactaggatcagaaacccgagtagaaagtaagtcagcagaagagcgagttcgcccgtgctgtgaaagatgattttttaaaaaatgaaattcttgaagagctgcaccttaaaaaataagacaaagtgaaagtattgtattatgttacaaacaatgcaggctccttcctcatttaactttac

SEQ ID NO: 17921 - DNA, 446 bp, Homo sapiens
agtacttctagaattaattaaggcgggtaggcaggaaagacaagctgataaaaaggagaaagagaataaggaaagagattataagtcccattactgatagaccagtctcgtttcttcccattaggggatctgctttacatggtaactagtatctaactgtatttgatcatataatttatggaaactaaatatagtcagattctctcaatggaagctaggtaatactactattactaacaacaaaaaccctaaacttgtaccgagtactcattttcaggaattgttccaagtgctttgtttacattaactgatttaatccttatacaagtcccaggagataggttgcaatattttcctgtttttacagatgaggaaccaaggcttagggaagttaagaaacttgtataagtccgaggtctggagattgagaccatcctggctaacac

SEQ ID NO: 17922 - DNA, 137 bp, Homo sapiens
agtacttctagaattaattaaggcgggaggggccttcgtgtgaaaatcccttgtggggtttggtgtttcactttttaaaggcatacaacttaggattcataactacatatatacggatagaagtgcatgaacagaaa

SEQ ID NO: 17923 - DNA, 500 bp, Homo sapiens
  misc_feature 24, 27, 28, 36, 40, 47, 79, 144, 195, 201, 241, 244, 271,297, 300, 313, 324, 335, 374, 400, 421, 433, 460, 464, 490: n = A,T,C or G
ttgacgtgttttgcgacccggtcnggnntcaaaagntggntaccggncccctcctcgagagtacttctagaattaattnaggcgggaaagacaaattttattcttcataaagtgatgagcatataataattccaggcacatggnaatagaggccctctaaataaggaataaataacctcttagacagcgccggcncaggcncagggaggcccacagcgccggagcaggtgcagaaagtcanaangtccatgaggggaaggtgagacacctngggtaaagaaaaaaaaatgcgccacnaancggtgtctgggtnattcacagacnaaagttttttnccatcagcccttgcgctgggccccagggaccctggcatncgtggttcgcgcccagggtgcgcctngggagactaggggtaccccanctccgacagaanccctatgagtggaagttgaagtttgtnggangagaggtgaggcaccaagggcgaaanaaaaaaaaaa

SEQ ID NO: 17924 - DNA, 397 bp, Homo sapiens
agtacttctagaattaattaaggcgggacagtttgtgtagggctcttgtaagttaaggtaagggcttcagactttactatcgagtcctatagaagtctatatacagattcatttgattgttccatacaccgtcttgcctgtaaatattaatttggatgttgatttttatttaatataaaaacagaaaaggggtcaggcgcggtggctcacacttgtagtcccaacactttgggaggccgaggcaggcggatcacttgacgccagcagtttgagaccagcctggccaacatggtgaaaccccatctctgctaaaaatacaaaaattaaccaggcatggtggtgcctgtaatcccagctactcgggaggctgaggcaggagaatcacttgaacctggga

SEQ ID NO: 17925 - DNA, 351 bp, Homo sapiens
  misc_feature 8, 13, 22, 23, 30, 338: n = A,T,C or G
agtacttntaganttaattaannctaaaanttcagttcctcagtaatattactcacacttcaagtgctcaatagccacatgtggctagtgggtacaataatggaccatgaaggtttccatcaccacagaaatattagtagacaagtctgttctagagcctagaaaagtatgtgacactataattattgaatgaagaaatataaaaactattagcattcatggttcaagaagaataacacgaaaacatcaagaagaatgagtatcttcaattttggatctttgtaaaagatccaaaagaatcacaacacaagattatcttattaacttttataaaggcngtaaaatttaggg

SEQ ID NO: 17926 - DNA, 358 bp, Homo sapiens
  misc_feature 41, 42, 46, 48, 52, 59, 60, 65, 66, 71, 72, 73, 74, 77, 83,84, 90, 91, 102, 119, 131, 132, 150, 152, 157, 159, 161,164, 171, 172, 176, 182, 184, 192, 197, 203, 211, 214, 215,219, 220, 242, 244: n = A,T,C or G
cccccctcgagagtacttctagaattaattaaggcgggggnngagngnagcntctatanncttanntgtcnnnnacnacatanngctgannggtccatatgncatgaagcctgattggnccatcatacaanntgctgattgggacattgncnaacantntngcnacctganncccnctgatngntgcattanaaaanactctngtacgacnaanncgtnntccaagtccccacccgacccanangtccagctggcttcacctctcaatatgatgcgttgagtacactttacatatgtggtattcttccctaaaacacataaccacagtctaatcatcaaaaaaaaaaaaaaaaaaaaa

SEQ ID NO: 17927 - DNA, 430 bp, Homo sapiens
agtacttctagaattaattaaggcgggtgtcactccttgccaaagctttagaaagccttcctcttcaatgatccctagggctgtgcgcaccattcccctatagggggcagattctcttgcaccgtctcccaaccgagcaagagctgcttctccttgcatttggagtcgagtttttgtgagatccaggggaaaggttgctaacaaaaacacaaatgcagggaaaaacccacaacattcagagaaacaaacaaaaatctaaaatcataggagtaatattttcccaagactggttgttctcaaattttagaatatatcagaatcagctagggagattttaaaaattagaaatttcctagccctgtgcccatggattctaattcagtaggttgaagagggtttagaaacttgattctcacacagtcccaaattt

SEQ ID NO: 17928 - DNA, 653 bp, Homo sapiens
  misc_feature 507, 592, 597, 613, 626, 629, 647, 649: n = A,T,C or G
agtacttctagaattaattaaggcgggacaagaggggtagaaggcaagaagttgagagaactgatttctcaaaaatattaaaataactgacctaaagatccctagataatagacagggagtgaaatctgaaggaagctcataaactcaatagggtagggacaagatattgggggctttaaagagtggatttggtggaaaccaggaagagaggtagaagggtcaataaggtggaagaactggaaattatggtcagagtattattttagagttgaagtacatttccaggagagtcttcttgggtaggagacctaggtacggccaggaagagtagactgctgcagcaataagaaggcaggacctttttgaagaaattaatacaattgtgagaccacaattaacagcaagaattagctacaaatgtttttaacataagaacacttgtttcggtaaataatatcaagagcaaagaagagagtttttgaagaaaggttgatgaaacaagggtntagaaacaagaagtttagagtattaaacttcctgtactccctaccataaaaaataaggaggcctgtgaaaacaagtatttaactncacangatgagatcatgctanaatagcctttttnttnttcaaaaaaactcttccngngaaa

SEQ ID NO: 17929 - DNA, 235 bp, Homo sapiens
  misc_feature 206, 207: n = A,T,C or G
agtacttctagaattaattaaggcggggtgaaataagttggctaagtttgagacaaacttgattcatgtcctaattaatgtcctataaggaagtaaaacataacctttgggatgttcttttcttctggaaagatgtaatttgaatctgccatggacaaaagcatacaatttagcatgcaatttctatagttaagctctaaccaatnnaaaaaaaaaaaaaaaaaaaaaaaaaaaa

SEQ ID NO: 17930 - DNA, 332 bp, Homo sapiens
  misc_feature 73: n = A,T,C or G
agtacttctagaattaattaagggggactggtcacatagctacatgagaagcatggtgtggatgccagaccangcaccagatgcacatcatgaatcttcatgtttaccttagacactgataagctggttcatcttgacccaccactttgggcctttataataagactatcattaagcagtaactatgtgaccattccaggagtttagttttcaggacttggccaaagatccttgtcctggctacagggatacgcaagaactgagtaaaataagcctattgcattgtttcctgcccatacctcaaactaatattcactggatagaatcagcag

SEQ ID NO: 17931 - DNA, 466 bp, Homo sapiens
agtacttctagaattaattaaggcgggagacttcatcttttacatagcatttctcatacaagccacattttattgacaagttaaaaatggttttgcacagtatcctctttgattttagatgaacagacattctcgttctctaaaatagtggttctcaatgagggtgttttatcccacagaacacattagccaatgtctagagacatttttggttgccacactgcacatggatgttggggtgccaatagtatgtagcagatagagaccaaggaagctgctaaatatgctacagggaaagcacctccaccctcaacgaagtgcaaaatattaatagtgtccagacagagaaattctggtctagaagttaaagggctgtaatgttggagcaattatttgataatatgttagctccgatatggaaatgtctaaccctgtggatttagtatcattataattaatgatgtga

SEQ ID NO: 17932 - DNA, 440 bp, Homo sapiens
agtacttctagaattaattaaggcgggaaacaggatgaccaaactggcttgtgcccattgatgccaacttaagaacacagctagtcttctgattatttaagagatcatagaatatgtgaaaatgcccgttttttagtatatatatcatgacttttaaaaaatcaactttattgtggtagaacttacatgcagtaatacagtgcatacattttatgtgtacggttttgacaaatgtatactcccaaccacccaactgtttttttttctctaagagacagggtttcacagtgttgccaggctggagtgcagtggcgtgatcatggctcactgcagcctcgacatcctgggctcaagctggaggccagctaattttttaaattttttgtagagacagggtctcactctattgcccaccccaatttttaaattaaacttcaaaa

SEQ ID NO: 17933 - DNA, 409 bp, Homo sapiens
  misc_feature 286: n = A,T,C or G
agtacttctagaattaattaaggcggggagctaagaattcctgcccagcaagttggtttgcagatcagaggcagtgtgtgagaagtacttaacccagcacctggcatatagtagatgttcaggacatcgtaacaggaataagggagacatctcacaaaacattttgtgagaaaggatcagtttctatctagtcaatgtcttaaacattcataggttgttcatggtgggagctgctcgaggaatcatcctagttttatggaggaggaatctgaagctggaggaaatntctccttcaagattacttagttaaaggcaaacaggttcatagccagtggctcttcaccaacccacaaaaaggcctcagattataattttgaagattaagtatatgaaagtgctatttgagtga

SEQ ID NO: 17934 - DNA, 280 bp, Homo sapiens
  misc_feature 226, 238: n = A,T,C or G
agtacttctagaattaattaaggcgggatatttttgagtttgaggtaatcagttaaaataagtctttcatattttaatccatgtgatcaatttatttagatcccaaatgcgtttcacatctcaaagtaaatactaaaaagcaaggggtgtggtagtggagggggtgtaagggagatcattatgagtactaactcttaagtttagattttttttaaaaaaagaaaanccaaaaagctgngcacatcttaggtccatcacatccaccagtcagaattacatc

SEQ ID NO: 17935 - DNA, 252 bp, Homo sapiens
  misc_feature 183, 190, 196, 203, 205, 217, 219, 227: n = A,T,C or G
agtacttctagaattaattaaggtgggggcgggcctctgtgtgagcgggagtggttctgggctcatgttacattttccactggaaaaacagccccattttgaatgttggctctgagcgttttaaaaattgcaaatatatccagtttcccaaacgagtgctcaccaggaaaaaaaaaaaaaaanaccaaanaaaaanaaagaananaaaaaaaaaaananacccatgntcaaaaaaaaaaaaaaaaaaaaaaa

SEQ ID NO: 17936 - DNA, 413 bp, Homo sapiens
agtacttctagaattaattaaggcgggaggctactcaaactatagttacagactaaatcagcaacagcatcacttgcaagtttgcttgaaacagaaattcttgggccccaccccaatctaactgaatttgagacttgggaagggtgtggagagacaggaaactatgttttaatgagctcaccaggcaatttttctgctttggactataagagatcatgtaattgatttctaaaagttccttctggttatagggtctgtgactacagctctgcaaaaatctgagcaaagaacctcataatcaacagatgaaaactggtaattcaagtccttaaagagatatttaaccatttaacctaaacaggatatttaaacattctagcacaccctaatgaaattatggattaacaaatctt

SEQ ID NO: 17937 - DNA, 365 bp, Homo sapiens
  misc_feature 351, 357: n = A,T,C or G
agtacttctagaattaattaaggcgggggaaagaaaaacagaacaaaaagaaaattacaaacaaaatggaagacttaagccctaacatatcaataactacatttaataaagtgaactaaatacagcactttaacgatggggaatggcaaagtgaattaaaaagcatgacctaattgtgtgctatctatgacgcatgatttcaaatgtagcaatataggtatgttgaaagtaaaggatggaaaaatatatcttgtaaatgttaatcgaaagaagcaagagttgacatattaatgtcagatacagtaggaaaatctccaatgaattagaagcaaactaaaaaaaaaaaaaaanaaaaanaaaaaaaa

SEQ ID NO: 17938 - DNA, 274 bp, Homo sapiens
  misc_feature 260, 274: n = A,T,C or G
agtacttctagaattaattaaggcggggatcagggcttagagtctgggaacccggtttggctttttgccttcagcaaccacccagcacctgcaggtgacagcagcactgagttaagagttttcactgaagacgagagtgatgcgggtgtccactctgcccttggcactgtgagagcatgaggctgtttatggcactccctctgcccccagggagctagtttccttggagagacactgggaacagaaaaaaaaaaaaaaanaaaaaaaaaaaaan

SEQ ID NO: 17939 - DNA, 437 bp, Homo sapiens
  misc_feature 294, 297: n = A,T,C or G
agtacttctagaattaattaaggcgggtgcctgtgatcccagctacttccggaggctgaggcaggagaatcgcttgggcccgggaggcggaggttgcagtgagcagagatcacaccattgtactccagcctgcacaacaagagtgaaactctgtttaaaaaaaaaaaaaatcaagtctgtaattgttactgttgctgaatcctgctagcaaatcaccaggctagaggtgagggttgagtgacccctttagaacactttcagagggggcttgtcagcaggtggagctggctgtangancagggttggaaatacgtaagtagatttagagaaagaaaagctggtgaactggaatccctaggataactagactcggacatcctgtgtgataggggaggggagcatttggctttctcctgttggtcctaaattaaagggag

SEQ ID NO: 17940 - DNA, 565 bp, Homo sapiens
  misc_feature 20, 23, 29, 32, 41, 42, 47, 53, 54, 58, 124, 152, 181, 204,227, 240, 245, 267, 269, 284, 285, 290, 291, 293, 300, 301,305, 307, 311, 315, 319, 327, 328, 329, 330, 332, 333, 334,335, 340, 349, 391, 495: n = A,T,C or G
gccgtcgttttacaccccgnaanaagagntanccttgatgnntgccnggcccnncctngagagtacttatagaattaattaaggcggggggactgcaaaggccaatgttggtgctggcaaaaanaagtgagctggagattggatcacagccnaaggagtaaaggtgctgcaatgatgttanctgtggccactgtggatttttcncaagaacattaataaactaaaancttcagaacaaanaaaanaaaaaaaaaaaaaaaactgggngnccccccccggggggnnccccnntnccccccnnaaangntggnattnaccncccctttnnnncnnnnttttnaacgtactnaaattgcaccaggctctcaaactgtcctagggattgggccangaccagcagacctaattgacaaagtcactggtcacctaaaactttactaggtggactttgatatgacaacaacccctccatcacaagtgtttgaagcctgtcanattctaacaacaaaagctgaatttcttcacccaacttaaatgttcttgaaatgaaaataaaacctattcc

SEQ ID NO: 17941 - DNA, 257 bp, Homo sapiens
agtacttctagaattaattaaggcgggggttattaaagaggaaatttgagccagctgattacaaacacataatcaaagcttctgagcagtcacaaaatgagataaaggtttcagtgttttcacgaaaaactgatatactaattcctgtgagtaaatgagatcttcaagaaagagaatgtaaaaattgaagaacttaggacatgttgttcaatcttagggaatagacaaaaaaaaaaaaaaaaaaaaaaaaaaaaaag

SEQ ID NO: 17942 - DNA, 434 bp, Homo sapiens
  misc_feature 415, 432: n = A,T,C or G
agtacttctagaattaattaaggcgggagggaactaggcaaaccctggattgacttgtgtgaagtcaggtagtgaagatgaccaatatgtaataaactggtgactctgggccacgtgccatgcaatggcacatcctcatcatcacagctgatcttgggcaccactacttggtagaaatctccagaaatctggaatcctggacctggattctcttagtatgctgtaggggctattatatgtagcctgtcctcaccatcatcctgaaggggtagaacaagaaatcaacagaatttacttggaattttggttccaaatggctgtaattaaagcggggtgtgtggtgtgcatggaagatgcctgggctgtctttgctatatgtaaatagagccattggatctttatttttgattaattngttctgattttttggtngg

SEQ ID NO: 17943 - DNA, 458 bp, Homo sapiens
  misc_feature 397, 438: n = A,T,C or G
agtacttctagaattaattaaggcgggggacgaaaaaaaaaggagagattcagtcataatgtgatagaattcacaaaactttattgactaagtgcagtgaagtcagaaaaaaattctatcaagtctaagtattatccttaagtatgccttccctagttacacatacaaacatgccaacagggaaaacagagaaagtatataacatgattctctctaatatatttaaagtgtaacattaacatacataatccagagaagccagccatttctgatcaccacactcgaaataagcagaggattttttttagttgaaaaaatacttaatagtccatcaaaaaaaagaacaaggtttttctgaagtgatacactattcactcacatgaaacagacacatgcncaagatggcagttaaaatttatttaatatataattgcattncagttttcttaaaacaaaaa

SEQ ID NO: 17944 - DNA, 452 bp, Homo sapiens
agtacttctagaattaattaagggggagggggaagaaaaaagaaacctattggtattttattagaattactttagaactatgaatctatcgtgggtggtgattggctatctaggcaatgttgttttcttattgagaaacagcccaagttggctttttccctgaatcttccttcacgtaccctacacttttgttgctaggattatcttagttaatatttttgttattgcaagggtgcaagtatagtattttattctaattttatgatagctttttgatctcataaagaaaaaacattgatttttaaagtacacttatgtattcctatatgtatacttgtcactattcagcattataattattataaaaacagtaatgtttctattaagcttaagcaccaaactggcaaaaatactattaataaaaataattaatttgaggccgaaaaaaaaaa

SEQ ID NO: 17945 - DNA, 358 bp, Homo sapiens
  misc_feature 53, 131, 323, 329: n = A,T,C or G
taagggaacaaagctgggtccgggcccccctcgagagtcttctagaattaatnaggcggggaggaatgtgggtccaggcccagaggaaaaggttgaagttatagccaggcctgtgggcgaggccgcagcanggcggcataggggaaggagccaatgtgttatgcatgtagaaaataggtaactaccgtcttttgctctgttactattcaacatttgatgtaaaaaacattttctatgcagctaaaagaattgtttttaaaaataatttctaggttttctgccttgctttaaaacatcttttctttttttttgaagacaaaatntcactntgtcaccaaggctgggagttcaatgggaa

SEQ ID NO: 17946 - DNA, 466 bp, Homo sapiens
  misc_feature 372, 400, 427, 428, 431, 433, 454: n = A,T,C or G
agtacttctagaattaattaaggcgggtgtgtgtgtgtgtgtttgtgtgggtgtgttgagagagacattttaaccctctcataacaagagtataaatacaaactggcctgtgttggccataaggtagctgaccttctgctgttccttttatatggcccagttacaagaaatcaaagagtatgcagatactctgttttccagggactaaatctataatctttatcatagtctaagactcttgacccttttcttttaggatagccattatacaaaagcaaagccaaatgtagccacaagatgaatagggtaatgtgctgtaactatgaagatagccaggagtaagaagtcagttcactacgtttgttctcttgnccccacctcaccattcttttctaaaatnggccttggtctattaatgaaagccctnnganangagaaccaaaaaaaagaaagngggactttcttt

SEQ ID NO: 17947 - DNA, 552 bp, Homo sapiens
agtacttctagaattaattaaggcggggggtttctcataaaatattttttacaggggttcaacagaaatatttggtggttacctgcaactatgaagctaggaaacttggagttaagaaacttatgaatgtcagagatgcaaaagaaaagtgtccacagttggtattagttaatggagaagacatgacccgctacagagaaatgtcttataaggttacaggtacaaatgataagcaatgtacttttagcattaatttttatgtaggatgcctgttcattacatgaattttttaataaatgtaaaataacataagtcaagatgctttttcctaataacttcttattttgggtcttgtcaactttaaaaattatgtgaaaggataactgtatgctatgaatagtatttttaagaagatgtatagttggaagtaattttaactcttattattgatgtttatataacagggaaaagtggaaaacaaaagtttaaaagtgagaaaatggggaaactgtactgtaaaaagatgccaggtctttaaaattttaaggttta

SEQ ID NO: 17948 - DNA, 449 bp, Homo sapiens
  misc_feature 17, 21, 32, 34, 37, 38, 47, 93, 102, 116, 178, 240, 247,248, 251, 254, 255, 260, 262, 269, 271, 274, 296, 302, 418: n = A,T,C or G
acactgcgcggtttccnttcnatctccctctnanaannctgattccnaataaactgtgcacttatcgtattgtctggtgtgtatcataaaagnataactatnaaatagcaactaancccctagtgggtcatgtggttaccatttcagagtactcaactggaccatacctgcctatatnggaccctgatgcttgttttcatttgtcgggcccaaaaggtttggggtgggtcaagaatcccntcccccnnccngannttaananaaacacntntcnctcacaggaaaaatcccccccngaaatntataaggtcaaagctgcttttgtggccaaattcatcttttagagaacctgaaaggtaagtttggtattaggaacatctcttactcccaaggagtttacctacttcttaagttacanaaacaaatatcatttatagaaaaccgaggaa

SEQ ID NO: 17949 - DNA, 329 bp, Homo sapiens
  misc_feature 7, 19, 21, 24, 28, 30, 33, 35, 36, 39, 43, 44, 46, 54, 65,70, 73, 238, 239, 314, 316: n = A,T,C or G
ggccgtngttttacacccngnaanaagngntancnntgntggnngncgggcccntcctcgagagnacttntanaattaattaagtgcgggagctgtcggggcggggcggcaccgccgagctccgagctttccagaagcaaaaacaaaaaaagttcgggtacagcggctcacacctgtaatcccagctcttagggagatggaaactggaggatcacttgaggccaggagttcaagaccnncctgggcaacatagcaagacccagtctcttaaaagaaaattaaaaagaaagagtaaataaagttccagaagcccnanaaaaaaaaaaaaa

SEQ ID NO: 17950 - DNA, 386 bp, Homo sapiens
  misc_feature 111, 217, 269: n = A,T,C or G
agtacttctagaattaattaaggcgggctgagagggcccctgttaggggtcatgggctgggttttactatatgataggcatgtgattggtgggtcatgccttacaattcangtgggacagatacaaatgaaatagtttcttaatgaggtagaaagaggaagttattaattcctgttcttgttggattctaacatacaagctaatttgaattcatcancctaagcaaggttgccttggattttgaagttttcttaaggaataaactgtanagaaaccatagggccaaccagatggatgatgaaatggaaaaaacagcaattaaatcttttagaaagtattacaaattaataccttaaaaaccctgtatcttgagctagtagcaaaac

SEQ ID NO: 17951 - DNA, 296 bp, Homo sapiens
agtacttctagaattaattaaggcgggttacatgagtcaaataaatcttattgggggacagaattcagcttgtggacttaacaatttccagtctttattctagagcccccgccttaggcattgattacagaggaatgcttttgaatttctaactctagaaattattagaaatctaaaagatctccagatggataaaatgatgccctgtacttttatcagaaagcaagggaaagtacccaatgatctccttttttgattacttttaactaaaaaaaaaaaaaaaaaaaaaaaaaaag

SEQ ID NO: 17952 - DNA, 398 bp, Homo sapiens
  misc_feature 23, 26, 41, 129, 148, 212, 324, 354: n = A,T,C or G
agtacttctagaattaattaaanttntaaaaaaaataatgnataaataaaaaacactggctctattggaactgagcctggctaatgacattgtcttttcccactcacccaaactaggcatttaaaaatnaaacttgactcccccactntgactctatgccaattctatcagtcgctgagtcactgtttgaccctactccaagctttccaatnttctcaggaaccatgctgatatcaagactgtgtcctgtggaatatctaatatatgtgacacccggaggagtcattttttaacacctcccttctctatacaacaaaattattntcaataatggccatgagtatgatgataatnatgtctttataataccgtgtaattgacaatatcatacataatta

SEQ ID NO: 17953 - DNA, 311 bp, Homo sapiens
  misc_feature 290, 300, 307, 309, 310: n = A,T,C or G
agtacttctagaattaattaaggcgggatagaaagtgatagaagtgggacctcacaaagacaatcacactaatgttaactgagaacatacccatttagtcctcacagcagccccttgaggtaggtgctgtcatcatccacattacacagccatttaaaatgagttaggggcctggcgtggtggctcatgcctataatcccagcacttcaggaggctgagactggagaactgcttgagccctgggagttcatgaccagcctggacaacagggagatctcttcctacaaaanaaaaattaanaaaaaananna

SEQ ID NO: 17954 - DNA, 622 bp, Homo sapiens
  misc_feature 7, 29, 31, 34, 39, 43, 45, 48, 51, 53, 54, 56, 58, 61, 62,63, 66, 68, 69, 70, 72, 80, 81, 86, 93, 101, 115: n = A,T,C or G
agaaaanactggccgtcgttttacacccngnaanaaganatancnatnatnanngncngtnnnttncnnnanagaaaaannaaaancctttangcgggcgngcactttgctgcancaaaaccatacatctgagcttcccttagcctccattatcccaacatgttgaataaaattattgggaggcaaagatttatagcgactatatggacagagaagccatccggaagccacaaaagctctgtctgagccaaagaaacattttcataaatggtaaggtgagaaacttaaaatgaaaactaaaaagactgatactttggaggtctgcaaatagctacagaatcagtttcaagatctccatctcaaagtgtcagtcacttcaaaaacgcatcctgctacgatggtggctcaggacacttgtgtgccagggcagtggccatgctgtgcaagtcagaggtcaccgcttccacattccgacatctgtctgtattttcttgccctgaaacaatagaaggggaactaggctcatttgctcccactttgtttaacctaattgttagacacaaaagataatttcccatacttagaattattttttccttttccccccattctcatttgtctc

SEQ ID NO: 17955 - DNA, 184 bp, Homo sapiens
agtacttctagaattaattaaggcgggaagacgctgctgggggaataggcgggaaggtggagactggaagccagcgggtggagagaaggagatggaaggaaaagctgccgccacaggaacccgtgctgcgaggaatgggagagactgaggggaagaaaaaaaaaaaaaaaaaaaaaaaaaaaaa

SEQ ID NO: 17956 - DNA, 816 bp, Homo sapiens
  misc_feature 230, 261, 266, 274, 281, 282, 287, 291, 295, 297, 298, 299,300, 305, 307, 312, 313, 316, 317, 320, 321, 322, 323, 324,328, 331, 344, 348, 349, 350, 358, 362, 366, 368, 377, 379,380, 381, 382, 383, 386, 387, 404, 406, 410, 415, 416: n = A,T,C or G
  misc_feature 417, 419, 424, 427, 434, 436, 438, 451, 459, 460, 462, 468,479, 493, 494, 495, 496, 497, 499, 505, 513, 552, 569, 570,580, 586, 587, 589, 602, 612, 613, 614, 626, 630, 637, 650,658, 669, 678, 682, 683, 686, 688, 696, 697, 704, 707: n = A,T,C or G
  misc_feature 711, 721, 722, 725, 733, 740, 742, 751, 762, 769, 770, 775,777, 779, 789, 790: n = A,T,C or G
agtacttctagaattaattaaggcgggaggcagaggttgtagtgagccgagattgcgccacttcactccagcctgggcgaaagagcgaaactccgaataaataaataaataaataaacaaacaagcaaaccaaaaaaaaaaaaaaaaaaaaaaaaaaaaaaaaaaaaaaaaaaaaaaaaaaaaaaaaaaaaaaaaaaaaaaaaaaaaaaaaaaaaaaaaaaaaaaaaaangaaaaaaaaaaaaaaaaaaaaaaaaaaaaanggggncccccccnggggggnnccccnattncccntnnnnggggntnttttnnccnnccnnnnngggnggntttttaaaaaggngggnnngggaaaancctngggntncccaaattnannnnnttnnaaaaaatcccctttttncnaggnggggnnnanaccanaanggccccncncnattcccttttccnaaattttnngncccccnttgaggggggnaaaggggaaatttnnnnncntttatntttttttntgaaaaaaattccccgttaaaaattttttgtaaaacacnctttttttttttttaanncaaagggggncaaaanntngggcaaaaatttntttttttttnnnttaaaaaaaaanttancccccanatagggggggggnggggggtnttccccatttnggggaaaanaaanngtncncttttttnnaaaaganggngggncccccccccnnatnaggggggnaaaaaancntttttttgnggggggggggnccccctnngggananancccccccccnnaaatttttttttttgggggggggggg

SEQ ID NO: 17957 - DNA, 308 bp, Homo sapiens
  misc_feature 298, 303: n = A,T,C or G
agtacttctagaattaattaaaaataaaatatctaacggagtattaagtaactattaacacccattaccctgttggactgaaaccattttgctaagtactaaccagtgtcacacaatctgaaaatccatgaggcgtcatccctcacctcccccgccttaattaaggcgggacaatgatcgggatataaaccaggcattcgaactggcagtggcaaccccctttgggtcccctcccgttgtatgggagctctgttttcactatattaaatcttgtaactgaaaaaaaaaaaaaaaaaanataantaaaa

SEQ ID NO: 17958 - DNA, 353 bp, Homo sapiens
agtacttctagaattaattaaggcggggggaggtgatacataaaattcaaacatgtagtacaaaattgatttttatcattttttcttaaccataaaggtatcttttagaaattagtatttcttgtagaaaaagcacctcaaggtcagcaattccttaagtttaacaatttttgttacgtttaggtaaaacctggccgggcacagtcgctcacgcctgtaatcccagcactttgggaggccaaggcgggcaaatcacttgaggtcaggaattcgagacaagcccggccaacatggtgaaaccctgtctctactaaaatacaaaaattagctgggcgtggtggtgcgtgcctata

SEQ ID NO: 17959 - DNA, 793 bp, Homo sapiens
  misc_feature 58, 61, 67, 95, 100, 271, 314, 363, 405, 466, 471, 475, 490,494, 495, 497, 504, 508, 510, 511, 515, 517, 518, 524, 542,544, 549, 552, 556, 562, 563, 564, 566, 569, 570, 571, 576,582, 586, 587, 589, 598, 609, 613, 615, 620, 623: n = A,T,C or G
  misc_feature 626, 627, 628, 631, 632, 633, 634, 635, 642, 643, 644, 646,658, 659, 660, 662, 663, 672, 673, 676, 677, 678, 683, 685,689, 692, 695, 696, 701, 702, 703, 705, 712, 713, 714, 715,717, 718, 723, 725, 726, 730, 731, 732, 733, 734, 735: n = A,T,C or G
  misc_feature 738, 741, 743, 744, 747, 751, 754, 756, 757, 758, 759, 760,768, 772, 773, 774, 782: n = A,T,C or G
gccccccctcgagagtacttctagaattaattaaggcgggtggatcacctgaggtcangantttganaccagcctggctaacatggcaaaacccngtctntactaaaaatacaaaaaaaattagccgggcttagtggcaggcgcctgtaatcccagctactcaggaggctgaggcaggggaattgcttgaaccatggaggtgaaggtcgaagtgagccaagatcgtgccactgcactccagcctgggcgacagagcgagactccgtctcanaaagagaaaacaaacaaacaacaacaacagcaaaacaaattanccgggagtggtggtgcacacctgtaatcccagctactcgggaggctganacacgagaatagcttgaacccgggaggggaggctgcagtganagccactgcactccagccttgggcgacagagcgagactctgtctcaaaaaaaaaaagcctngggcnacanagcgaaaactttgtnttcnncnaaaaaancaancnntttngnnggggcncccccccccccggggggnanccccnttncccntttttnnngnggnnntattnaccccncctnntnttggggggnttttttttttnaaananaaaanatnttnnncannnnnagggggnnntnccctttggcccnnnanntttgaaggnntannnggggnangatnccntgnnccccnnngngggtttnnnntnnaaaananngttnnnnnnaanccntnnccntccnctntnnnnnaaaaaagngaannntttttttnaaaaaaaaaaa

SEQ ID NO: 17960 - DNA, 368 bp, Homo sapiens
tagaattaattaaggcgggagagagtcagggtcgggcagctggaccaggaattaaggcagtcgattgatgtcagagtgggattcaaagtagaactccagtgactccaaggagcaccaagtcaccaaaagttggccttctgtatccatgagttccatatgagtggattcaaccaactgtagattttttacagtccagagatgtctttctcaagtacctggaagccagctctttgaaatgtaacatcaagaatacagtgctccattatggaaaacagtatggaagttcctcaaaaatttaaacatagaactaccatctgactcagcaatcccatttctgggtacatatccaaaaaaaaaaaaaaaaaaaa

SEQ ID NO: 17961 - DNA, 436 bp, Homo sapiens
agtacttctagaattaattaaggcggggatgctcgatgcccaccaatgagtactgcaccaagttcatttccactagcctgtgttacaatttgtgtttctgtatgtttcccttacttgttattctttgtcttccccattagactgaaagcaccgccacggggaccgtgtctaggacataggaggtccttaataaatatttcttgagtggataaatggtgaaccataggggtggcataagagcaaatagagggtagatgagcactaatccattcaccaccctgtttatgggtggtggaccttggatggcctttttcatagtcaaaacatactttttagatctgccttcttgggatgtattcaaggatgctagccgtgtttgagactgtaaatatgtctagtgaatagggcttcaggctgtgtgtgtttgccttgtttt

SEQ ID NO: 17962 - DNA, 419 bp, Homo sapiens
agtacttctagaattaattaaaggcggggcatgttccacatttagatagtatctgcaaatagtaagggatccaccagtttaagttttagctattatctattaaatagaggcgtttggtttaccttgtagtttaagggtttaaatttagattttattagcccacttgtcctttgccactagggggtgctattgcctccctacactttaaagaggtcctcccaaggtcacaacaacctaaattctcagccttctctcccttgccccttcaagttcccaagcacttagttatacctggacctagagctcacttggctgctttattcatgccaatctttcttccttaacattctctccaacctccccaggtcccatcagtgttgagaaggaatctaggccagctcctgggagatgccagttag

SEQ ID NO: 17963 - DNA, 169 bp, Homo sapiens
agtacttctagaattaattaaggcgggaacaatgttaaacagcagtcagagggtttgaaatcagaagggtgaagtgttgaataattagaagtgtcaattctgccaccagccccacaacattggcagttatttacactccaaaaaaaaaaaaaaaaaaaaaaaaaaaaaa

SEQ ID NO: 17964 - DNA, 383 bp, Homo sapiens
agtacttctagaattaattaaggcgggggcaggaggaagtattttaagagccactatggggtacttatttattatttcaatttataaaactgtgcccactgccaagccttctgggtacacgtggaacaataaataatatatgcccatctctacttccaactttgtatttttcctttcttttattagttgcattccccatctcccatttcccattatcagctatcactcctaatcccctgccaggaagacagatgagtgactcccactagatccacaggatgctttctggacaacttggtcagcatttcacttctacacacattccacctcccccttgtaacaataaaatctatttaaaccaaaaaaaaaaaaaaaaaaaaaaa

SEQ ID NO: 17965 - DNA, 352 bp, Homo sapiens
agtacttctagaattaattaaggcgggggttccttgggcagaaggaatatgagataaacctcaattggatacatataaaaatatgaagtgttgaaaataaaggtaaaatatctatttacaaatatttaattgctccaaaagataaatgatgctaaaccaaacatttaaaaaatgtattgtgtgtttttaacacatgtaaaagtgaaatatatgccatcaaaggcacaagagatgaaagggaggaattggaaatatataatttttaaattatgtatgtacatgtaataccatttgaaggtaatctcagcttacattacaatgtacattataaatccaatgtaacaactcatat

SEQ ID NO: 17966 - DNA, 341 bp, Homo sapiens
  misc_feature 7, 29, 30, 33, 34, 36, 37, 39, 43, 46, 48, 49, 50, 53, 54,56, 64, 66, 68, 70, 78, 81, 86, 87, 96, 107, 118, 120, 126,127, 259, 260, 261, 262, 263, 274, 276, 277, 278, 282, 291,292, 293, 294, 295, 300, 302, 307, 310, 322, 324, 325: n = A,T,C or G
  misc_feature 327, 334: n = A,T,C or G
agaaaanactggccgtcgttttacacccnnaannannanatanccntnnntanngnccgtcccntncnanaaagaaanaanaaaannctttaagcngggtcgccagnactacatgctngngtactnngtaagtcctgagaaaagataataaagattaatttgtaacaaaaaaaaaaaaaaaaaaaaaaaaaaaaaaaaaaaaaaaaaaaaaaaaaaaaaaaaaaaaaaaaaaaaaaaaaaaaaaaaaaaaaaaaaaaannnnncccccccccgngnnnaaanccccccccnnnnnttttngnatggnccncccccccccccncnngnttaaaanaaaaaaa

SEQ ID NO: 17967 - DNA, 431 bp, Homo sapiens; identical to SEQ ID NO: 17728

SEQ ID NO: 17968 - DNA, 614 bp, Homo sapiens
  misc_feature 30, 31, 35, 37, 40, 42, 47, 49, 56, 62, 67, 147, 210, 270,275, 277, 319, 324, 325, 328, 339, 357, 360, 366, 373, 377,395, 402, 412, 416, 417, 425, 433, 442, 444, 460, 467, 474,475, 484, 496, 517, 537, 542, 550, 560: n = A,T,C or G
agtacttctagaattaattaaggcgggggnncatnanaangngtgananataaatntgctgnctaangaaagccacctgctatacacatatataagcaataaacgttatagagcagattgaaagaaaagagtgggaaaagatacctnatgcaagcactaatcataagacagctgtggatgtatatataccaaaaatccccacaaagtaanatgtttgaaagcactagcaaacttttcagggaatacatgacgggctgctaatatgaattntgatngncaattttccagggggaatattgtcccaagctggcttattgantaacnntancagcttgcaangctcaatatgcaagaagntgnatagcncaagggncaanaaacacgaaaataagtcncaaattnacagctttgncctnntcacttanacaactcnctcttcttngngttaattaagggtctngaccttnacgttannaaaaaaccntaaattcattcntaacgattattttggggaagnaaaatttataaaccccattnacccnctccctgnttaaatgggnacccttatttaaaaccttttcatttaattggccaaaaaaataaaaaaaaatttt

SEQ ID NO: 17969 - DNA, 420 bp, Homo sapiens
agtacttctagaattaattaaggcgggggtcaaacgacgagattgtgaagaatctaatatggatatatttgatgccgacagtgccaaagcacctcactatgtgctttctcagcttaccacggacaacaaaggcaactcaaaagcgggaaatgggttggtattcacattttttaaaattctatcatcattatgcaaaacaaacaaacaaaaaaaattcccaatttttcctaattgctgagctcaagtttgcatataaagcaacagtgctaattttatcattgaaatacatgaaaattttaacttaaaattaccaacttttactagatagaaaataaaataatcatagattctagcaatagatatcttattatcagtatagttaggtagtagaaaatgaaaataatctgttctgaaataaat

SEQ ID NO: 17970 - DNA, 431 bp, Homo sapiens
aaagctgggtccgggccccccctcgagagtacttctagaattaattaagggggtgaagggaacattttaaacactgcaggacacaatcagtaaagtatagaatgtgaataatccttcagaagaaatgagtcaatttctacaacaacaaaaaaatagtgcaaagaaaaataaaaacaggtggagggggatcctataagttaaatgagattcaagtgacatatcaattaatggctttatcaatcatccactaactattgatcaatcatcttatttgacttccaattcaagcaggtaagctgtagagtgtgtgtttgcgtgtgaccatcatgggtgtgtaacactaattattaagaaattactgtcaagcgtggtggctcacgcctgtaatcccaacacttcaggaggccgaggcgggcggatcacaaagtcag

SEQ ID NO: 17971 - DNA, 324 bp, Homo sapiens
agtacttctagaattaattaaggcgggtgacacttggtgacacaaacatctgacaaaagagctgtaccctttatattttcaaagactttctacaaattaaggaaggcagaagacccatttaatgggcaatggacttgaagagacactttaccaagaatatccaaatggccacaaacacacacacatacacacacaaatgggaatgtgttcaacttcattagtcattatggaaattaaaccacaaggaagcaccagaacactgcagcagaagaactaaaatggaaaagacgaacaaccaactatctgcaagaatatggggcaaat

SEQ ID NO: 17972 - DNA, 219 bp, Homo sapiens
agtacttctagaattaattaaggcgggtcagaggactgtaatgatagaattaaattagtgtcactaaaaactgtcccaaagtgctgcttcctaataggaattcattaacctaaaacaagatgttactattatatcgatagactatgaatgctatttctagaaaaagtctagtgccaaatttgtcttattaaataaaaacaatgtaggagcaaaaaaaaa

SEQ ID NO: 17973 - DNA, 421 bp, Homo sapiens
agtacttctagaattaattaaggcgggttacaagtgacttttggaaagtacacattggggtgtacaaataaagtactttctctgaatttcattagctacattaaaaaaagaaaagatcaaatgcaatagatagcactgtaatagattttgctacattaaaaaaaatccatttgaatacacagtgaactaaaacaccagagtggctaaaaagtcccttcatgcatatttacttagcagagagctcttgagaaagacccaaccaataaaccccaaccaaagcaaatccagctacttctctagctgagagggtggaatgactccaaaatattgtttcaagctcaaaaagcctaaaacaactccacataaaaaaacaaaaatctatctaattggacatttacctttttggaaataaaaggcccag

SEQ ID NO: 17974 - DNA, 274 bp, Homo sapiens
  misc_feature 274: n = A,T,C or G
agtacttctagaattaattaaggcgggggacagggtcaaaccactgttgcggtttgtctgtgtgtgccaggaaaagcgtgggtggatacagtaacaagctctggaaatgatgttggatgaagagtgagggctcgagtcaggtcctagggagtaaccatgggactgagcagctgaggtaggaaggaagagaagactgttggcagaggttaagtccaagaattaaactttaatcattcaaatttaaaaaaaaaaaaaaaaaaaaaaaaaaaaaaan

SEQ ID NO: 17975 - DNA, 407 bp, Homo sapiens
agtacttctagaattaattaaggcggggaaaaacaaaccctcaccagacaccaaacctgccagtgacttgatcttggacttctcagcctccagacctgtaagaaatatgcttctattagttataaatttcccagtctaaggtattttgttacagtagcacaagcggactgagatgccaattatacaaaagcatgcaaaacgtgctctggtgttcagtttcactgtcataaaggctgaactatttaacttaccattgtaggagagattcagtctgctactattgatgtattgcctttgaggcaagcaaatatcttcacacactcttttacctctgcctaaaatttgttccctgcccctcttattaagatttaacacaaatgttaggtcttctaacaagtcttccctga

SEQ ID NO: 17976 - DNA, 776 bp, Homo sapiens
  misc_feature 47, 443, 520, 539, 555, 562, 601, 610, 616, 620, 631, 638,639, 649, 652, 660, 663, 677, 678, 680, 689, 690, 694, 695,696, 704, 706, 708, 710, 712, 714, 716, 727, 730, 734, 740,742, 744, 750: n = A,T,C or G
tttgtttagttgactaatacttgccattttcccaggtttcttgtttnggccaagattctggcaataatccatacttgaaatcatttgaagcacctggtatcaatccatacttgaaatcatttgaagtacctggtatcaatccatacttgaaatcatttgaaggaccaggcatcaaaccatacttgaaatcatgtgaagtacctagtacaagtaaaaattctgaattaataatggtaataaagatctgtctctcatcagagtcagaaaacagaaattatatttatatcctacaggcattatgatagaatttcatagtatgagttaaataaaactgtattttagtctaaaattgagatgtcttcctactttattatcacaattaaacaaaataccattcaactatagtagaagaaattcagttaaaaaaattaatcatgggccangcacagtggctcatgcatataatcccagcactttgcgaggctgaggcagaaggatcacttgagcccaggagtttgcnacccagcctgggcaacatngagaaacctccctctnccatttnttcaaaaaaaaatttttaaaaatttagccttgggcaatnggggggtgntgttgncctngcaattccccnagccttnntggggggagngantaattttnganccccggggagtttnncntttaatttnnaaannngggccccntngncntncnancccgggggganacnaatngggaanantngttttnaaaaaaaaaaaaaaaaaaaaaaaaaa

SEQ ID NO: 17977 - DNA, 464 bp, Homo sapiens
  misc_feature 40, 92, 104, 130, 131, 132, 133, 134, 135, 136, 137, 138,139, 140, 141, 142, 143, 144, 145, 146, 147, 148, 149, 150,151, 152, 153, 154, 155, 156, 157, 158, 159, 160, 161, 162,163, 164, 165, 166, 167, 168, 169, 170, 171, 172, 173: n = A,T,C or G
  misc_feature 174, 175, 176, 177, 178, 179, 180, 181, 182, 183, 184, 185,186, 187, 188, 189, 190, 191, 192, 193, 194, 195, 196, 197,198, 199, 200, 201, 202, 203, 204, 205, 206, 207, 208, 209,210, 211, 212, 213, 214, 215, 216, 217, 218, 219, 220: n = A,T,C or G
  misc_feature 221, 222, 223, 224, 225, 226, 227, 228, 229, 230, 231, 232,233, 234, 235, 236, 237, 238, 239, 240, 241, 242, 243, 244,245, 246, 247, 248, 251, 255, 257, 258, 265, 273, 274, 287,289, 291, 298, 300, 305, 312, 325, 349, 355, 358, 362: n = A,T,C or G
  misc_feature 364, 365, 377, 389, 392, 406, 412, 413, 423, 437, 438, 446: n = A,T,C or G
agtacttctagaattaattaaggcggggtttctaaaatanaaaaaaaaaaaaaaaaaaaaaaaaaaaaaaaaaaaaaaaaaaaaaaaaattnttaaattttttnaaaaaaaaaaaaaaaaaaaaaaaaannnnnnnnnnnnnnnnnnnnnnnnnnnnnnnnnnnnnnnnnnnnnnnnnnnnnnnnnnnnnnnnnnnnnnnnnnnnnnnnnnnnnnnnnnnnnnnnnnnnnnnnnnnnnnnnnnnnnnntancctngnngaaaatncccttttnnccagttggggtantnancaaaaangnccgcnccgttcncccttcccaacanttgcccacccctgaatgggggaangggaanttntaancnntatttttttttnttaaaattcccngtnaaattttttttttnaataanntaattttttnacccaaaagggccnnaaatcggnaaaaaccccttttttttt

SEQ ID NO: 17978 - DNA, 437 bp, Homo sapiens
  misc_feature 322, 329, 345, 347, 349, 353, 356, 365, 368, 369, 375, 376,378, 379, 384, 388, 391, 396, 397, 405, 415, 416, 417, 423,425: n = A,T,C or G
agtacttctagaattaattaaggcggggggtgggaaatcaaacaacacagggatggggtagctgccacagtccccaccaatggggtctcctgggcagtgacccggcattctgcctccagtggctgcagtgggagtcctgatctcaggccagggaggggacgtgcaatggtggtccagacctggtcccattcctggccaggctcagtaaagttactggccagtttctgggcctcggtctcccccaggttattcagccttgagagttagtcaccatgcctgtgattctgctcatcttcttgtgtcaaatagggaggggtttttnttggcanaatggtggttagactntnanccanaangagactttncanngaaggnntnnaaaancaanaanacccnnggcctttntaaaggcctnnnataccnanctgggcctgggc

SEQ ID NO: 17979 - DNA, 402 bp, Homo sapiens
agtacttctagaattaattaaggcggggggatagcaggaggagttatcttcttacaaggtcactgccctatctaattagacccctccaccctttgaccctcatttaaacttaacttctaaagaccctctctccagatagttacattgggggttgggcttcaacataggactttgggggaggtggaggacacaattcagttcttaagtatatattaaactttttaatgtggatagttggtcttccacaaaatagagaaccagagtacctactgaaaaattagaaggcagtggaggaaaaatctaataagctatcttaatttagaaaaagacaacttctggctggacatggtggcttatgtctgtaataccagcactttgggaggctgaggagggaggatgggt

SEQ ID NO: 17980 - DNA, 353 bp, Homo sapiens
agtacttctagaattaattaaggcgggagaatcgcttgaatcctggaggcagaggttgcagtaagccaagatcatgccactgcactccagcctgggcgacagagtgaaaccctgtctctaagaaaaaaaacaacacttttttggctaggtattgatgaatgctaaatctttacaattttacacatccaataattggaataatttcccacagattagcttcaggttcccaaaatttcaaccctgcttctcttctactattcacatagtttttgatgctagaacattggacacattaaaataacttcaagagttctggccctgcttaaaaaaaaaaaaaaaaaaaaaaaaaaaaa

SEQ ID NO: 17981 - DNA, 268 bp, Homo sapiens
  misc_feature 21, 23, 30, 31, 32, 35, 38, 44, 46, 50, 54, 57, 59, 60, 61,71, 82, 84: n = A,T,C or G
ctggccgtcgttttacacccngnaacaagnnntanccntgatgntnggcngccnttncnnnagagaactantagaattcttnangcgggtctctatccagttagcacctgccttctttcgtgttacggattaatgctggaacgtggcacggaaacttttccaaaaaattgattaaaatcgattgaggattaaaaacctattgagtgctaggcaaaaaaaaaaaaaaaaaaaaaaaaaaaaaaaaaaaaaaaaaaaaaaaaaaaaaaaa

SEQ ID NO: 17982 - DNA, 294 bp, Homo sapiens
  misc_feature 22, 33, 36, 40, 42, 43, 45, 46, 47, 48, 52, 57, 61, 62, 63,69, 76, 80, 92, 94, 101: n = A,T,C or G
actggccgtcgttttacacccnggaaaaagcgnatnaccntnntnnnngccngcccnttcnnnagaganatagtanaatnacatttattcantnactgcgnaattaaagtaccttcaatggataagacaattgattgagtcgtgaattctacttggtgccctcatctcctgatttattttccgctgatacaagagatgcttatagattcctagtttttatgtgtttgggttgatttctgggtggtgggagcagagcacattggggaggaatatatccgccagtctactcacact

SEQ ID NO: 17983 - DNA, 475 bp, Homo sapiens
  misc_feature 23, 26, 28, 31, 39, 40, 42, 50, 53, 56, 62, 76: n = A,T,C or G
gccgtcgttttcaccccggaacnagngntanccatgatnntnggcggccnttnctngagagnactagtagaattcnttaaggcgggaacagcacgaggcactgggagctgcaaacgcccgcgatactgtcagagacggagaaaggtatggccatggctgacacaaaatgttactcaacatttatcacaggcctaaatggagaacataacgctataaaacccttagataaaaacacaggaaaatttgtatggcctggggttgggcgaaaagttcttagacatgacaccaaaagcatgattcataaaagattgacaaattaaattgtcataaatttaaaattataatgctataaagcaatataaaaatctaaagagaatgaaacacaaaccatggtctagaaataaacatttgtgaatcacacgtctcacaacgtactggcacgcaggatatgtgaagaaccatcaaaacttaacca

SEQ ID NO: 17984 - DNA, 730 bp, Homo sapiens
  misc_feature 18, 34, 143, 158, 187, 221, 242, 255, 332, 372, 399, 433,435, 448, 459, 475, 485, 492, 493, 495, 533, 547, 549, 552,554, 555, 588, 623, 627, 631, 654, 658, 669, 676, 680, 681,718, 719: n = A,T,C or G
taattttttatcatgganctattcctatagattnttactatttcatggctaaaatatttatacacaaaggcagaacttgccgagtcgtagctgatcactttgtctttaaaattccagggtttagtttattactggatgtgttntgtgctctacatggnccaagagaaaaatgtgttgaaattctgangagtggccacttgttagctatctcaccaggtggngttcgagaagccctaattagngatgaaacttatnacatcgtgtggggtcatcgcagaggctatgctcaggttgcaattgatgcaaaagtgcccattattcctatgtttacncaaaatattcgagaaggatttagatcacttggaggaacanggttatttaggtggctttatgaaaaantccgctatccatttgctccaatgtatggaggttntncagtgaagttacngacctatttangcgaccccattccgtntgacccacanataaccnncngaagaattaagctgaaaagacgaaagaatgctgtcaanctttgattgataancnccnanngaatacccaggaaaccatttatgagtgctttgnttagaaccgtttccatttgataaccaaagggtcanctanaaanatgattttaagtacctttttatntttnaatggttgggnttctaangganntggccttctgaaattttgtaagggccctataaatccnnaatttttttta

SEQ ID NO: 17985 - DNA, 429 bp, Homo sapiens
agtacttctagaattaattaaggcgggcgcctataatcccagctacccgggaggctgaggcaggagaatctcttgaacctgggaggtggaggttgcagtgagccaagatcgcaccaccgcactccagtctgggtaacagagtgagactctgtctcaaaaaataataaataaataaataaagtcagcaaagggaaagttcacctccatctcaaaagaatttaatagactataatatctctgttatctactagccaaagagataactcaaaactggcagaggcttgttttctgaatcaccctgttaggagtgagttacccactactgctctgtaaggacagaggaacttttacctggcacggaggtcagccacttgatcagtcatctgccctagcattttgcaagttcccagaatctccctgcgttctttg

SEQ ID NO: 17986 - DNA, 354 bp, Homo sapiens
agtacttctagaattaattaaggcggggtaagatttgccgagttccttttactttttttaacctttccttatgagcatgcctgtgttgggttgacagtgagggtaataatgacttgttggttgattgtaaggaataatcaaggaaattaacatgtggtcatttccttgaaaagaatggataattctatagcagccatggtcacaaataatacaaggtgaagaattagtcaactaaggaatgggaataggataacagggatagactatggactagccaagcaatatttttggtaatagatactctttccagtttggggagcagaagaaaaaaaaaaaaaaaaaaaaaaaaaaaaa

SEQ ID NO: 17987 - DNA, 410 bp, Homo sapiens
  misc_feature 23, 196, 278, 386, 392, 397: n = A,T,C or G
agtacttctagaattaattaagngcgggacgggaaacagctgagctccatttctgtttgcactgaggtgagggagtgttttaggggagaacccgggctaggggagctcaagtgaaaaattacaaaggctggtcagtgtgagattaagctcgctgtgtctgctagctgataattacagtagttaggattctaccttnccagagagaccagaacagaggccatcctgtcctttctgatatcttttcaaagacactcctgaattgcagatttagagacatntcaaaaggacagagaaggattcataatttaagcccttttaaactctcttcagaaaggatgtcagggacctatccccaggtgttggctaaaacaaacagtaaattattntgacanccctnatcctctttcaga

SEQ ID NO: 17988 - DNA, 513 bp, Homo sapiens
  misc_feature 291, 293, 366, 375, 376, 379, 380, 381, 395, 403, 411, 420,423, 441, 450, 460, 461, 479, 481, 497, 499, 500: n = A,T,C or G
agtacttctagaattaattaaggcggggtgggggcagtggaatctgcttatgcaataaaggggaagcccctggaagacctaagtgtccagcaggtcattgactgttcgtataataattatggctgcaatggaggctctactctcaatgctttgaactggttaaacaaggtgactagtctctcaacctcttaaactctttatttccttttttgcttgtttactgtgtgttcaaaattcaaacagtttgttcacatatattaaataatgtttccacgttcggaaatgtagatnancaaagcatgaagtaattaatcagaatatttaaaaatgaatcacttctaggcaaagcagttgtcaagaaatcanaaaaaaaannaannntgtaaatttaaatngcggcccnccacccgnggggggagnctncaaattcgccctattagnggagtcggnaatttacgcnncgctcacttgggcccgtncngtttttccaaacgttncnngacctgggggaaa

SEQ ID NO: 17989 - DNA, 586 bp, Homo sapiens
agtacttctagaattaattaaggcgggggaagggaggggagtggagttttaaagcacattccaaggctgtatttagagacaaaagaaaacacatctgtagtttgtctcaaagctgtgtcttgagactgggatgaaaagaggaaaggaaaaaaaatttctaaaagcagtttgaagctaagctgcttggttacagtcatataatcactgaagtgatcaaccaattcttatagtaaactttttcacagagaaagcaccagacccagttttttgatgatagagatttacttttaagatgttttacccaatgcataaggaacagattcttacaatcttatacagacagttccacaggatagtaaagtgagagtttactcctaactcattatttcagactaagtgtaatctttatacctaaatccgagagaaacaatgggaagaaagggaataggaggagacagcctcacttgtgagcatacatgaaatccagcagattgtaacaaaagaccaaattgggctttcccaggaaggcaatggtggtttccactgggaaaatattaaattttaactcatgatgttagccaatgaa

SEQ ID NO: 17990 - DNA, 464 bp, Homo sapiens
  misc_feature 22, 25, 35, 36, 42, 46, 306, 307, 419, 438, 446, 451: n = A,T,C or G
tactggccgcgttttcacccgnaanaagggaaccnntgctgngtgncgggccccccctcgagagtacttctagaattaattaagggggaaggatgtcagcagcagaaaagctgtgggaccaaaatcagattagtcaaactgaaaaataataaataaataaataaataaatacaccaattggagaatcttgtaaaatatcccacacaattgttcaatttggtgttaaagcttaagtgaatttttcagtgaaacactgattctaaccagtccaattcaatcaaattttatctttctgtctgtattaannctgttttcaccctactgataaagacatacccaagactgggcaatttacaaaagaaagaggtttaatggactcacagttccacgtgggtagggaggcctcacaatcatggcanaaggtgaaaggtgtggcancaggcaanagaanagagcttgtgcag

SEQ ID NO: 17991 - DNA, 527 bp, Homo sapiens
  misc_feature 28, 38, 41, 45, 53, 62, 63, 69, 73, 77, 82, 86, 97, 100,108, 111, 115, 116, 122, 124, 131, 134, 143, 145, 147, 149,177, 207, 241, 352, 478, 501, 502, 503, 504, 505, 506, 507,508, 509, 510, 511, 512, 513, 514, 515, 516: n = A,T,C or G
agtacttctagaattaattaaggcgggngaggaaccanganagancatgtggngaggtgccnngctctntatnacanccagntttnacaggaactantanagcaaganctngctnncccctntnccctaanaangggcattancntntncgtgaaggatccactcctgtgacccaancggcctgccattacgtcccacctgcaacantggggatcatgatttcccatgaggattggagganacagaacatccctctataggatgtttaggctttctatttcttcctgactcagttttggtaggtggcatgtttctaaaaatttatgcatttcttctagattatcccatttgntggcatataattatacatgatagtcccttataatcttttttatttcagagacattcattttaatacctcttttaaaatttctgactttatttatttgaaccttctctctttctttggattgctaanggttgtcaattttattttatttnnnnnnnnnnnnnnnnaaaaaaaaaag

SEQ ID NO: 17992 - DNA, 239 bp, Homo sapiens
agtacttctagaattaattaaggcggggtaagaagaggctagattggtgcctcttatagcactgttgaaactacctttgaaatttagttcacaatcattgacctccctcttctttttcccatgctacacgcatacttacctatacttagtttctgttgatcatttattcaaaaataaatgcctgctatgtacagataaaatacaaagatgaaaaaaaaaaaaaaaaaaaaaaaaaaaaa

SEQ ID NO: 17993 - DNA, 379 bp, Homo sapiens
  misc_feature 23, 26, 28, 35, 38, 42, 45, 49, 50, 51, 53, 54, 73, 265,267, 268, 269, 270, 287, 302, 303, 304, 305, 306, 308, 310,311, 315, 316, 317, 329, 346, 348, 353, 375: n = A,T,C or G
tgattctggccgtcgttttacanccngnaacaagnggnaccnttnctgnnngnncgggccccccctcgagagnacttctagaattaattaaggcggggcatcattggctatgatgtttgaagaccaatctttaacatctgattatatttgatttattatttgagtgttgttggaccatgtgtgatcagactgctatctgaataaaataagatttgtcaaaaaaaaaaaaaaaaaaaaaaaaaaaaaaaaaaaaaaaaaaaaaaangnnnncccccccccgggggggnccccccccccccccnnnnngngnntttnnncccccccccccnggggggtttttataacnantttangggtttctctaacatttttagnattc

SEQ ID NO: 17994 - DNA, 397 bp, Homo sapiens
agtacttctagaattaattaaggcgggcaggaaacaaatgtttgaatcacttaaatagaaggaaagacagagaagtggggctgcagccaaaccagagaacatagcactacctcaaactttccttggcactcagttcaatttgtggtccatgaatctaaagccgaacattaaaacaaaaaacagcagttctaaatggtgaaactgtcaatatggtattattcaaatccaagccatccccttctacccttcattgttaaagtccttgattatctccgtcatcttagggtattcagcttttcctgtgtttatgcagcaaacttatttccaaatgaacatatagctgaccacaatgtaggggctcactgctgtatcttgctctttctgaccaccaagtaaa

SEQ ID NO: 17995 - DNA, 460 bp, Homo sapiens
  misc_feature 23, 52, 108, 143, 168, 178, 185, 188, 194, 196, 198, 203,206, 210, 226, 231, 232, 233, 234, 235, 236, 245, 252, 256,258, 267, 275, 279, 287, 289, 295, 321, 323, 325, 339, 395: n = A,T,C or G
agtacttctagaattaattaagngcggggccgccagtgtttccgtcagtacncgaaggatatcggtttcattaagttggactaaatgctcttccttcagaggattatncggggcatctactcaatgaaaaaccatgataattntttgtatataaaataaacatttganaaaaaaaaanaaaaaanaanaaaaanananaaaanaanaaanaaaaaaaaaaaaaaangaaannnnnngttttttgnaaaaaanaaananacaaaccancgctggcngganccctagananactctntgttgaaggcatctttcaagccctcncncnggttctcagggcancattttccaggcgggtttgttttgcatttcttggagcctctccgagcagcaaccanacgggagatttttattttaagctgttcatgctgggactgacagcctgcagggtttccttgggcgc

SEQ ID NO: 17996 - DNA, 246 bp, Homo sapiens
  misc_feature 216: n = A,T,C or G
agtacttctagaattaattaaggcgggggagggccgcgaggggggtgcatgacagataccaaagctcaggtgctggtaacctcaggcagttacctgccatctccatgcctcagtttcccatcctcctttgtaaaggacccaagttcaccctaatgaacgtggttccccttcctctgtgtgaccttgggcaagtgactttgccactcagtgcctcantttacccctggggtaaaatcaggataataa

SEQ ID NO: 17997 - DNA, 399 bp, Homo sapiens
  misc_feature 337, 338, 339, 343, 355, 363, 375, 377, 378, 379, 380, 387,388, 389, 390: n = A,T,C or G
agtacttctagaattaattaaggcggggggagcgcccggatagctcagtcggtagagcatcagacttttaatctgagggtccagggttcaagtccctgttcgggcgtttgtagttttcgttactttaacctgctaaattatcccatcaagtcccaagagcggacatcgtaaacccttacatttcaagttgaattcaaatcatttttcactggtttcagaatatgctagatagacgtgttttcagggaggaaaaaaaaaaaaaaaaaaaaaaaaaaaaaaaaaaaaaaaaaaaaaaaaaaaaaaaaaaaaaaaaaaaaaaaaaaaaaaaaaaaaaaannncccncccccccccccngggggggncccccccccccntnnnnggggggnnnnccccccccc

SEQ ID NO: 17998 - DNA, 592 bp, Homo sapiens
gggtacttctagaattaattaaggcgggttattatggtacagttttgcttttagtttagactagctccttatttaatcaaagatactcctgttataaaagttcagtagttagaaattgcctctcagaatccattttaattcctaatctcctcttacatgttctaattgcagaccaattttaaatagaaaaaaagaaaaaacaaaccatttgtaaatggcactaagcagttgctgtttgactttctgtattatttttcagaataaaataggagtagaaggatcgtttaatgactaaagtttgatgaattgtacttgcttctgatttacaaagaaataatgttgatttttgctttcagagcatttcatgtggttatttacattttaaaaagatacaatttatgctcatgtaaacacaaaagtgttacatgttttgactaaaagtacatatgttctaaaagggatataaaataatttcaagataatttaaatttaaaccaatctctattttgttataatacctaagtaatacgaagagatgataatatttataactagaagtgggagtttgggtcgtaccaggacccttgcaaac

SEQ ID NO: 17999 - DNA, 421 bp, Homo sapiens
agtacttctagaattaattaaggcggggagggtgggggcggggcttggagtaaatgagaccgtgcagggagaagaaaactaaaaattaaataaaaattcatcaataatatcctcaaagatataagaaactgtattatatccatgaaacaagagaatgctatcaaaaaggaaataaaagtgtcaacagaagggtcagaaaataaagatgaagacatctgctagggaggctgggcagggtggctcatgcctataatcccaggaccctgggaggccaaggtgggcagagaggtcaggggtttgagaccagcctggccaacatggtgaaaccccgtctctacaaaaatacaaaaattagccaggcgtggtggcacacacctgtaatcccagctactcgggaggctgaggcaggaggattgcttga

SEQ ID NO: 18000 - DNA, 439 bp, Homo sapiens
agtacttctagaattaattaaggcgggggttggtgtggctgaagacccagtgacaggtacgaagactaaaaatcaggatgaatccagaaaattaacacaaaaaagtatgtattaggctacttcctgtcatagtgaaattaaacactcaaagtaatgtaatctcagctgggcgtggcggctcatgcctgtaatcccagcgctttggcaggacaaggcaggaggatcacttgaacctaggagttcgagaccagcctgggcaacacggcgagaacttgtctctattaaaaaaaaaaaggaatgtaatttcaatctttttcttgatatatggcttgagaatgataatgtaaaaggaattcttctcttacttcaataaaatgggttttaacataactttaaattcagttaaatatacaatattgaatacctatagttgactttg

SEQ ID NO: 18001 - DNA, 466 bp, Homo sapiens
  misc_feature 29, 31, 37, 40, 45, 46, 49, 51, 53, 55, 56, 61, 63, 66, 69,72, 79, 83, 84, 85, 87, 92, 98, 103, 104, 105, 107, 112,113, 115, 117, 118, 121, 122, 123, 127, 130, 137, 140, 144,147, 148, 149, 150, 157, 164, 168, 169, 170, 171, 174: n = A,T,C or G
  misc_feature 177, 178, 180, 183, 187, 189, 190, 209, 210, 217, 227, 229,241, 243, 245, 246, 247, 248, 294, 307, 336, 396: n = A,T,C or G
agtacttctagaattaattaaggcggggngnccaganggnttcannagngncntnnacttncnttnacntgngataacntgcnnnanacctnagcaanctgtnnncnctatnntnanntannnctcnatncaatggnccnttcnttnnnntcagtgncctacgncccnnnnatntgnntntgntacntnncccaggtctgagcaactcnncttccangaggtgccanancaaagggggtantntnnnntataaatcctgccctctgtggctcaagtaggtgtgtttgtttatanccctgtgagtgtncctttcatacttgcctcagcccattccancaagcttatgtccagctgagaacccctgggtgctcacgtgctgtcttttaaacaatctanatgaggacggggacttggttgccttttccagtgacgaggaattgacaatggccatgtcctacgtgaagga

SEQ ID NO: 18002 - DNA, 495 bp, Homo sapiens
  misc_feature 18, 22, 30, 35, 37, 44, 45, 49, 62, 483: n = A,T,C or G
cgtcgtcttttcaccccngaancaagggtnacacnangctgggnnaccnggccccccctcgngggtacttctagtaattaattaaggcggggagcatggtaaaacaaatgtggagaaagcaagtccagagtgcagagctcaagctaaaaaaaagcatttgattttgtgtttgagaagataacacttgatatttaagattttcatgcctttaaagtgaagttgcaggcattgcattgaaaaaggtttatgcagctatagcattgacgtatagagttagaagttaaattgaaaaataaagttagaagtgaaaataatttatgccatccgtcataatattaacttggttttaatatttttttcctctggtttttcaaaaagttgtggaaattgacgaagtataattattctaagatggaataattaaaatggcatttttaataagcaaatgttcaaaaaaaaaaaaaaaaaaaaaaaaaaaaggcncccccccccggg

SEQ ID NO: 18003 - DNA, 371 bp, Homo sapiens
  misc_feature 369, 371: n = A,T,C or G
agtacttctagaattaattaaggcggggaagtcctgatctgcagaacttgccaatttctttggtgtgaatattcctgttataggtgattgcaagtgagtagctcacaaaattcctggagatttaataattggctctaacatgcagttacagaatagctccagcataccactaaaaataggtattaaatttgttttatatattatagggaagatccagtattctttaacataaattgaaactataatacaaattcaatggctattcttctaattatatgactacatgtatacacaaataaatgaacaggtgtgcagaaagaagttaatgtagcaggcctgagactgatatccagaaaaaaaaaaaaaaangn

SEQ ID NO: 18004 - DNA, 578 bp, Homo sapiens
  misc_feature 462, 496, 573: n = A,T,C or G
agtacttctagaattaattaaggcggggtcgaagaaggtggtgttgaggttgcggtctgttttgctgcagtaagctgggttgttcatgtcagttggcactagtataacaacaaataaaaagaatcagacaaaaatttcaacagattatgttttagaactaaaacataagatctatggtaaaatatttcagtgatacataggacaaactaaagctgaaagaatgtgtattctagtttaaatagaattgccccgttacatgctgaggtaatacaagactgtgaagatgaaagtgtactgtgcactctcagtggaaaatctgatgtgctctgcattactcaattgtgtcaacatagaatcttgacaaaagaaagttttaacacaagtaaagaaaatgataacatactaaacacaatggatagattgaaaacaaattgctttggcagctcttcatataatttcagnagttttaagtttattttgacacttcataagtgtncaatataccttacaatagagttaaaaataaccatttttctttgatttttgcctcttgtattaaagaatttaaaaccnaaaat

SEQ ID NO: 18005 - DNA, 886 bp, Homo sapiens
  misc_feature 3, 9, 42, 84, 450, 622, 628, 662, 663, 664, 665, 666, 667,669, 671, 673, 676, 678, 680, 682, 688, 691, 694, 698, 700,714, 723, 743, 786, 841, 852, 863: n = A,T,C or G
ggnaacaanaagcctggggtacccgggggccccccctccgangagttaccttcttagaaattaaatttaaagggccggggggancaggtgggggggtaggaatccttttaaattttttcaataaattccaaatggaaaaccaaaaaataaattaatgggggtggaaaaacctggggggggaaaaaaaggtctttttaattttggaggtggcttagccccattaaatttattacccaggaaaggaattttttgggccagttatggcctaagttttgggcttaggtttttaaaccaaattaaaatgggaataaattcaccttttttatttccaaaaaaaaaaaaaaataaagaatggttccttttttaattgccttttttggaaatggaacttggtggtccacctttttttttgggtgggaccaaattcaaaatggccaaaaaaaaggaacnttaccattttttattggttaattccaaggccggaccaccttttcaaggaaaaaaaaattaaaaatcctggttaggccttattggggtttttccccaaaaaggttattttaattggggggggtttttggttttttcctttttggaaaaattaaattgggaaaccaaaaaaaanggaaanccaaggccaaccaccaccacccaccaaccttggnnnnnnanananaananananacatanganatnttananattatttaaggggncggggcccngccccaccccggccggggtnggggaagccttcccaaaattttccggcccccttaataagggtnggaaggtccggttatttaaccggccggcccggccttcaaccttggggccccggtncggtttttttnaccaaaaccgntccggtggaaccttggggggaaa

SEQ ID NO: 18006 - DNA, 445 bp, Homo sapiens
aattaattaaggcggggtgggggagaggtgttcttcccttcctctgtatgaaacgaggctttcctgaatcggaaataaagtaaaaatggaaatctgcgggtaccctggttacctggcaacccaaacccatgggctgcgtctattggcatcctaatgtcccccagcatgaaagatgctgtcggaagggattccttttatgtggagcctctttactctcgtccattcatttatccccaattatttggtttccaagtcagtaacccagatttctgagggctctaatgcttgtctctgtagggaaggaggcttccactagggaatttactataacaccttttaaaaggaatcagtgttttgcaaccccccgggaacatttgtgttaaaaggaaaaaacaaggagggggctggcctgatggaactgtgtatttatttaaaactctggtga

SEQ ID NO: 18007 - DNA, 909 bp, Homo sapiens
  misc_feature 24, 63, 288, 355, 484, 724, 882, 905: n = A,T,C or G
agtaccttctaggaattaattaanggccggggccgggagccttggaggggaaaacccgcagantaaagttttttttttctcttttggaaaggataggaagaattaaataccaaccttacctttaaaaaaaaatattaagtccaaataagggtttaccttaaagaatatttggctttaagccggtttaaagttttttttaaccgttaaattttttaaattaagcctttaaaggaattttttaaaggaaggaaaaaattattgaaaggaccttttaggaaaggaagttangcccattggaagggggaaaaggggaaaaaaaaggaataaaaaaaggggtttttcttaaaaaaaccanttggacccggggaaggggtttgggaaggaattggaaaagccttttcttttccattggggaggttaaaaaaaaaaattggttggtttttaaaaaaaggaaaaaattttgggaggaaggaaaaaggggacntaccaaggaagcccccccgaaatttaaattaccccaattaggaaaggggccaattgcctttttaggatttaaaaatggaagggtggacctttaaaacaggcctttaaaggtttttaggttttaaaaaaggtttggtagggtggatttaaaaaaataaattttggaaagggccgaatcctttttaaaaaaaggaggatttaaaacccgaagggtggaattaaaaaaggacccttggaaaantcccatggaccgccagggggaggaaattggcgttccatttttaaaaggcccgaggttaaccgccatttttaccttaaaaaccgccaggaccgaaaaaatgggaaaggaattaattgggggagttgggtaagggatgaaaaccaattttgggaggaagnataggaaagttttggaagtgggnaaaa

SEQ ID NO: 18008 - DNA, 115 bp, Homo sapiens
agtacttctagaattaattaaggcggggtaagatttgccgagttccttttactttttttaacctttccttaatccaagcctacgttttcacacttctagtaagcctctacctgca

SEQ ID NO: 18009 - DNA, 546 bp, Homo sapiens
  misc_feature 305, 466: n = A,T,C or G
agtacttctagaattaattaaggcggggtaagatttgccgagttccttttactttttttaacctttccttatgagcatgcctgtgttgggttgacagtgagggtaataatgacttgttggtattgtatatatctccatctagataatttattctaagtatctacttctcttaatgatttattttttcaccagtacataccaatttaattatcttatctatttttaatgaatatcaatatttaaattatagttaattatataactggcatctttctaatttcatgtaaatttcaaatattccttanactgtatctgtttgtttccaaagattggtaagatccactggactcttatttcatttggaattacaaaatcctttgcagaggtaaggtaaaagaggaatttcatattgtcaatattgctgctttctgtgagctcttgcttttactgaataaattcggtttanagatctttttgtcatgtatgcttgctgaatgtttttccattgtgttgttccagatttgaaattcatcttcatttacaaaa

SEQ ID NO: 18010 - DNA, 399 bp, Homo sapiens
  misc_feature 322, 328: n = A,T,C or G
agtacttctagaattaattaaggcggaggaatgtgtgggacaggagacactatcctattttctgacttaggtggtggttactttagaattaaaaatatatgtattttaaaataattataaattcacaggaagatgcaaacactgtgcataaatgtccagcatacctgtcactcaattcccccaatagttggatcatgcataatgatagcacaaattgacattggtccaatgtatggatctagttctgtgtcatttgattacacatacacaaagctcctcgtgtgcgtctccttcatagtttcctccttcagcccctccctgncatccntagaccctggcaacaaccactagactattttcctcttctgtaattttgtcattggaaatgttatataaatg

SEQ ID NO: 18011 - DNA, 364 bp, Homo sapiens
  misc_feature 29, 98, 107, 125, 126, 129, 130, 133, 140, 141, 155, 156,181, 189, 192, 208, 212, 213, 220, 221, 223, 224, 227, 228,229, 236, 252, 253, 256, 258, 261, 263, 267, 289, 313: n = A,T,C or G
agtacttctagaattaattaaggcggggnaagatttgccgagttccttttactttttttaaccttttgattgcacaagcctttgttttcagtcctagngaataaagntgtgttttctggaaaatnnaannaanaaaacannaaaaaaaaaaaaannaaaaaaaaaaaaaaaaaaaaaaaanaaatgggnccncccccccggggggaanaacnnccccccnnannaannnattttgncccccccccccccggnnggntnaantnaaanggaaggaagcatggtgtgtganacagtgtctgttcttttgtgccanctctgtatgatgtttgtaaaaccatgtttgtaagacatgaataaattgctg

SEQ ID NO: 18012 - DNA, 316 bp, Homo sapiens
agtacttctagaattaattaaggcgggatgaaggagatggtgcggtcgttgtcaaagcgagagagccgcacgcactggtggaattttacatcctccagctctactgatttgttcttgctgcctgaaactcagagtggagagtgcagagtgaccctgggaaccaggaaaggatccctatccccacctttcctgccgaccactgtcacctatttcacatatggggaaactggggcccagagagaatgagcaaaaactggcacagtagagctggaatctgaacctagtatctgtacaggatctggcttggttttttttt

SEQ ID NO: 18013 - DNA, 550 bp, Homo sapiens
  misc_feature 217, 230, 238, 248, 254, 256, 264, 284, 294, 313, 314, 315,316, 317, 353, 357, 374, 378, 383, 395, 398, 412, 414, 417,418, 424, 433, 434, 438, 439, 449, 450, 452, 453, 461, 465,470, 480, 481, 482, 484, 487, 490, 497, 515, 518, 522: n = A,T,C or G
  misc_feature 527, 531, 539, 541, 542: n = A,T,C or G
aagtacttctagaattaattaaggcgggggttcaagggcacggcaccagtgattgcagcaggctcccctaaggtccaataacgtatatgataagggggtcatctcttctctcccatctcccccaccacagagcactactgcaaaggtgctgaatcacaaaagaggtgctaggctaggagccaatcggccagccattactattttttttttttttttngaaaacaaaattntccttgcntttcccaggntggagngngggggccnaatttcggctaattgaattntttgcctccnaggccctttttttttttcnnnnnccccctttttttttttaaaaaaaaaaaaaatttatntttnttccccagggggggggncaanggggnaatttggggttnaanaaaacccccccctncnaanntaaaanaaatttttnncccnnaccctttggnntnnctgggganaaangcccncccccccaannngnggnaanttttttnttttttaaaaaaaaaaanggntttnccccntttngccccctngnntttttttt

SEQ ID NO: 18014 - DNA, 490 bp, Homo sapiens
agtacttctagaattaattaaggcggggactcaagttatgaacaccctttggactccaacaagaaataaaaatctctagaagaaagcacacactttttgagctagcaatttttcaaccccatggcttaatattaaataaatataagctcaaaatcaaagaccatcaaacaaacaaataaataagagaacatacgtaaaagaagaaataagatgtatggctatcatgtatttcagatatgtgaattttcagatacgtaatataaaattattccacataagatgtttaagaaaatgaaattcaattaaaaacatgcacaaatattttttaaatgtaaacaaaacgaacaggtagatttttaataagaactaagtagtatcttttacattgaaaaatatatatattttaaaatgtaaaatgtgaaggatgggtgaaataccagattagacatagctaaagagagagccaaatatactaatttatattagtaaa

SEQ ID NO: 18015 - DNA, 382 bp, Homo sapiens
  misc_feature 39, 86: n = A,T,C or G
ctccccaaatagcaaaatggaatatgttactaaagggtncgaaatttagcgtattggagtatgagatatgtttattattcatgaantcaagagtttttaaatgaaaacatttgtgtattctcatgcttcgaaaattgcaaaatctgcaaaataaaatcttaaattacaaaaaaattaaaactattggtaatagggagctattaatattttttgattgggagcaaattgattaagactgagtgatctccagtagtctatacaataaaatggagacacaagaagaacattcattcaacagttgtactttatgtgctgggccctgcagatgcagaaaatttcaatgaactgtaataaataatatgctagtgttaggaaacttgga

SEQ ID NO: 18016 - DNA, 285 bp, Homo sapiens
  misc_feature 1, 25, 54, 55, 58, 66, 68, 71, 81, 85, 88, 90, 99, 109, 120,127, 130, 131, 138, 204, 274: n = A,T,C or G
naatacttctagaattaattaaggnggaaagggggctggcacccacggatcccnnggntctaaccncntgnattaagtccntaantgntngtggaatgnccagttctcntgtatgtttcnaaatagnctnnttacggnaaaaattaagaaaaattctgataatagtgcagaataaatgaattaatgttttacttaatttatctngcactgtcaatgacaaataaaaattctttttgattattttttgttttcatttaccagaataaaaactaanaattaaaagtt

SEQ ID NO: 18017 - DNA, 645 bp, Homo sapiens
  misc_feature 365, 456, 567, 595, 607, 608, 613, 645: n = A,T,C or G
gccccccctcgagagtacttctagaattaattaaggcgggtgcctgtagtcccagctacttgggaggctgaggcaggagaatggcatgaacctgggaggcggaggttgcagtgagccgagatcacaccactgcactccagcctgggtgatagagcgagactccgtctaaaaaaaaagaaaagaaaagaaaagaaaccaagtaaaatacttggtgaattactaatcctccaaagagccttctgacatacatactgttttacagatcaggaaacaggctcaactaggtcaggtcacttacacaaggccccccacctagtgccacaggtgacttggcatgtagctgggcccaggcacaagcctgactntaatgtcctctgcagtccacttccctagccctgtccctttccatttaaaatgaatatgtccagcctgggcaacataaggagaccctgtctntacaaaaaaaatttttttaattacccaggcatggtgtgcacctgtaatcccagttctcgggaggttgagggcaggaaaattgcttgaacctgggtggcgggaggttgccantgaaccaaaatcatgcttcttgcacttncacctgggcgannaaggnaaaatttttcaaaaaaaaaaaaaaaaattttn

SEQ ID NO: 18018 - DNA, 400 bp, Homo sapiens
  misc_feature 113, 116, 117, 121, 126, 128, 132, 143, 150, 153, 161, 165,169, 175, 183, 185, 187, 188, 191, 193, 198, 202, 213, 215,218, 223, 224, 228, 232, 237, 241, 248, 250, 256, 263, 269,271, 275, 277, 279, 280, 283, 286, 292, 293, 295, 296: n = A,T,C or G
  misc_feature 302, 305, 308, 312, 314, 318, 320, 334, 337, 345, 346, 348,365, 369, 373, 384, 385: n = A,T,C or G
agtacttctagaattaattaaggcgggagaatcgcagaggttgcagtgagccaagatcatgccattgtactccagcctgggtgacagagcaaaactcaaaaaaaaaaaaaaanttnntggnggggncntggncccgggggttnacttttntantcccaccntttngggnggttgnggcaaatncntnnttngnggtcngganttaaaaaccancntgnccaanntggnaaanccccntttnttaaaantncaaaanttacccnggcttnanggcncntnnttntantcccanntnntcgggnggntgnggcngnaaantnccaaaggttgcatnganccaaaatnntncctttgtcctccacccngggngacngaccaaacccnnaaaaaaaaaaaaaaa

SEQ ID NO: 18019 - DNA, 698 bp, Homo sapiens
  misc_feature 28, 37, 44, 57, 73, 130, 156, 191, 195, 205, 206, 210, 215,222, 226, 228, 233, 246, 250, 252, 256, 315, 330, 357, 363,379, 394, 409, 411, 513, 523, 541, 554, 558, 599, 641, 642,660, 664, 678, 680, 692: n = A,T,C or G
gtcccgggccccccctcgagagtacttntaaaattanttaattnttgtgaatgtgtngatgctgctaccccgnaatttataagaagtattgctacctgtatgggacatgcccatggtcctggtgcactantaattgcagtttttgctgttaactgnaattacttttgcaccaacctaatagatcaaacagnggcntgttactggnncatntaaancaaactntttntntttcnggagccctacatnggangngtcnatccattcatcaaaagcaacaaacatcgtatgatcatgtttttagatgaacttggggtntgtatataagttttnaggggctttttttaagacttctagttnatatanctgaattacccatttnagcaacaatctttanaaagaattttctatncnaaaacttaaaaagacaaaaagcctgcaaattttttgtctggccttcctaaaccaaaaaaacataatttttggttggaaattaaaaaccctttatttcttacncttaaatagntttaccccccaaaagcantacatttatttgngggntttttaaaactactttcccatcatttttttttaaggggccngggccttggcttttttcataatcccctttttaaaagcttttnnacatttttgaactggccnttgnacaatttttggttngncccccccttaancctttt

SEQ ID NO: 18020 - DNA, 441 bp, Homo sapiens
agtacttctagaattaattaaggcggggttccaaggctgcccaaaccccttataagtgatacctgtttagctcagttaattataacaacagtaggaggcatagctgtcactcattgagtacttcctgggggctagacatgctaagctctcttcttccgtcttctcaatcatcatgacagctctgatgttgagactgttattgagcccattttgttgatttgaccattgaggcactgagaggtggttgtagagctataaagtggctgagtggggattagaacaggttttccttgggctccagagcctggcttcttgatcacctcacgcctcggtctgaggaaggggctgtgagtctgcccacctgcgagctgctctctgtccaatgacttagtccctctgttctgactcaccctaaattgatgttcccgggagccctgtttc

SEQ ID NO: 18021 - DNA, 337 bp, Homo sapiens
  misc_feature 123, 125, 133, 156, 158, 161, 171, 172, 176, 177, 179, 183,184, 186, 191, 192, 194, 195, 196, 198, 199, 200, 202, 206,220, 221, 222, 223, 224, 226, 230, 231, 233, 234, 284, 290,293: n = A,T,C or G
agtacttctagaattaattaaggcgggggagggaaagaaaacaaacagtttcagaattgaataggccagtgactgttttaaagattaagtaataaagatgtcttatctagaaaaaaaaaaaananaaaaaaanaaagaaaaaaaaaaaaaaaaaangnccnccccccccgnngggnngncccnncnccccnntnnngnnntntttnccccccccccccannnnnancttnnannaaaacttcatgtaatatggaagtttgaaagaagttaaccaaattttccanaaggcnaanattataccatgtacatatcctttgaatctaggaattttatgcct

SEQ ID NO: 18022 - DNA, 342 bp, Homo sapiens
  misc_feature 26, 28, 34, 37, 43, 47, 48, 51, 52, 102, 105, 108, 115, 116,122, 127, 128, 132, 150, 152, 163, 165, 166, 171, 172, 176,180, 196, 320, 322, 323, 326, 328, 336: n = A,T,C or G
agtacttctagaattaattaatgccntntaccgntcnccaccnggannacnntgtgattagtagaacaggataagattctcctagggtggaaagaaaccaanaanaanaaagaanncgggcngcccnngggngggggaccggacaccccntntaccgggagananngcctnncccncctncctaaagattttaaantatcccactccctgcaggtcgcagaaagagtggagaactggtgccactcggacaccttatctcaccgagagaaatggagacggcctccaggacatcttaggaccctggttgattccgagaatcncnnaananaaaaaaanaaaaaa

SEQ ID NO: 18023 - DNA, 282 bp, Homo sapiens
agtacttctagaattaattaaggcgggggacgggcaggggctgcggaccgcccggccttggacccatccggagccacaggttggaggagataagtagctgtccccgtgctcatcgccctgtggagcagatcctgtctccttgctgacggtggagcccgggagttccagggcttgggaaggggaaggaaacctctctgaaatctgacacctgctctcccggcaaggaaacttcgcaggctgctggagtcctggcagaaaggatctaaaaaaaaaaaaaaaaaa

SEQ ID NO: 18024 - DNA, 620 bp, Homo sapiens
  misc_feature 63, 64, 65, 66, 68, 69, 71, 73, 74, 76, 82, 84, 86, 92, 95,97, 98, 101, 102, 103, 104, 105, 107, 109, 112, 116, 118,124, 126, 134, 135, 136, 140, 141, 143, 144, 146, 150, 155,159, 165, 169, 173, 178, 180, 182, 184, 188, 190, 201: n = A,T,C or G
  misc_feature 202, 203, 205, 206, 213, 215, 217, 229, 231, 237, 242, 244,245, 247, 249, 264, 275, 277, 282, 284, 289, 292, 294, 295,296, 297, 298, 300, 302, 306, 308, 309, 312, 315, 316, 317,319, 321, 322, 324, 330, 333, 344, 345, 348, 353, 360: n = A,T,C or G
  misc_feature 363, 365, 421, 422, 542, 571, 598, 605: n = A,T,C or G
agggaacaaaagctgggtccgggccccccctcgagagtacttctagaattaattaaggcgggnnnnanntncnncnggcttntngncgaagntgntnngcnnnnnananccnagangntcttgncnagctgccnnngagnngnntnaatncaganaaancctgancacnggantgaangntngncggngnctggcttttcnnntnnctatcangnangcgccgaaactncnactttnccaantnntntnagattccttcctgcnggtgtgcactncnttcantngactntcncnnnnngngncttncnntcnatnnncnannanattcgnctnctggcatcaanngangactncccaagngtnantgaccccctggaccacaccaaatgtcactgcgccccaagcctccatgatgttccannactttgtgaaggtggtgcccactgtgtacatgaaaggtggacggagaggtactgaggacaaatcagttctctgtgaccagacatgaagaaggttgccaatgggcttgttgggcgaccaangccttcccggagtcttcgtcctctatganctctcgcccatgatggtgaagctgacnggagaancacaggtcctttcac

SEQ ID NO: 18025 - DNA, 297 bp, Homo sapiens
  misc_feature 53, 61, 67, 87, 93, 108, 132, 135, 137, 138, 139, 143, 144,145, 153, 160, 163, 164, 172, 192, 193, 195, 196, 205: n = A,T,C or G
agtacttctagaattaattaaggcgggggttataaaaaatggttcagaattanacttttanttcatnctacttaaaaaaaaaaaaanataaanaaaaacctgaaaagnaagaaacaaaaaaaaaaaagacangcncnnncccnnngggctaanggcaaantgnncaaacttngaagaaattccccccatccnncnngatataaantgaaaatattgtcaagagtttcagatagaaaatgaaaaacaagctaagacaagtattggagaagtatagaagatagaaaaatataaagccca

SEQ ID NO: 18026 - DNA, 417 bp, Homo sapiens
  misc_feature 49, 60, 79, 93, 108, 109, 111, 112, 115, 116, 119, 121, 126,128, 142, 143, 146, 147, 150, 151, 157, 159, 160, 161, 162,172, 173, 184, 185, 188, 189, 192, 197, 198, 315, 343, 355,381, 392, 394, 405: n = A,T,C or G
gtaccgggccccccctcgaaagtacttctagaaattaattaaggcgggngaattgtatantatgtgaattgtagctcantaaagctgttattnaaaaaaaaaaaactnnannaannaangngcggncnccccccgggggggnnccnnatnncccctntnnnnggtacttttnnccccccccccnntgnngtnctttnnaacatcgggaaatctatccaggcagcaagatcacacactttgagaggttgcagcagaagactggaattcctttctcccagatgatcttctttgatgatgagaggcggaatattgtanacgtcagcaaactggggtgttacctgcnttcacattccanaatggaatgaatcttcaaactctaantcaagggttananaacattttgcnaaaggcccaaac

SEQ ID NO: 18027 - DNA, 674 bp, Homo sapiens
  misc_feature 15, 33, 35, 36, 37, 44, 46, 60, 72, 82, 99, 101, 123, 124,134, 138, 151, 155, 156, 167, 173, 191, 199, 207, 217, 226,239, 255, 276, 280, 281, 285, 286, 304, 329, 334, 340, 393,452, 465, 495, 507, 511, 525, 585, 603, 633, 638, 641: n = A,T,C or G
  misc_feature 647, 649, 655: n = A,T,C or G
gtttcctttgttccnatgaccttgggattttgntnnngggttgnanaaacccccaatgcnattaataccttnttttagtaanggctcgcttgtttatcntngccattaattaaaaaggacccnncccacaattnaagnccttttaaaaaangttnnaaaaaaggggnaaaagnggaaaaggaattggaatnattcaccnaatttggnaggaaaatancccttaagnttccaaaaaaagnaaaaaaaccttggggnagttggaaccttttttttttnaaannattnnttattccagaaaaggtanggaatttttccaaggaggcccatanaaggnaaaccnattttaaccccagggggggtatttaaaaaaggaaaaggggttaattccaattnggaaggggggcccccaaggtttcctttggcccccagggaaaaaggaacccccaattaanacccacccttccnggttaaaaaaattgggtttttttaattggnccaattcccttnaaanttaaaaaccaattngggggttttttttgggaaaaaaattaattggttgggaacccccccccaaaaaaaccttgngaattgggaaaaaaaccnttttttagggggggggaggaaaaaatttanggaanttncccaangnttttantttgggaattcagggaaaa

SEQ ID NO: 18028 - DNA, 706 bp, Homo sapiens
  misc_feature 24, 31, 33, 487, 548, 579, 602, 630, 688: n = A,T,C or G
agtacttctagaattaattaaggnggggaangngctttaggaaatctatcatcctattcctcttcttaaatttacaagagacatcagaaaagcctgaatagttactttaacattaagtcctaaaataggttatatagaatttattttaagatatatggcataaaaagttacagcctgctaaattttattttttgatacttacttgcagagctgtaattctgacatagtaacaattgcactctggatagccggtgccttctatcatccagaactttctatatacaaaattagaagtaacgaaagctatctttggctatcaagcaatagctgaaaataatcaaagaaaaagtaactggctgatttatctattaaaaaagacaagttctcatcagctggtgatagctacagaagccaactagagcctccccaaatccaaaggaaaagaaataaaaaagaaaaaaaaagatgaaaatatcaagggacagangtgatagacaacccatgataaaggaagaagttaaaatgaaaaacagatcaccatgaagganacgtgagccttaaaacttaaccacccagccnaaatactggcctccaagggaatntcaccaaatttccaaaaagggtgccttngggaaaggactgaaacgggaaggggaccccaaaaaactttttttggaagggcttttgncccttttaaccttttttt

SEQ ID NO: 18029 - DNA, 328 bp, Homo sapiens
agtacttctagaattaattaagggggatatgaagttgcaaggtttcaagattcttattatttggggagaggctagagatactaattttagcccttgttgagaatgaatgttaaaaatttaaagacaatctaggaaaaacaaagagtttttaacattcaaactaaactcttactcaaatagaagttattggcaatgttctagatcttggattaggtggtaggttcagcggtattcattacgatgtacattatactgtattaataattgttaaagaaaagagagaaaacaagaaaaaagaataggaggcaagaaaaaaaaaaaaaaaaaa

SEQ ID NO: 18030 - DNA, 396 bp, Homo sapiens
agtacttctagaattaattaaggcgggtatacgattcttcatgtaggctcctgggtcctgttgataaccaagtcatctctgataatttctttgacttttgttatgaaaagatgatcatggctaatcttatataaacatttcttctcctggacctgaaatcagccatttctccagtgggccactttagtggaaaatagtatttagaagtcataatctaggtctttttagtagacaaagctaggaaatgtttgtttttttgagaaaatacattgtgagttcattccgatatttacattcaaattaaaagctttaaggttttattatgtatcttcttttatatctgaatcccttttctcttatgctgaaaaactgtaattacattaacgtaactacttg

SEQ ID NO: 18031 - DNA, 697 bp, Homo sapiens
  misc_feature 500, 519, 605, 606, 608, 609, 622, 623, 625, 654, 655, 656,658, 659, 664, 685, 690, 697: n = A,T,C or G
agtacttctagaattaattaaggcgggaagctaaccactatgcttgcagaaaagcacagccttggtatttacctggagagttctatccttgtaacactacagaaggatatgttaggattagagaattttagcactggacaaaactttaaagttttaactgtaagaaaaactacagagaagtgacttgcacaagttcacagagtaagtgactattagagttgaacccaggtcttctgactcctaaaggcttcacacctatttcgcaggcacagagtagccacaagcatgtttttcttctttctagtagtttcaccacaatgtgaaagacctgctctgccctgagagtgccaatgtcctttcccacacttcttagatgccttcctcttcctgaaccccagaagaagagggcacctgagcaggaaatctcaggtgacttagtttgccagtgcctactctactgaagaactaggttttcattcttgagaagaaactcatggaangatgtgtttcctatcacanggtatacatgctaatttttttgttgaattttcttgttgcgacttatgccaagtaatttataaagggttttttttttttttggggcnntnnggagaaaaatttnnanaaaggggttttaaatttggaaaccgccannncnnggggnggaaaaattttttcccccccnttttnttttttn

SEQ ID NO: 18032 - DNA, 443 bp, Homo sapiens
  misc_feature 400, 406, 408, 415, 421, 425: n = A,T,C or G
ggccccccctcgagagtacttctagaattaattaaggcgggggcagtggctcactgtaattccagtgctttgggagatcaaagcaggtggatcacttgaggccaggagtttgagaccagttaaagataacaaatatttgtagttttcctcaaaaataaagatttttaaaaattaagtaaaaattaggtcgggggcagtggctcactgtaattccagtgctttgggagatcaaagcaggtggatcacttgaggccaggagtttgagattagtaaaaattattgttattaagacaaaacggatagaagaatggaagaatggaataatggcagagtataatccagacataaagatctgggattcaacaatattgtgacctttttttttttaaaaaacggggtnttactntnttgcccnggctanattnttaaaaaaaaaaaaaaaa

SEQ ID NO: 18033 - DNA, 399 bp, Homo sapiens
  misc_feature 12, 22, 33, 35, 48, 56, 59, 61, 63, 74, 76, 81, 82, 145,152, 157, 182, 225, 241, 251, 256, 260, 266, 268, 288, 289,293, 308, 309, 310, 312, 317, 326, 327, 331, 334, 335, 345,359, 363, 378: n = A,T,C or G
gcgtatgacctnaagtctgganttccagatcancntggccaacatggngaaacccnatntntngtaaaaataananaattnntgaattaaaattagccgggcctggtggtgcgcacctgtaatcccagctaatcggaaggctgangcagganaatcncttgaacctggaggcaaggttgcantgagccgagatcgcgccactacatttcagcctgggcgacatancaagattccctctcanaaaaaaaaanaaaanccanagaggngncccccccccccggggggacnnccanttccccgtcaatggnnntntattnccccccccnngggnccnnttttttaaantttatttaaaagtnggangtgattaaaataatntgaaggcgatcttttaaaaaa

SEQ ID NO: 18034 - DNA, 370 bp, Homo sapiens
  misc_feature 212, 214, 218, 220, 223, 224, 228, 230, 248, 271, 272, 273,275, 291, 299, 300, 301, 307, 313, 322, 330, 337, 343, 346,347, 349, 362: n = A,T,C or G
agtacttctagaattaattaaggggggctgccaccccaggtcctccaagcaacccttttccccatagtgggaggtcagcatccctcagaagcatctcaggaaaaaatgataaagcatttagagaattgggaagaaaatagagggatactatcaaagagtaaaggacagtcctgggggatgaagggggattttcttttttctttttttttttngnaaananagnntttnantacttaccctatctgcangggcaatactttggatgggtgannnanatgattccattctccnattggccnnngccganggcatngtctcaaanaacttttnactgganagaatncannangcggaatatttgncataaata

SEQ ID NO: 18035 - DNA, 329 bp, Homo sapiens
  misc_feature 18, 282, 313, 316, 317, 318: n = A,T,C or G
taccgggccccccctcgnggagtacttctagaattaattaaggcggggaagaagtaagactggagagactaatgccattcttgtcgagtcctaaaagcagacttaggacttaattcaataagcaataggaagccattacatcttttgaactgcaatgtggcatagttacggacgtgctttaggaaggctgcttttagaacaagtgtaagaaaccactgagccaaagtgagaggtagggacataagttaggtaatgaggacccctgctagcgaagcagtggcngaaaaaaaaaaaaaaaaaaaaaaaaaaaaanggnnnccccccccggg

SEQ ID NO: 18036 - DNA, 241 bp, Homo sapiens
  misc_feature 133, 138, 163, 168, 170, 171, 172, 176, 177, 178, 179, 184,185, 186, 193, 194, 195, 196, 197, 200, 203, 208, 209: n = A,T,C or G
agtacttctagaattaattaagcaggtaagtgaatgaagtttcacagatttaggctggtaatatctgagattcattttacccaggtaaaatattttctgtaactaaaaaaaaaaaaaaaaaaaaaaaaaaaanggggnccccccccggggggggcccccattnccccntnnngggnnnnttttnnnccccccnnnnnggncgnttttnnaaaagccactggcactccagccttgagtgaca

SEQ ID NO: 18037 - DNA, 351 bp, Homo sapiens
  misc_feature 22, 23: n = A,T,C or G
tgggtaccgggccccccctcgnnagtacttctagaaattaattaagggggaacagcgtttccgtaaaattgactttgtactctgaaaacgtcaatttatattgaacttggaggagtttggcaaagtctgaataggtcaacctgcaggcgtaactatttttgacctagtcagtttttaaacaatgtgcatttgaaggagttaattaaggcgggtgcttaagcataaactataaaatgagaagaataaggtactttattcttctgtggcagggaacccaacacttgggtttacgttgcagggcaacacctgtgatgaacaaaacacatggtagcgatagcccattcatgaaaa

SEQ ID NO: 18038 - DNA, 387 bp, Homo sapiens
agtacttctagaattaattaagggggaaaaacccttcctataaggaaaagtttcagcttgatggctttaccacagatacttaagtgagaaataattctgatctaacccaactcgtccagagaacaaagaagcttgttttatcaaactagcgtaactttgacacaaaaatctgactgagaacattataaaataggaagataacaggtcaatctcttcctctcccatcaacacttgcaaaatactaaacaaaatagtagcaaattaaatctagtgatacatgaaaagggtatgtatgacaagttactaagttgcagtgatttcagaatgcagggttggtttaacttaattcgaataaatttattcactatatcccaatagatgggaaat

SEQ ID NO: 18039 - DNA, 584 bp, Homo sapiens
  misc_feature 534, 566, 573: n = A,T,C or G
agtacttctagaattaattaaattgtaattacaggccaggcatgatagctcatgcctgtaatctcaacattttggtaggccaaggcaggagaatcacttgaggccagaagtttgagatcagtctggttaacatagtgagacctgtctctatttatatgttaaaataataataatagtaataataatcaattgtaattatagttattcctagagaagttgatttagatatattacttaaataaggttttaaaagtgataatttagctaaaatcattattttaaaaatgtacattttcagatgatacaacttttacagaattacatagaacgtacagttcgttatgtctatgaaggtgttttttttcccttttcatcttgttaggcacgtaccatgttattttagatgaaagccattacaaaagagttgctcacacatcatgttagtcctcctcctgctagctcaagttctgaatgctcacttattcgtatgggtaagtgtttttatgtttttaaaaaatacatatctaggctctncatttttctttgcacaagtttttttttaattnttttaanaaatttttaaa

SEQ ID NO: 18040 - DNA, 492 bp, Homo sapiens
  misc_feature 17, 18, 19, 394, 454, 457: n = A,T,C or G
ccgggccccccctcgtnnntacttctagaaattaattaacaaactttaccatgaatcttcttagccatggggacctgatgacaggacgaggtggataaagaactaaagaactaaaccaacagtgaagtattacagcatcaattatgattaacacaaaacaaattcctcaattcttccagtaattaaagtcagtcatacgatgtaaaaagatgggaaagaattcttgctcataagtagaactccaatcctgagctaggaacgtgaagttctcgtcccatgttctcactccttaaaatatttatatttacagtacactaggggtaggtgctgagaattcagcagaagtggatttgaagtctaaacaaatacacttgaacccactaaacattaagtnatcaatttattagctgtgtaaccttgggcaaatttcttagtatctctgttcctcattttnttnatataaaaatgaggataacaacacaacctaattca

SEQ ID NO: 18041 - DNA, 424 bp, Homo sapiens
  misc_feature 376: n = A,T,C or G
agtacttctagaattaattaaggcgggcgggtacccttcgactgggcgttgccgctgttccctgcgcggcatggaggggacggccgtggccgtgttcgagttgcttctgcaggaagcctttttggtggcatggtcctcaagaagttcctaaaagagacagtctcaaactcctgggctcaagtgattctcctgcctcggcctcccaaattgctgggattacagacttgagccactgcacccagccttctccatgtctttagggacaaacttctaggatgaaatttaggatgaattaagtcattagcttgacaccatgatgtacaaatccctgaatttcagtttcattgttaaaatgccattgtttcaagatgctcanttggctatggaaagatagggtcatctatcccaagctactcaaggggga

SEQ ID NO: 18042 - DNA, 678 bp, Homo sapiens
  misc_feature 253, 424, 463, 468, 470, 484, 486, 494, 497, 500, 504, 521,526, 538, 541, 556, 559, 560, 561, 564, 577, 579, 580, 606,608, 609, 610, 612, 613, 618, 626, 627, 628, 629, 630, 631,632, 633, 643, 647, 652, 661, 662, 663, 667: n = A,T,C or G
agtacttctagaattaattaaggcgggggaaataagaaaatatgaatgaagcaacccaggtcttgagccaaagaattacctggggtccgttgagtttcaaatctgaaaatttctgtctttcaaggtcagcatcgcccacaaaccggccgttctgaaacacagcccacaagaggacaattcattttgtggccttcttttgctctatcaaatacaaacgatctttttttcaaacaggaaaagggctttcaagaanatatgtgtggcctggagtccttgtgtcagtactcataaaagaaccattcactctttagtcttagcactttcctcaaaattgaaaatcaggcctggaactctggcagacagggtctctggaacataagaacgtaaactcccgagggcagagggttttttgggataagtttantttaatctagggccttgaacagggcctggccacatacanggtgntnaaaaattttttgtngntaaacccnccncancccnaaaattccccttacccnccccntttttgggaaanccnttaaaatttttaaanaannnttngggggggggcttntnnggggggggttcccaaaaaaccttttntnnncnnaaaanaatttttnnnnnnnnccccccccgngganaaccncctttttcnnngccnttttttttaaa

SEQ ID NO: 18043 - DNA, 494 bp, Homo sapiens
  misc_feature 5, 22, 27, 30, 31, 33, 42, 49, 101, 102, 106: n = A,T,C or G
atganactggccgtcgttttcncccgnaannangggaaccantgctggntgccgggccccccctcgagagtacttctagaattaattaaggcggggggagnngggnggatgcaacagatatatttaaaaagtgaatgcccttcacccataatcccattccctgaagagaaacttgagaagatttattttcaaatatcataaaatttatatgatctattaaaacctaaagctataaaactttcagaagaaaacagatgggaaaaaaaagtttacaacctgggggtaggcaaaggtttcttatctagaatacaagcatgagacattaaagaaaatattgacaaattggatcatatcaaaattaaaacatgattttcaaaagacatcattaggaaaatgaaaaggcaagccacagactgaaataaaatttataacacatatatcaaagtacttgtattcaaaataatataaagaacacagcacaagaaaataaccaa

SEQ ID NO: 18044 - DNA, 494 bp, Homo sapiens
  misc_feature 9, 35, 41: n = A,T,C or G
actggccgncgttttacccccggaataagcggaanccatgntgggtggccgggccccccctcgagagtacttctagaattaattaaggcgggtaccgtcttaatatatagtaacctaacagctacatatttagataaaagtaatatgtattaattataataaattcacactacccatgctgtatttggaattgagcccaatctctctcccccatggcaagaccctaccattgcagtggtctctatatctatagtgatgggcctgaataaagcctgccttacagtgctttaacaactgtcactgaataattttttcttgaacatctttttggactacccatggccacttcttgatcccaacctgaacataagaatcttctagaagttcttcaaaactcagtgcaaaacacacatcctgactccatcaagcagattttgagatcccttcataaggtgtatttcacacttcaaaagatattcattttcatgtttgct

SEQ ID NO: 18045 - DNA, 326 bp, Homo sapiens
  misc_feature 305: n = A,T,C or G
agtacttctagaattaattaaggcgggaattaattagacaaaaatggaatcctggtcttcctgtttagctcatccttcccctctgatctaatttagacacactgagcctcaaagcttctttattcaattcattgaactatcttattctcttgaaaacagccagtagaatgaactatgaatctgtcatctctgagagttaatatgctattcatttaaagattctattccaagcctaaaaataaatcaaagaggcaaatattacactggtcaatggaatgtttcttggaatgaaatcaacaactacnaaaaaaaaaaaaaaaaaaaaa

SEQ ID NO: 18046 - DNA, 442 bp, Homo sapiens
  misc_feature 1, 16, 69, 97, 249, 407, 431: n = A,T,C or G
nccgggccccccctcnagagtacttctagaattaattaaggcggggggaacgtgcttcttaaactgcantttcctgggccctaatttcagtctgggngaagctcaagaatctgtactttcaacacccctcacacagttgccgtagctggcactcgcactgcattcagcactcgcctgaggtgggttaaaagtatctggcctgaggacacctcagtacataagtccttagggtaatgaactgcaacctancttagtatggaactaactgaatgcccaatttaggcatacagtcatgcatggcataatgacattttagtcaatagcagacagcacatagacagtggtcccataagattctaatactaggccaggcacagtggctcacgcctgtaatcccagcactttcngaggccaaggcgggcgaatcacanggtccggagtt

SEQ ID NO: 18047 - DNA, 410 bp, Homo sapiens
  misc_feature 3, 7, 14, 20, 22, 25, 26, 27, 30, 31, 41, 43, 44, 51, 55,56, 59, 62, 64, 67, 71, 92, 94, 117, 260, 270, 334: n = A,T,C or G
ccncggnggcggcngtcctngnagnnncanncctcgtgctngnntaggganactnnaanaancnttngaanaaaaatttgtccttgaagctngnatctgatatcagcactggatcgnaaaacttgttgctgatttttgaccttgtattcaagttaactgctcccttggtatatgtttaataccctgtgcatatcttgatttagtccttagttcatgtggctcggtcacttgggggctggggagagcacgctgtagatganaaagccccancctggtggatctctgtgagcaccactgagtgatctgtgcagggtattaaccaacagcagacttncaggatttcctgaggctggcaagggttcctgaaccagttaccactccttcttgccagtctaacagggtgggaaagt

SEQ ID NO: 18048 - DNA, 408 bp, Homo sapiens
  misc_feature 35, 36, 39, 43, 47, 48, 49, 51, 52, 56, 59, 61, 62, 66, 75,76, 77, 87, 106, 146, 149, 154, 174, 250: n = A,T,C or G
agtacttctagaattaattaaggcgggggagaaanncanaatnagannngnnatgntcntnntatnaccaaaaannntactattccnagagatagcctaaaagtanttaggcaaatgacattttaagggtttttggagctgctttncantattntaacatgtgtttatgtgtgngcctgaaaggattacaaatgtgtgtgtgtgagtgtgtatatacatgtacatataactacacatatctttctttatntactaattatgtttttgaaaagttgagtataataaaatacttacaatctaaataccattttaataggacaagggaagctgactttctaaatacaatgtcacattctaagtgatgaacataattttgttaatgtaaaatttagaacagtatagataaag

SEQ ID NO: 18049 - DNA, 398 bp, Homo sapiens
  misc_feature 1, 36, 40, 43, 45, 50, 51, 66, 151, 183, 234, 252, 259, 361,363, 374, 383, 384, 390: n = A,T,C or G
ngagtacttctagaattaattaaggcgggacatatnctcnttnancctcnngaacacatgtaacangcaacttaaattttttgcctttctgcacatttctataaacagccatgaaatcactgtgagtattgatttgaaagttacaaataantttttgtgagttggcagatttgcaaatacctnccccttgaataatgatcaactatacaagtgaaactattaagtgcagaaatnccattgaaattaatgcangtaaganatgtttcttggtggaatagtgaaagatgaaatcccaaaatggccatattcctctaatttctctgttaataatgcatagaatgctttctccacttttgaccangnaaaaaaaaaanaaaaaattnnaagggncccccccc

SEQ ID NO: 18050 - DNA, 462 bp, Homo sapiens
agtacttctagaattaattaaggcgggtgtcactccttgccaaagctttagaaagccttcctcttcaatgatccctagagctgtgcgcaccattcccctatagggggcagattctcttgcaccgtctcccaaccgagcaagagctgcttctccttgcatttggagtcgagtttttgtgagatccaggggaaaggttgctaacaaaaacacaaatgcagggaaaaacccacaacattcagagaaacaaacaaaaatctaaaatcataggagtaatattttcccaagactggttgttctcaaattttagaatatatcagaatcagctagggagattttaaaaattagaaatttcctagccccgtgcccatggattctaattcagtaggttgaagagggtttagaaacttgattctcacacagtcccaaatttaagaatcactacgcaagagcatcctggatcac

SEQ ID NO: 18051 - DNA, 400 bp, Homo sapiens
  misc_feature 129: n = A,T,C or G
agtacttctagaattaattaaggcgggaaaatcaagttttaactaagattaacccacagaagtagatattaatactaaggtttcgacctaataataactaacctgtattaattgtgtgcagtgtaccanacccatatgagatcctgcaccaacatttgctatgcactaactagtttaattgccattaccagggtcctcctggctctgctatttactagctgtttgaccttgggcaggtttcttaacctatgtctcattttcttcctcttcaaaatgagaacagaaatagtgcctacctcatggagttgttgtgaggattaaatgaattaatggaaagcatatagaatagcgcttagcacataataagctctcagtacttagaattaccattatcccagtt

SEQ ID NO: 18052 - DNA, 387 bp, Homo sapiens
  misc_feature 15, 150, 348, 349, 374, 375, 376, 377: n = A,T,C or G
gggtaccgggccccncctcgagagtacttctagaattaattaggggggcaaaagatttgaacacagaaaactacaaaacactgttaaaagaaattaaacacaaataaatgaaaagaaaagctgggtttgcaaattagatgatttcatctngaaatgatgtcaacactactcgaagtgacctagattcaatacaatccttataaagattccaatgacatttttgataaacagaaaaacctatcctaaaactcatatggaatctccagggcccatgaataggcaaatcaatcttgaaacagaacaaaattaaaggtctcaaagcaattacaaaactgcaataagccaaannaaaaaaaaaaaaaaaaaaaaaaaannnncccccccccg

SEQ ID NO: 18053 - DNA, 332 bp, Homo sapiens
  misc_feature 11, 20, 22, 27, 65, 102, 116, 141, 147, 156, 158, 159, 165,179, 180, 185, 192, 196, 203, 209, 213, 214, 217, 218, 224,229, 234, 249, 252, 255, 256, 257, 258, 260, 266, 271, 272,286, 318: n = A,T,C or G
agtacttctanaattaattnangcggngacttgctggaacttgctggaactaacatgtaccatanggacagacagagacagataggaatagataaagactancaatataaggtcantgccctgaataggtactggtctgtntcctanagaggtacnanngtatanactggcgaagaagnnaaaangaacctnaaanaaacctncccccncccnnggnngaaccnctgtnccccntttagagtgccaatnatnacnnnncnggcgangagcnntttacacacacctntgaagcccagcctctgcaggacctgagacgcngtccttgccgggcg

SEQ ID NO: 18054 - DNA, 479 bp, Homo sapiens
  misc_feature 2, 34, 37, 43, 50: n = A,T,C or G
anactggccgtcgttttacccccggaatcagagntanccatgntgggtgncgggccccccctcgagagtacttctagaattaattaaggcgggaggatcgcttgaacccaggaggttgtggctacagtgagctatgattgtaccactgtactctagcctgagcaacaaagcaagacgctgtcgcaaaaaaacaaaaaagatgtgtaattcctttaagcctccacagttgaatcaaatgtattttttcattttatttggctgccttttcctgaatcctcccagaattattcgaaatattcttgtttctgtcaagatgtagttataagtattatttcagagaatgcatttcaactgtatcttgtccaaaaggggttaaaatgatgctggcaggacagagctacttttccaggatgtggcccaaacacatatctgtcttcttaattcctatatgaaacgttggaaaagactttagaaaaaac

SEQ ID NO: 18055 - DNA, 653 bp, Homo sapiens
  misc_feature 57, 402, 630, 640: n = A,T,C or G
agtacttctagaattaattaaggcggggtggaatggtataattaaaaaaacaaaatnttttcccaaaaggcaaatatgagactattttaaaagaacaagaaacaggtgtcatctatagaatagtaaataacaaaacatagaaatatatacaaatatattgcagtgacagtaaatgtaaataaactgtttcaatttgaagacagtaattttcaggttaaaaaaataccacttctccttagagacatacatataagaattcagggagcataaaattaaaagatggaaatagatataccatattaacatgaaccctaatcaaaagagatctgttgtagttatatttattcacaacagaaaaggttgacttttaatttaaaaatcataatgattataaagtgtagngattgatcataataaaattgaactaaaatcaaacaatataaatgtaacaataaaagtctcaatatatgtaacactaagccataggttatcttctaaacaatgtatggtttaaatagagataacagaaattagaaaagtttttgaactaaatgataattaaaatattgcttatcacactttttaggatattactaaaattacatggtgaaaagtaaatttaatagtgtncaaaaccccnttttagaaaaagg

SEQ ID NO: 18056 - DNA, 416 bp, Homo sapiens
  misc_feature 23, 28, 31, 35, 41, 45, 49, 53, 55, 56, 57, 64, 69, 70, 73,75, 80, 85, 106, 126, 132, 145, 148, 149, 152, 156, 157,158, 159, 163, 164, 167, 168, 170, 172, 179, 207, 211, 213,214, 215, 216, 220, 236, 237, 240, 241, 246, 254, 286: n = A,T,C or G
  misc_feature 287, 305: n = A,T,C or G
agtacttctagaattaattaagncgggngancggngacaanggtnattntgtngnnngggggcntaaannggntnaaccnaaggnttttccttggattaattctcnatataataacatctagctanatgacncagggggataccnctnntanatgnnnntatnnttnntntntataatntttcccttgcggtactatatctattgcnccangnnnnaatnaatatcgcctatgctnnatnngggtnaatggttnggctaaccgttgtctggtagtaaggtggaatnngtttggtcctagcctttntattagctcttagtaagattacacatgcaagcatccccgttccagtgagttcaccctctaaatcaccacgatcaaaagggacaagcatcaagcacgcagcaaaaaaaaaaa

SEQ ID NO: 18057 - DNA, 393 bp, Homo sapiens
  misc_feature 8, 63, 82, 149, 214, 251, 357: n = A,T,C or G
ccccctcnagagtacttctagaattaattaaggcgggggtcacttgcttctttccgtaagtgntcaaatttaaaggaaattntgtttcttggatctaaaaatctgctattacacaggtcaccgtgctctgtaattaagaccttccaaanaatcattaaacatatgagtaactgtaaaaaagacaattcttactgccttttatgaaacacatcantaaaaattctgaggcagttaacttttcatttagtcanatttctttcatattaatttttcaaccaagtcccgtattattaagaatattgtatttatgaataagtcaactttaaactataaaatatcccccatactaataatatncatttcttggtttctaatatatacttatacataact

SEQ ID NO: 18058 - DNA, 253 bp, Homo sapiens
  misc_feature 5, 13, 17, 20, 24, 28, 34, 35, 36, 37, 47, 54, 55, 56, 78,79, 80, 88, 99, 107, 109, 121, 140, 141, 147, 149, 150,159, 186, 192, 194, 208, 213, 243, 249, 252: n = A,T,C or G
agtanttctaganttanttnacgngggnggtgannnntacatgctgntttttgnnngccctcagactggaatatggcnnnaccctgtnagactacaagnatccagananagttcaccctgnacttggtttctttactctnngaggtngnntgcgcgatnatttgtgaatgaccactgacagagcgnagaccntnacccctggacttanagccnagtgttaccaccaagaaggtcaaacaggangacaanacnt

SEQ ID NO: 18059 - DNA, 455 bp, Homo sapiens
agtacttctagaattaattaaggcgggtgagatgaaattacaacttgaaaatgtcatcaaggaaaatgaaaggtcttttgaagccagtctttaaaatctgccttcacctatttaacggtaattcagtcatgtctcatgagtatgtttattcctagtacaataggaaagtgtaaaaaaatggattctaagtttattaaagacacttttggtaacttgaaagtgttaatcaggttttaaagtgaactctactaattatgtcattaagaaacatcctacttttaattatatattgtggctaaggactacaaaatcaaaagaatgtattatttttaaagaaaataccttatatatacatggacaggtttaaataatggaaggtagcaatggtgtggattatgtaaaagtatacaatttcagattactgaattttggaaaaattttaatacttacatttc

SEQ ID NO: 18060 - DNA, 451 bp, Homo sapiens
  misc_feature 412, 451: n = A,T,C or G
agtacttctagaattaattaaggcgggaggatgccattccaggctggttcattctgccagctgatgggctctggttgcatgctgagggcaggctgagtgtcctcctgacctggggctggtgtccgagagcaaatatccatgagggagcaggatagacactgtagtatcttttgtagctgagtcttggaagtcacctacggtcattctcacatatggtggtcacaccggtcaggccaggtcagtgtgggagagaccaggagtgaacaccaggaggtgggttcctggggatcccattgtctttatggtgtcgagctgaatccatgagcagagcctctcattgggtcaaggcttcttcatggtcttcaggaacctcttagagctttcttcacagagatgtggaatttttgaaagnttaattctaagtatatttagctcttcatgtccatgggtn

SEQ ID NO: 18061 - DNA, 309 bp, Homo sapiens
  misc_feature 1, 14, 46, 146, 149, 160, 162, 174, 193, 198, 209, 210, 214,215, 218, 221, 225, 234, 236, 241, 242, 243, 250, 251, 283,284, 292, 293: n = A,T,C or G
naagtacttctagnaattaattaaggcgggtgactgaatgaagtanaaccctaggagagacccaatttaaaattgaagaaatgagatgccctgggtatagagagctatcacaattgacattttcttgagggaaaaattgggagaanaanataaaaaaatncntatatataaatncgcccccccccgggggggnctccnccacccccttnngggnnctnatntacnccccccctngnggccnnngtttttnnatgggggggacacttaattttaaagctttttnnagaaattnnaaaaaaaaaaaaaaaa

SEQ ID NO: 18062 - DNA, 422 bp, Homo sapiens
  misc_feature 192, 312, 318, 333, 365: n = A,T,C or G
agtacttctagaattaattaaggcgggggcctctctgggacccttcccttgttatctacctaaggcaagctaactaactcctttcagtatatgaggtaaggcatatattaattatcttgatctggccaccccacaatgtatacttatatcaaaacatcatgctgtacaccataaatatatacaaattttgtnagttaaaaaaattaaaaagacattgaaaagaagcattaaaaagttataattttatatgctggcaatgaataatctgcaaatgaaataaaggaaaacctttcatttacattattatcaaanataatnaaacatttataaatncatttaaccaaggatcactgaaacccacaaancattaccgaaaggaattaaagaagacctacataatgaaaaggcatccactattcatc

SEQ ID NO: 18063 - DNA, 252 bp, Homo sapiens
  misc_feature 208, 223, 237, 238, 249: n = A,T,C or G
agtacttctagaattaattaaggcgggagcacgaaccttctatttcctgtccttggagttatgtgtgaatatagttgggggtaggagacaggaagtagagaaacagacactcaaattgcaaagaaggaaatagaaggttcgtgctcccccttcccgtgtgtgtgtgtgtgtttgtgtgtgtgtgtgtgtactatgtattttccttttnctatttgtccacgantaaggtctggcccnntacccaagttntaa

SEQ ID NO: 18064 - DNA, 346 bp, Homo sapiens
  misc_feature 189, 322: n = A,T,C or G
agtacttctagaattaattaaggcgggtaggcctaggattgtgggggcaatgaatgaagcgaacagattttcgttcattttggttctcagggtttgttataattttttatttttatgggctttggtgagggaggtaggtggtagttagcagtgtgtcaccttttaacatgtccagagtaaatacattanaacccaggaaatattgttagaaaactttgtaattagttgtgtgtattaaaatttttaaaggaactgtgcaaaaataaaacaaaaatattaatggacccagtgatttcaaaacaaccagaaaaaaaaacctaangaaatatgaaatattactaatcca

SEQ ID NO: 18065 - DNA, 252 bp, Homo sapiens
  misc_feature 225, 252: n = A,T,C or G
agtacttctagaattaattaaggcgggctgttagtgttgtaaactacatgcgctttaaataccttttaccgagtgctagagccgttcatcaccaccccacgcagaatttcagctgcttacgttgaacaaattcaacaagtttatcctcaagtttatatgcagcaacaaaggtctatgaatttgggctcataaaactcaggcgaattaaagaggaaacagccgccnaaaaaaaaaaaaaaaaaaaaaaaaaan

SEQ ID NO: 18066 - DNA, 677 bp, Homo sapiens
  misc_feature 19, 24, 27, 31, 33, 34, 41, 42, 47, 54, 56, 62, 63, 65, 70,73, 80, 96, 101, 564, 605, 607, 656: n = A,T,C or G
actggccgtcgttttacanccggnaanaagngnnacccttnntgctngccggtncnttcctnnanagaanaantagaatncttaatgcgggctcgntccanacccctctttaaacactggtaagacctttgtataaatctaacataatcattctacttatattaattacatacaattgttttaaattcctatgaagaaagaaaaaagtagacttgcataaattattctaagaacatgagagaaaaaataaactggcagggccagatctatttctctgttgataaattagaatcagtatatgttttctttgcatatagttatataatcaagggaattatggaatatagcccattgacccttttatgtgggttataatagagatggatgatgtatattggggcagaggaattgggtcaggatacattaaaaaaactgaatttcttgtcttcttgtcttcccaaaaagtgctatatttttaaagctcagtttcttgatgaaagaaataactttctgattgaggaacttgggttttcatgtatggtaaggggtcatttaactttttgngaaaagatgtcataaccaaataaagactaattaattatgtncnctaaaataataacctcttttttctttttttttttttttttgaaaacaanagggaaacccctttaaaaaaa

SEQ ID NO: 18067 - DNA, 592 bp, Homo sapiens
  misc_feature 21, 384, 405, 416, 422, 425, 428, 431, 443, 447, 462, 463,467, 501, 518, 519, 521, 524, 525, 529, 530, 538, 540, 545,547, 550, 553, 560, 568, 574, 576, 577, 578, 579, 580: n = A,T,C or G
gggtaccgggccccccctcgngagtacttctagaaattaattaaggcggggcacttccagcctacagaactgttaaaaataaatgcttgttgtataagctacccattctatggtattttgttacagcagcccaaactaagacaataatgttttatgtatgaaacacaatatataattcaatatacattatacatgtttcacatatatatatatattttttcagatacatttaatttcaaaattttgagttgacatctaattgttcatatcaggctcagttgttgatatgagctgctgctgtcatttagtgagtggatgtcaagaaagttgctaaacatcctaaaatgccccaggagagtcttccccatcaaaagaatatctgtncccaaatttcaccatgctggngggtgaaaggncctggngtnaanagncaagggatgggnaaancttattcttttaaannttanaaaatagggccttcctttttaattttaattgganccaaggctcaaaaaacnncnggnnaggnncccttttnanccttngnggnccngggggcncaccggtntttttncnnnnnaaaaaacccggg

SEQ ID NO: 18068 - DNA, 342 bp, Homo sapiens
  misc_feature 67, 126, 130, 133, 158, 159, 161, 171, 172, 175, 176, 177,178, 179, 180, 183, 186, 191, 193, 194, 195, 196, 198, 199,202, 217, 221, 230, 231, 234, 235, 242, 293, 338: n = A,T,C or G
agtacttctagaattaattaaggcgggggagggaaagaaaacaaacagtttcagaattgaataggcnagtgactgttttaaagattaagtaataaagatgtcttatctagaaaaaaaaaaaaaatnaaanaanaaagaaaaaaaaaaaaaaaaatggnncnccccccccgnnggnnnnnnccnccnccccntnnnngnnttntttatcccccccccncagngggagcttnnaannaaacttnatgtaatatggaagtttgaaagaagttaaccaaattttccagaaggcgaanattataccatgtccatatccttgaatctaggaattttatgcctanaaat

SEQ ID NO: 18069 - DNA, 312 bp, Homo sapiens
  misc_feature 4: n = A,T,C or G
gggngccgggccccccctcgagagtacttctagaattaattaaggcgggggaaggacagagaaagaacagacaagagctagcattatatctcttctggtggcttccagacagactgccattcttctcaatcaacccttcccttctttcttctttttcttcttcaccaaattccaggatacctgggtaggtgatgaacatgaggagaaaggagaaacggtaaatccacccaagcaggaaggagtaatttccaactctatcccccattctcctcctatccctcaaccccgacatcattaccgggttttcctctt

SEQ ID NO: 18070 - DNA, 415 bp, Homo sapiens
  misc_feature 40, 53, 84, 86, 89, 97, 131, 134, 141, 144, 158, 193, 198,216, 221, 255, 256, 257, 258, 267, 273, 274, 279, 280, 288,289, 291, 295, 298, 299, 302, 303, 304, 312, 313, 314, 318,319, 321, 324, 325, 329, 353, 356, 357, 362, 390, 392: n = A,T,C or G
  misc_feature 396: n = A,T,C or G
agtacttctagaattaattaaggcgggagttagagaccancctggccaacatngtgaaactccttctctacctaaaatacaaananaanttagccangcgtggtggcccatgcctgtaatcccacctactnggnaggccanggnaggaaaatcacttnaacccaagaagtgggggttgcaatgagctgatatnttgcnacacgcactccagcctgngcaancgagcctgggtgacaaaaaaaagactatgtctcnnnnccccccccngggggnnccccnnctcccccnntnatgngtnnttnnnaccccccnnnagcnncnatnnattnacaaaaatgcccaagatcaacacncanngttanatagtcttttatattatggaataagcanantaanaattaaattaaaatttcat

SEQ ID NO: 18071 - DNA, 246 bp, Homo sapiens
  misc_feature 14, 18, 21, 24, 25, 28, 36, 39, 65, 96, 97, 98, 164, 168,169, 173, 174, 186, 201: n = A,T,C or G
cgcgtgcgtctttncacnccngannaanggtaacancangctgggctaccgggtccccccctcgngagtacttctagtaattaattaaggcggggnnntatgacagcataacctaataattgtatctacattaaaatgacaaacgtgatactgctgcttgtcanattnnaaannaatagatgaatnaagtgagagacttantttattcaggaaataagagcaaaaccaaccacatcaaaaaatgta

SEQ ID NO: 18072 - DNA, 434 bp, Homo sapiens
ccccccctcgagagtacttctagaattaattaaggcggggtttaagctcctattatttactctatcaaagtaactcttttatcagacatttcttaggtttgagggggaatgtatttcaaggtatgataacaaagatttggctacagcaaaactaaatactcaatgttaaaaataacagaaacaaaacaaaaaggcaaataaacagaaaaatacttgcaggatacatgagagacaaaggcttaatgtctttactgtataaagacttaaaaaaacagtggaaaggcagacaaataccttaagagaaaaacaggccaaggccaaaaatcagggaactcatgaaagaagaaaaacaaatttccattaaacatattttaaaatggcatacctggctaatattcaaacaaacacagttttaaacaggaagattccccttt

SEQ ID NO: 18073 - DNA, 804 bp, Homo sapiens
  misc_feature 15, 25, 39, 40, 44, 47, 48, 51, 52, 53, 76, 131, 137, 173,174, 181, 182, 243, 253, 413, 441, 487, 488, 500, 514, 515,545, 563, 567, 568, 575, 579, 580, 581, 589, 595, 598, 607,608, 617, 626, 634, 639, 640, 643, 648, 658, 670, 682: n = A,T,C or G
  misc_feature 695, 710, 712, 715, 718, 733, 735, 740, 762, 763, 773, 774,776, 777, 778, 787, 788, 790: n = A,T,C or G
aatccaggaaacagntatgaccatnattactggccgccnntctncanngtnnngatacaattaattaccgcggganaatggcttgaacccgggaggcagaggctgcggtgagcggagattgcgccaccgcnctccancctgggccacagagcctgaacctgtctcataaatanntacagtnntagaaacaaatcaaactgaagtacagaaagaaaaaagcttgcagaaagtaagcagagcctnggtgagctgngagaaaatctaagctaaggaacgcacagggagctggacagcaggaagaggagaaaggagagcacaaaaatactggaagaactgtctgaaaattttccaaattcgatgcaaagtataaaccaacagttcaaagatgctcaacaagttccacgcaaaatatncacaaaaaaatcacaccaatacacatcntaaccaaactgttaagtgccagtgacaatgagaaatcttaaaagcnnaaaaaaaaaaanacccccccaaaaannttttttttccgttttttttcttcaaaatcnttgaaagccggaaaaatntganngaccttntttnnngataaaanaaaaanggncaccctaannttttttccncggggaaantaaaaccnttttnnganaaccnaaacccgganttttttcccttnggctttctttgntttgggaaaaaangttaaaagttttttncngtnggnggaaaattggccccngnacccnaatttttgccttcccccttaannaaaattttcnntnnncccaaattnntnttgggaaaaaaaaa

SEQ ID NO: 18074 - DNA, 482 bp, Homo sapiens
  misc_feature 71, 72, 74, 77, 80, 81, 83, 85, 86, 90, 93, 109, 110, 132,135, 136, 152, 153, 165, 182, 183, 194, 202, 203, 207, 215,217, 218, 219, 222, 223, 224, 225, 226, 229, 232, 243, 248,253, 254, 256, 258, 266, 292, 307, 327, 343, 346, 360: n = A,T,C or G
  misc_feature 374, 381, 395, 396, 400, 416, 418, 427, 439, 441, 466: n = A,T,C or G
agtacttctagaattaattaaggcgggggggaattttttttaaaaaacaacaaaaaaaaaaaccttccaanntnggnttnntnannaaanttngtggggttaaaaaaannaaaaaaaaaaaaaaaaaaaaanccnnaaaaaaaaaaaaaaannaaaaaaaaaaanaaaaaaaaaaaccctgnnccccccccccngggggacnncccncccccccntnnntannnnnttntcnccccccccccnggccnttttnnantnctccttangggtgaacgtggccccattttccggnacatgctctgctctnaaccgctctctttttcatcnggtacgggcccagacnttngagtatcacaaccnacttcaaaaaatanactgaanttgtcacaagtttnncccngggatcaaaaaaaaangntcttctttnaaaaattaaaangngttttctttccattttatattaaanttaaaaaccaaagaaa

SEQ ID NO: 18075 - DNA, 110 bp, Homo sapiens
  misc_feature 76: n = A,T,C or G
gggtacccgggccccccctcgagagtacttctagaattaattaaggcgggggggaagtgatggtgtggccaggcanttatagattaaaggcctgtgagtactgctgaaaa

SEQ ID NO: 18076 - DNA, 354 bp, Homo sapiens
  misc_feature 310, 330: n = A,T,C or G
gtctcttccctccaactagggcacctgaagggctaagtgttccaagacagcagtgtcagcaaaggctgcgcagatttgaggagtgggaccggcagagctggatgaaacctgactatgctgaaggggaaatggagaccccgggaggggcagggacctgctgagtgcctcccccaggcagtagctgacctggaccgcatcccggtactcctgctgagagatcctgactaatacgccaaggcccagggctgcatgcccaggactcaggaagagtctcgaagaatcctctgcacacaaaaacactggctattcnccgaagctgatgtcagcttnttccctgcaaactgcctggtccag

SEQ ID NO: 18077 - DNA, 438 bp, Homo sapiens
agtacttctagaattaattaaggcgggtattattatccccattttgcaaatggagaaactgagatccgagagatcagctgattaggccaagattacagaaaagagtaaggccagacatgaactcatatctgagtctatgtccagtggtctttaaaaagatcaactctattaaaaacacacaaaaaataagtattacatagacaggaggatgagtagctgtatcaggcaaataataataataatgatgaaagtttgatagtgattttaaaaactgaaaatagcatctctatacctttagtgactcagagtctcagaataaaaaaataatagaatggccaggcgcagtggctcacacctgtaatcccagcactttggaaggcgaaggtgggtggatcacgagatcaggagatcgagaccgtcctgactaacaccgtgaaa

SEQ ID NO: 18078 - DNA, 472 bp, Homo sapiens
  misc_feature 24, 25, 56, 85, 117, 310, 345, 354, 359, 367, 370, 388, 398,419, 429, 436, 450: n = A,T,C or G
tctgggtaccgggccccccctcgnnaagtacttctagaattaattaaggcgggcanatcacctgaggttaggagttccagaccancctggccaacatggtgaaaccccatctctacnaaaaatacaaaaattagccaggcgtggtggcaggcgcctgtaatcccagctactcgggaggctgaggcaggattgaacctgggaggcgcaagttgcagtgagccgagatctcgccattgcactccagccttgggtgacagagcaagactctgtcttaaaaaaataattaaattagcctttgattattggaaanaatttgctttcagattttccttggtaaggttaacncgtaggtantttgnatgccatnctnttaatttagcccttattntttgcccaanccttctggaactacttggaantttttaaaanatgtttnaattttttaataancccaaaaaaaaaaaaaaaaaaa

SEQ ID NO: 18079 - DNA, 282 bp, Homo sapiens
  misc_feature 253: n = A,T,C or G
agtacttctagaattaattaaggcgggtcattcttcaggtaaaattataaagcttagaactgtgaactaaagaatgacccgctaaagttgagtttattttactgcttatcattactcatatttgtacccactaagatcaactacaggaggcttgtagtttatcattagaaacctagatagcccataatgaaatagtatccaaaatatcatatagcaagtggctacttttaaagtaaaagccatcttttctcanaaaaaaaaaaaaaaaaaaaaaaaaaaaag

SEQ ID NO: 18080 - DNA, 167 bp, Homo sapiens
caaaagctgggtccgggccccccctcgagagtacttctagaattaattaaggcgggtgtgctcttttagctgttcttaggtagctcgtctggtttcggaagcgtcagtgtttccatgttatggatctctctgcgtttgaataaagactatctctgttgctcaaaaaa

SEQ ID NO: 18081 - DNA, 496 bp, Homo sapiens
  misc_feature 383: n = A,T,C or G
agtacttctagaattaattaaggcgggggagattttacttacacctggtctcctggtacacaataatatctaatattcttttcattgttgtcttctttttcttcattttgttgttgttattcctcacttatcttccctgcccctagaaaatccacatataaagtaaacccctcccaccaaatatatccaattttatgagcagcatagctattgctgctgacaaatattcgtaaagctcacgtatcgcataacgcagaacttctctatttaaggaatagatactattggggtaggaacaagtacagcagaagatgagcaaatgtcttaaataaaagtttacagtttattattatttctcttttttaaaatatcttctattaaancctatttaccaccatcagtgatgcttcccccacggcgtttacagactcttcctgcggcaggcggttggaactacaaagggatcggtgcctatatcacaataccaaacttgata

SEQ ID NO: 18082 - DNA, 816 bp, Homo sapiens
  misc_feature 29, 250, 254, 256, 258, 260, 261, 266, 272, 274, 276, 287,289, 306, 313, 316, 320, 323, 326, 331, 337, 346, 351, 361,367, 376, 383, 388, 390, 392, 393, 406, 409, 411, 412, 413,414, 415, 416, 417, 418, 419, 420, 421, 422, 423, 424: n = A,T,C or G
  misc_feature 425, 426, 427, 428, 429, 430, 431, 432, 433, 434, 435, 436,437, 438, 439, 440, 441, 442, 443, 444, 445, 446, 447, 448,449, 450, 451, 452, 453, 454, 455, 456, 457, 458, 459, 460,461, 462, 463, 464, 466, 467, 468, 469, 470, 471, 472: n = A,T,C or G
  misc_feature 473, 474, 475, 476, 477, 478, 479, 480, 481, 482, 483, 484,485, 486, 487, 488, 489, 490, 491, 492, 493, 494, 495, 496,497, 498, 499, 500, 501, 502, 503, 504, 505, 506, 507, 508,509, 510, 511, 512, 513, 514, 515, 516, 517, 518, 519: n = A,T,C or G
  misc_feature 520, 521, 522, 523, 524, 525, 526, 527, 528, 529, 530, 531,532, 533, 534, 535, 536, 537, 538, 539, 540, 541, 542, 543,544, 545, 546, 547, 548, 549, 550, 551, 552, 553, 554, 555,556, 557, 558, 559, 560, 561, 562, 563, 564, 565, 566: n = A,T,C or G
  misc_feature 567, 568, 569, 570, 571, 572, 573, 574, 575, 576, 577, 603,613, 638, 644, 651, 655, 663, 666, 667, 685, 690, 704, 707,709, 712, 713, 718, 729, 739, 749, 753, 758, 763, 767, 779,780, 783, 795, 802: n = A,T,C or G
ggtaccgggccccccctcgagagtacttntagaattaattaaggcgggggaaagagagagctcctttcgccatgttttaccagtctgctgttataacctcttaggttgtatcctttaatttccagccttttaggttagtttctgtaacagaacaagtgagtctgggatgaagtcctcaaagtacttcaaatggtaattgttttgtttttgtaatagcttaacaaataaacctaggttttctataaaaaanaaanangnannaaaanctaaanananaacaaaaaaantnaaaaaaaaaaaaaaaangcggccnccnccgnggnggngctcnaattcnccctatagngagtnggattacccnccctcnctggccgtngttttanaacgncncnnctggaaaaacccnggngnnnnnnnnnnnnnnnnnnnnnnnnnnnnnnnnnnnnnnnnnnnnnnnnnnnnnncnnnnnnnnnnnnnnnnnnnnnnnnnnnnnnnnnnnnnnnnnnnnnnnnnnnnnnnnnnnnnnnnnnnnnnnnnnnnnnnnnnnnnnnnnnnnnnnnnnnnnnnnnnnnnnnncttattttttttaaccaatggggccnaaaatcgggnaaaacccctttttaaattaaaaagnaaaaanacccccnattnggggtggnggnngggttcccttttggaaanaaaanagtcccccttttanaananacnnggggnttccccccccnaaaagggggnaaaaaacccntttntttanggggnaaangcccccttcttnnaancctccccctttntataagnttttttgggggggg

SEQ ID NO: 18083 - DNA, 481 bp, Homo sapiens
  misc_feature 123, 257, 264, 268: n = A,T,C or G
agtacttctagaattaattaaggcgggtgtggccatctttatttttagaatctgagtcactgttgttgatataacttgttcagggctacaaataaatggctagtgggaccaggaatcactgtntattcaccccattcctaaaatttatttcttacctgacgctatatacaattataacagataggtgaaactgtttcaaatgaaacagctttttttttcagatatttaacagtttttcttctttttttgaaggcacnctatttnttanaagaataaataaaataaacattatgattgaatatacattataaagactgaatgcaaattattttacatatatattttaataaaagagacatctaaagtttataagaattccatcagaactcacaaatgcaaactgaatattagccttcaaagtagctatctttaagagattgcatatttattccaattaaaaactattttggaatctattttg

SEQ ID NO: 18084 - DNA, 330 bp, Homo sapiens
  misc_feature 1, 2, 135, 137, 209: n = A,T,C or G
nnagagtacttctagaattaattaagggggaacagcaatcacattgatcaatatttcaaaatctactcattcatactttgagacccataaagtactatttccttcttctcttcctacttgattggctgctgcttntnagtctcctttgttgggtcctccttacccttttttatgtcatccaaaggaccaccaggatggctagatagtanaaaagaaagttggccggcacagtgactcacacctgtaatcctagcactttggaaggccgaggcgggtggattgcctgagctcaggagtttgagaccagcctgggcaacacggtgaaacccc

SEQ ID NO: 18085 - DNA, 273 bp, Homo sapiens
agtacttctagaattaattaaggcgggatggtctcgatctcctgacctcgtgatccgcccgcctcggcctcccaaagtgctgggattacaggcgtgagccaccgcgcccagcccaagtaatccatttttatctgccatctctctccattgatttgtgctgcctgcatttattgtatttttgtgtctaacttgtctcatagccctcaccgccccattccatcctgttgttcaacctctgtctctttatgttaactggatttctgcattaaatga

SEQ ID NO: 18086 - DNA, 430 bp, Homo sapiens
  misc_feature 45, 59, 71, 85, 94, 122, 127, 140, 207, 340, 399: n = A,T,C or G
agtacttctagaattaattaaggcgggctgttctgttctaattancatttgcctggaanagcaccatgttnaccattagactagnacttgtttntctgggcattataatcattcctcaactntgacnatcgttcctaatntcacttgcattactttgaaattccaacctcaaagactccccgcaaactggtgtcaccatctctcttnctgctggtgccatcattagtacccagggaaggccctgcttgccttcagcttacttaagagtatatggctagggagttatggatccactgcacagttgttctgtaaccagaggaattaacccatctgtgcctancattccattattggaacactaagcttgtgggagtttatattctactgttcaacctaatngccaaggtctgatctttcacacacaaaaaaa

SEQ ID NO: 18087 - DNA, 471 bp, Homo sapiens
  misc_feature 22, 109, 294, 328, 335, 339, 346, 368, 372, 397, 447: n = A,T,C or G
agtacttctagaattaattaangcgggggaatcagaggcaatgagcccgtatatacttcaactcaagaagactgcattaattcttgctgttcaacaaaaaacatatcangtaaatagtggtttcttggcaatcctttgttccatgtgttttgtggcttcaggagctgggggatgtagctgaataacttataccagtgattctcgacagggtatgaatataagtgacaaaatcactggagaattttctacaagtgtgcccttccctctcctaaagctgagtcaaagttattgatnaatgtttgtatatatccctcaggtgactgggtanacaagangttnagaaatnactgggtgttatatcccaaccnggtntctacaatattggaaaacaaaaatnctattgaaatggttagctgccatcagcatgggagtattggaatacagtgngatattacaaaagaaaatgtaaac

SEQ ID NO: 18088 - DNA, 634 bp, Homo sapiens
  misc_feature 523, 583: n = A,T,C or G
agtacttctagaattaattaaggcgggggaaggctgtgtgaccctggaaaagtcacttcactattctggcctttgtgtactcatgagttaagaaagggagaaaaggttgggcatggtggctcacgcctgtaatcccagcactttgggaggccgaggcaggcacttgaggtcaggagtttgataccagcctggccaacacagcgaaaccccatcttcatgaaaaatacaaaaattagctgggcgtacacctgtaatcccagctactcggaaggctgaggtaggaggatgacttgagcccaggagctgggggatggatgggatggatagcatggatggagagcaatattgcagtgagctgagattgtaccactacactccagcctggctgggcaacagagccagatcctaaaaagacaagatgacaagaccaaagacaaagaccaagacagaaaagaaaagaaaagaaaagaaaagaaaagaaaagaaaagaaaaagggagaggggccatggctagatgtttaangccactaccagatgtatacacatttctcaagttcaacctgagaaaactgattggaaaaanaaaaaaaattctaaaaaacataacaaattttctaaacatttctctggtctt

SEQ ID NO: 18089 - DNA, 420 bp, Homo sapiens
agtacttctagaattaattaacctacatatatttgtgtctgcaacaaaaaaggaaaaagagaatgaagaaaacaagaaaaataaagagaaacgaaaaagcagaagacacaaagaccagaaagctagaacagaactaaaataagatcatgcatgtcacaaaaaacagaaggaaaagaccactgctcacaaaggaactgcaactttagcgatgtagtcctcctgctttgccccattttacacttgaggaaatggaagcttagaatggttagataactgctcaaggtcgcccagtttattagtggtcatcaggattagaatctaagcctcctgagtcatactttggtgctctttccataacagcatagttgtaccgattacattaatggtagtaaatgatactttaaaaaggattccataggc

SEQ ID NO: 18090 - DNA, 614 bp, Homo sapiens
  misc_feature 49, 50, 57, 61, 76, 92, 95, 126, 151, 170, 202, 208, 218,236, 239, 247, 249, 251, 256, 268, 274, 275, 281, 282, 289,291, 294, 327, 404, 448, 483, 518, 526, 552, 595, 597, 605: n = A,T,C or G
agtccttcttagaaattaattaagggcggggaaaaagaattcgagaaannataaganaaanttataaagaatcatnaacatacttttttaanaanaaaagattaattttaaaccttgaaaagttanggaagcgcattaaaaaaaggacaangctaggaaacaataaagcntaaggggcaaaatgtcccaaattttaccttgnaaaaanaaatggcggnccccccccgggggggggnacnaaatcccntntntttgngtcatgttcaanccctcnntggatnncgggttntnttnaacaagcttgtgggatgggttttcccattagtncttccttttctgttacatttggctattatctttcagtccttttggagcaaggtgggaccccttaacaaggtttgagncaaaaatggaattattttgggatcccattgtttcctctttgtgnacccttgagttcttcatgccaagggagaatcttgnaagcctgaaacaaatggaaaaaatctttcagcagnaaattagnaaaatggccgtgggattgttaattanaccactgaaaattcttgacttttcttggaaatttttaaatgtnanaaataaantttttaccc

SEQ ID NO: 18091 - DNA, 606 bp, Homo sapiens
  misc_feature 353, 500, 507, 527, 538, 548, 572, 578, 596: n = A,T,C or G
agtacttctagaattaattaaggcgggcacataattttgcaattgtatttttatttatattacacagtaagaaaaacagaatgttctatatttatagtcttcctgttacaaatatgcgattagagcttaaagagtcatagtatcagaattagaatgttaatattcccactcaatatactgaggtctcattttcattatggtgggtttactaactgccccatatacttcgcagggctgctttgaagctaaaatgagatcattcatatgggatcacattaagctgctagaaattagaaaatgtacatgagatagtataaattttacagtcactaatttaagtttcttttcattanacgctgttggaagctctgactgtggcagttgttggtaagccgtaactgcatttctatatgttataaataactttttaatgtagatagatctttcaggtaaaaaggatttggggctaaagtttaacatctgggaatatcatatttcanaaatttnccttagggacaaataatttntaaagtttaanccaaagttanatatttatcggttacatatttcanctggancttaaaaagtggaaaaanaaaaaataaa

SEQ ID NO: 18092 - DNA, 337 bp, Homo sapiens
ccccctcgagagtacttctagaattaattaaggcgggggaatcatttaggtaggagactgtgccaagcagtattgggaatgaagagaaatcagaagaagtattgacaaggacaaatcaaatatctgactggatatggaattgaaagaggaaatcaatgataacaaggttcgaggatcagttatgctgcaggtctaccttgtcttcagtattttattgaagtcattcctataacatctgtgctagtgcttgcttcagtagcacatatactaaaattggaatgatacagagaagatcagcaaataaaaatttaagtacaaatttaaaaaaagaaaaaaa

SEQ ID NO: 18093 - DNA, 452 bp, Homo sapiens
  misc_feature 16, 48, 49, 52, 60, 68, 80, 81, 86, 90, 99, 104, 105, 115,116, 117, 119, 132, 137, 154, 155, 157, 171, 177, 179, 180,181, 186, 189, 196, 208, 211, 214, 220, 222, 223, 225, 231,236, 237, 248, 251, 253, 273, 274, 276, 279, 281, 295: n = A,T,C or G
  misc_feature 312, 430, 441: n = A,T,C or G
accgggccccccctcnagagtacttctagaattaattaaggcgggtgnntgnagacccanctactcgngaggctgacgcnngaaanttgnttgaacccnggagnncaggttgcannnancctatatcacccnattgnactccagcctggaacannancgaaactccgtctnaaaaangnnnaaggnaanaaggggnattaggcccccnccnaangagagntnncntcccgnccccnngggaaaccacnatncntcccccccaggtgatagctnntnaanancggggatttggacnagagacacaggatgaantaccggggggcagccccgtgatcaacaactgctgcaagaggggccgtttgttcgactcgctagtcttctgcggctctatgcggtactaaagagcataagacagaagatacaataaccncaaaaaagtanccgggcgtggt

SEQ ID NO: 18094 - DNA, 398 bp, Homo sapiens
agtacttctagaattaattaaggcggggaggggttaactaaccacagtcaaagcatctagaaaattagagaagagaaccatatatgtgatcttggaggtatctgaggtcacattccttctctttaggtttctttactaagataaggaacattataaagattcagaaactatattacctttaattgttgctgcaattcgctattcaatctggccaaaacggtgttggtttccttattacgtctaattgatgcctgaatagctttcttatctttcccaacagatctgagaagataaagaaggcaaaaaaaacccataaccttcatttcttatcttaaatcctctctattccttcctgatctatttctaaacatgagaagcaaaaagagcatctttttcct

SEQ ID NO: 18095 - DNA, 561 bp, Homo sapiens
  misc_feature 1, 14, 60, 108, 111, 128, 129, 140, 154, 157, 161, 163, 166,168, 178, 181, 182, 187, 195, 197, 199, 221, 222, 236, 241,261, 266, 279, 284, 297, 298, 311, 345, 350, 359, 366, 369,385, 391, 392, 393, 397, 398, 400, 416, 430, 443: n = A,T,C or G
  misc_feature 454, 463, 467, 471, 473, 474, 494, 495, 504, 537, 539, 540: n = A,T,C or G
ngagtacttctagnaattaattaaggcgggagaattgcttgaacccagcaagcaggaggntgcagcgagctgagatcatgccattgcactccaacctgagcgacaaanatnccatctcaaaaaaaaannacactgtgatnccattttccactgnatnaaangnaananttttataaanctnntgttnataaaatnantntaaaataaaatgttatatcccnncaatggtaagaatntgganaaaccagtatcttcatactncttanaagtataaatcanttcantcttgggcaaatnntttaagtttattncatcccaggttaaagttgctcaaactggactganaagtncctttctangaatttnggnctggtgccatggtccnaaaaannntttnntnaatgttacccaacgtntttttaacaaagtntttgtccccaaanaatttaacttnccccattangaanggcnannaacctttggcctttttgaannaaacttttntttttcccaatgaaccccttcaaaaacccggtnannaaaaaaaaaaaaaaaaaaaaa

SEQ ID NO: 18096 - DNA, 429 bp, Homo sapiens
  misc_feature 50, 56, 65, 72, 82, 91, 92, 93, 96, 99, 103, 120, 121, 125,131, 139, 145, 149, 158, 162, 165, 170, 174, 176, 177, 178,194, 199, 279, 281, 283, 286, 287, 328, 331: n = A,T,C or G
ggtgccgggccccccctcgagagtacttctagaattaattaaggcggggngggggnagggttaanattgcgnaagatacgtnttgtagccnnnaanctnttgngtgcgatacaccaacgnngaanatgtgnacctatgnctctgncctnccccttgtnctcntgnacccnaaanannnaactatgccaaatgtnacttntggaaatttatttaagaaattcagtggatctctatatggaacagtgaataagacaagaacatgtatgtaaaaataaactntntngcnnatgtatggaatagttttgctgaagaaggtgggtgaaaagtngcncacctaagtaattttggaaattgctaaacttgtttcccatgggggtcacgttaataattctgaaccactgtactgtataatggaattgaaaaaattgc

SEQ ID NO: 18097 - DNA, 630 bp, Homo sapiens
  misc_feature 4, 174, 247, 251, 264, 296, 317, 337, 344, 383, 384, 399,412, 422, 441, 446, 450, 451, 467, 518, 523, 545, 546, 554,555, 589, 597, 615: n = A,T,C or G
ctcntgagtacttctagaattaattaaggcgggataagctgataaaggaaggaaagtacacccctccacctcaccacattggcaagggggagcctcggccctgaacagagcagctgctgatgtctggaggctgattttcctgttctctgttctccactggaaaggttgtttacnacaaacctccttgtcaaagtgtgttgaaaaaaaaaacaaaaaaaaaaaaaaaaaaaagcggccgccaccgcgngtgngagctccaattcncccttataagtgaagtccgtattacgccgccnctcacatggccgtcgtttttnacaaaccgttccgttggacntgggggnaaaaaacccctgggccgtttacccccaaccttttaaatnncccctttggcaaggnaacaatacccccncttttttccnccccaaggcttgggccggntaaantaanncggaaaaaaagggccncccggctaacccggaattcggccccccttttccccaaaccaagtttttgcngccanctcccttggaaaatttgggccnnaaaatggnnaaaaaattttgttaaaagcccgttttaaaattantttttttntttaaaaaaattacgccngtttaaaaaattttt

SEQ ID NO: 18098 - DNA, 540 bp, Homo sapiens
  misc_feature 1, 3, 14, 34, 49, 52, 53, 56, 64, 67, 70, 76, 77, 78, 83,86, 87, 95, 97, 101, 106, 107, 108, 119, 135, 136, 139,144, 148, 149, 151, 152, 160, 167, 168, 176, 178, 180, 182,185, 193, 198, 206, 219, 221, 222, 224, 227, 228, 230, 232: n = A,T,C or G
  misc_feature 246, 288, 309, 314, 322, 327, 329, 332, 344, 357, 370, 412,418: n = A,T,C or G
ngngtacttctagnaattaattaaggcggggttngaaacctatggaccnagnnacncaacactnatngtncagatnnntcctnacnncctgccananatancggtnnntgtattgttcncatcaagcatttgctnnttntactnttgnngnntaggctgntctaatnngctaagangntngnccntatataangtaangtggcctnagagaatcgccangnncnctnngngnggggactcaaactntcctactctgcgagcttgaacgcttaaagtctgaatccagtntttatcatactgcttatgatnaacgnacacatangatcntnctncctatgaccatnatacactgttggngggtatataaatnggtctgacctccacaccaggacagtatgacaatatctatcanaatttnaaatgtatggttccctttgattcagctattctacatggacatgctcacacatctacatagggatttacgacagcacattgttactgctcagggtctgaattcttaaaatactggaaataact

SEQ ID NO: 18099 - DNA, 444 bp, Homo sapiens
ggtacccgggccccccctcgagagtacttctagaattaattaaggcggagattccattttgcctggccacctgtggggtattagcttgtggctgtcactcattcatccaaacaatcttgattgagcgcttactatgtgccaggtactggtaggacagcagtgaacaaaatgggatccccgcccatgtggaacttaaattctagctgttgctgcttgcccttgaagccctgagtttgtccaccaagccctttttctgcacccagctcctttcctctctctccgtcaagacctacacaggtctttgggcagcctgaccagcaggtgtctggaaattgagaacacggtattgctggcctaggcctttcctgcttatccctggctcttcgggataaacgtggcttactgtggctctccaggagctgacctctgacttcacttggccaa

SEQ ID NO: 18100 - DNA, 368 bp, Homo sapiens
agtacttctagaattaattaagggggctccatttattcaacaaatatctattgcacatccactatgagctagtcatttaacaaaaattaacaaatatttatcatatgtataaatgaactaatactttttgataattggagcaaaacaatatgcattgatctaattaacatgtaatttgaatctaaactttatgtctagatcactgaaatataagcatattttaaattcagaatgtattcatttacttattcattttttcaacaaatatttattgagtgcctattttgcatcaaccattgttctagttgtgaagagtacaacactgaacaaagcagacaaggtcactttctatgtgtaagtgtacattc

SEQ ID NO: 18101 - DNA, 226 bp, Homo sapiens
  misc_feature 21, 34: n = A,T,C or G
ggtggccgggccccccctcgngggtacttctagnaattaattaaggcaggaatctataactatttatctatctgcatatgtgtatataacatcagagctttaaaatatataaagcaaatattgacaaaagtgaagcaagacatacatagcaacataataattgtagacatcaagaccccatttgcagtaataaatagaaaattaaggtaaaaaaaaaaaaaaaaaa

SEQ ID NO: 18102 - DNA, 323 bp, Homo sapiens
  misc_feature 279: n = A,T,C or G
gtaccgggccccccctcggggtacttctagaattaattaaggcgggcaggatagttcagacggtttctatttcctgagcgtctgagatgttagtattagttagtttctgttttagcatgttttactggaaaaagcaatggccaatttgttttaataaatcttaaacatcctatatttatttttaaatattcttctaggttatttgcatgacaagaaggaaaatatgtattttctctgatctttactgtatttattgatagaaggcagagaatgctgaanaaattgaaaagggtgaggttaagagctagcacataaaccttgta

SEQ ID NO: 18103 - DNA, 306 bp, Homo sapiens
  misc_feature 8, 159, 221: n = A,T,C or G
ccccctcnagagtacttctagaattaattaaggcgggaggtgcccggcaaccctaggagcccggcgcggggcacgatgggacgcccccgggaagaggcggagctgggttcgagcgctggggctgcggttgggaaactactggaggatgtggtgcaccanaataagagaataaaccaagaaacaggaagacgtgatccaggcaacaggatattccagtatanaatttaattctggagtgtgagcaggaaccagttaactacattcattgtccaacccccactggtttgaaagaagactccaaattct

SEQ ID NO: 18104 - DNA, 549 bp, Homo sapiens
  misc_feature 35, 37, 38, 61, 73, 78, 89, 96, 102, 113, 117, 125, 145,147, 159, 160, 165, 172, 177, 181, 188, 190, 191, 200, 206,210, 211, 213, 217, 219, 220, 221, 222, 223, 224, 226, 229,230, 248, 249, 250, 251, 252, 405, 456, 475: n = A,T,C or G
agtacttctagaattaattaaggcgggggaaacancnntctgaaaaaaaaaattgaagacncacctttcatgnatttnaggaacatttnacttttnctcatnttctgactgcnttgngaaccatnatagctagatcaaaattagntntgttaataaacnnaaaanaaaaaanaaaanaaanaaaaacngnnccccccccngggggngacnntnctcncnnnnnnanggnnctttgatcaacccccccnnnnnggcctagggtataaacagcgcaatcctattctagagtccatatcaacaatagggtttacgacctcgatgttggatcaggacatcccgatggtgcagcccgctattaaaggttcgtttgttcaacgattaaagtcctacgtgatctgagttcanaccggagtaatccaggtcggtttctatctacttcaaattcctccctgtacnaaaggacaagagaaataanggcctacttcacaaaggcgccttccccccgtaaaatgatatcatctcaacttagtattatacccacaccccccc

SEQ ID NO: 18105 - DNA, 312 bp, Homo sapiens
  misc_feature 29, 30, 300: n = A,T,C or G
agtacttctagaattaattaaggcggggnnatagaaatctagaaaaagttcccaagttacattgtcaacattcagttttgtaaccaacctggaaatggctaatagtttattttagctaccgtttactgaaagtctgtgtggtcagacactctactgacagctttaaatgattggtcttagttaatcctcacaataattcttcaaaatagatgatattatttctgatttttatcaattaaaaaaaaaaccatggactcagggttatgtggctttcatggggacaaagctagtaatgaagtnttaatagatatt

SEQ ID NO: 18106 - DNA, 433 bp, Homo sapiens
agtacttctagaattaattaaggaggggcggaatggtctcttttcggacttttgaagattttgtcaggtaagacattgtggaactatgtctgtacaaggggagccatggacatctgtgttttggggtctcatctttctgcaaaatgaataaaggtctcccgaatagccatgagccagctaaaaagatgtaacccttgctgtatatgccgttggagaggtatatatccttgcatttctacctctcattcagattctacaagcctctacttgtagtatgggcctggtcagaaaaaaagaaacaaacaaaaaccatcttttcctgtggagctaacagaagaagctgtctgctctgtgatgagtgaaatgtcaggagaaattaaacataacactagagtgagccccacaagagacaatacatcttttgattaaatgc

SEQ ID NO: 18107 - DNA, 408 bp, Homo sapiens
  misc_feature 44, 217, 231, 233: n = A,T,C or G
agtacttctagaattaattaaggcaggtcgatagaaaatatccnaacagagaaaaaaatttttttcaacatgtggaacatgataattaagtttaatatatgtgtaattaggatccaaaaagaaaaaaggggcagaatatatgaaaaggtggtaacagaactttccaaaactaaaaggcatccagctagattcaaaaaactctataaacataaagcancaaagaaaaccacntntgaacacatcaaagtgctttaaaagtaacacaggagagtcttaaaattagccaaggaaaaataaaagacacattatcctcagcaagaatatagctaatacattgccttcaataagactggtagctgacttcaacaaaaagaaaggaagacagaaaagcaaccaaacattcttaat

SEQ ID NO: 18108 - DNA, 455 bp, Homo sapiens
  misc_feature 20, 54, 57, 60, 64, 75, 78, 82, 87, 91, 106, 107, 109, 110,111, 123, 124, 127, 140, 141, 152, 160, 162, 163, 201, 207,212, 435: n = A,T,C or G
ggtaccgggccccccctcgnaagtacttctagaattaattaaggcgggggggtntanaanattncctggcacatngtntgcnctcantaantacttgtttgttgannannnataaagaattgnnaanaaaaaaaggaacnnggccccgcctngctaaatngnnacctacccttttgagttaattttttagctcccccctanaagtcnagttnttcacctcccaaagagaggcttcaagcatctgcaggaactgtggcagcagcaggagattagagcgttttgtgccataattccagaatgtgcgccgtagctgcttagttgagacaaggacagggttagattaaatacatagtataatctgtgctgagtgtggtggttcacacctgtattcccagcactttgggaggctgaggcaggtgaatcgcttgagcccangagttcaagaccagcctggg

SEQ ID NO: 18109 - DNA, 740 bp, Homo sapiens
  misc_feature 170, 302, 304, 321, 326, 334, 338, 339, 340, 349, 359, 360,362, 363, 366, 369, 383, 385, 386, 387, 394, 395, 399, 407,413, 421, 430, 444, 445, 449, 453, 454, 455, 461, 464, 467,471, 473, 476, 477, 478, 481, 484, 495, 504, 509, 510: n = A,T,C or G
  misc_feature 517, 519, 524, 530, 534, 536, 538, 541, 553, 561, 562, 571,574, 576, 579, 584, 589, 590, 592, 595, 603, 606, 607, 610,612, 614, 631, 636, 637, 638, 640, 643, 646, 648, 651, 655,657, 658, 664, 668, 670, 673, 677, 678, 679, 690, 695: n = A,T,C or G
  misc_feature 697, 703, 705, 709, 713, 717, 721, 722, 739: n = A,T,C or G
agtacttctagaattaattaaggcggggaagggtgcatagctgttttagctgagggacgtggtgccgacgtccccaaacctagctaggctaagtcaagatcaacattccagggttggtaatgttggatgatgaaacattcatttttaccttgtggatgctagtgctgtanagttcactgttgtacacagtctgttttctatttgttaagaaaaactacagcatcattgcataattcttgatggtaataaatttgaataatcagatttcttagaaaaaaaaaaaaaaaaaaaaaaaaaagccncncccccccccgggggggnccccnaccccccnttannnagtttttantacccccccnncnnggnccntttttaaaaaaatnannngttgggnnacantttaaaanaatggntcatattncttgcaagnctgaaggtaacctnnaatntagnnnctgcantcnatncttnanctnnnganccnaaatttaaacntatccccanaaaanntcacctncnctctnaagatnacanananccnaatattaccacntttccccnnggaatcatnttntnaanttgcnggagnnantcntttactantcnnccntncnctgaatttttactgggnctaannncnccnaangnccntaanannggggtnaatngntcncccnnncaaaaccccancaatntngttgtntncacnttancccncttnngcaaaaaaaaaaaaaana

SEQ ID NO: 18110 - DNA, 559 bp, Homo sapiens
  misc_feature 32, 47, 58, 59, 61, 62, 63, 66, 75, 86, 89, 91, 101, 103,109, 115, 116, 125, 127, 130, 132, 136, 137, 151, 158, 164,175, 176, 179, 183, 184, 191, 192, 197, 201, 203, 207, 209,210, 214, 217, 218, 219, 230, 232, 236, 238, 247, 250: n = A,T,C or G
  misc_feature 258, 261, 263, 264, 270, 271, 275, 280, 281, 282, 305, 306,310, 313, 314, 318, 319, 335, 378, 513, 551: n = A,T,C or G
agtacttctagaattaattaaggcgggggccncttgataagtgaatnaatggggcggnntnnnaancttcagtgnatccatgttanggntntttctgcgtncnaataangactanntctgttgcncncanancaannaaaactttacaacnaaatatnaatacnttaccaatccnnaanaaannaccaacnnttgtntaantngccngnngcanggnnnaagacagggtntntaancnagtgactgnatncgctaaanaananntattcnngganaaaannnctgtaattgtgataaaaattggnnttanatnnactnnaattatgtgtgagaangttgacttttatcagaaggccctctgcattaagttgatcaaanaatttttctcctttaatttattaatgtagcaaattacactaattgatattttaatattaatccaactttaccttcctggggataaaatagaacttggtcatcacatattaattgttattgcattataaatccagntatacattataccattactattattttaggtatataanattttcat

SEQ ID NO: 18111 - DNA, 315 bp, Homo sapiens
  misc_feature 130, 134, 141, 149, 150, 151, 152, 153, 154, 155, 179, 187,196, 205, 225, 232, 244, 245, 253, 254, 266: n = A,T,C or G
aagtacttctagaattaattaaggcggggtaagaaaagctggtctggagttgctgaatgttgcattaattgtgctgtttgcttgtagttgaataaaaatagcaaacctgaatgaagaaaaaaaaaaaaanaaanaaaaaanaaaaaatnnnnnnntgccaaaaaaaccaaaaaacaatnacacacanctccttctnccccccggnagggggctctgccttggggnctaccanctgaggcctgannaccccccnnccctcatcagtncaaagccagaccatgagcctagagggatagatgacaccgttcagataaa

SEQ ID NO: 18112 - DNA, 455 bp, Homo sapiens
  misc_feature 38, 44, 67, 146, 171, 203, 260, 276, 277, 278, 287, 295, 400: n = A,T,C or G
agtacttctagaattaattaaggcgggcggatcatgangtcaanagatggagaccatcctggccaangtggtgaaaccccgcctctactaaaaatacaaaaattacctgggtgtggtggcgcgtgcctgtagtcccagctactcangaggctgaggcgggagaatcacttnaacccgggaggcacaggttgcagtgagccaanattgcgtcactgcactccagcctggtgacaaagcaagactccatctcaaaaataatnaaataaaataaaatannnataaaattnaatttctnaagaccagtgtagtgtcagttatggtgctaggctctggaaatatgaatataaaccaaaaataatattctaaggcccccccctaactatctgaatggactttcttntcagccagggctcttttaaaatgtaacctgagagactggttcaggccatgactga

SEQ ID NO: 18113 - DNA, 524 bp, Homo sapiens
  misc_feature 32, 34, 35, 41, 45, 46, 48, 55, 65, 67, 72, 75, 84, 86, 91,95, 99, 101, 105, 107, 114, 116, 117, 119, 128, 130, 137,138, 148, 151, 153, 161, 162, 166, 167, 170, 175, 176, 181,183, 187, 193, 196, 198, 199, 203, 207, 210, 212, 213: n = A,T,C or G
  misc_feature 217, 221, 222, 225, 226, 234, 235, 236, 237, 241, 250, 255,260, 268, 269, 272, 273, 280, 281, 286, 287, 293, 297, 301,304, 305, 307, 308, 340, 361, 362, 363, 368, 377, 383, 402,404, 495: n = A,T,C or G
agtacttctagaattaattaaggcgggatggnannagaagnaatnncnattgaanatgatgagtnantgggngcngcacaccancntggcncatntatncntatntnacaagancnncncattgtgcncntgttccnnacaagttaangtntnggtaatannaaannatnaaccnnctaanancagntttgantgnanngctnaaantangnnttgncacnnatnntctttagnnnnttanggccaaatntttancaccnatggccannttnnaacttgnnccagnntcattnccantctntgnntnnaaccctaaatacctactcctcggagctcccanctgactggactgcgtcatggnnnattangctgttatnaaacangcccccctgtgctcctatnancttatgcaaaagaagaaattcatcaaaagggaccatgtcttcttacacacacaggtacatacgccgtgtgcacacacacaaacacacaganaaagagagagggagagagagaaagaaaca

SEQ ID NO: 18114 - DNA, 387 bp, Homo sapiens
  misc_feature 376: n = A,T,C or G
attaattaaggcggggtaagatttgccgagttccttttactttttttaacctttccttatgagcatgcctatctaatgttgctgggaggttggatgtaaatccagttctttttcctatatatgtttgtctgtttctccctttggaagtgtctgtctatatacttggtgctctgaaagctctctctggtgtgtctaggggaggatcctttatctcttccatctggcaggcctcagtgtattcattcaactgcaaaatccgtatttctaagttgtgggaaattttcatttgttattcccttaagtatcttctctcttccatttttttcctttgggagctcctatttgatagattttgaaactttggggtcttttgttncactttctttc

SEQ ID NO: 18115 - DNA, 788 bp, Homo sapiens
  misc_feature 31, 32, 41, 76, 121, 169, 256, 262, 264, 269, 272, 274, 317,323, 329, 330, 331, 336, 338, 340, 341, 344, 351, 352, 353,357, 362, 363, 368, 369, 371, 372, 381, 415, 438, 444, 519,535, 539, 543, 549, 567, 579, 581, 592, 597, 601: n = A,T,C or G
  misc_feature 602, 614, 624, 645, 653, 661, 663, 667, 689, 693, 699, 704,705, 706, 729, 730, 735, 749, 750, 756, 757, 759, 761, 762,764, 768, 771: n = A,T,C or G
agtacttctagaattaattaaggcgggcagnnttatagctnaaataggcaagggatatttcttgaaaaggaagtangatatatctactgatggcaatgcttgctttttttatcatcaaganttttgtttagatgtcactattcccagaaaataacaagaataaaactgnccatattcatattcactctttgacatgcagatttttaaaactaatgggcccctaggcctattgacattttcagtatgttttagtgtncccaananaaaanaancnggaaaaaaaaaagggggccccccccccggggggaaccccccantccccntatgcnnntactntngnnccncccctgnnnggcngtttnnaaaanngnnccacaaggnaaccaaccattaaaaaactctaaatgatatttanttaaagggactcttggtatccanacttanatttcagggatatgcttgaaacaaaccagcattcttaaggaactgactcaccttcctgagcaaaaattctaaacnaagccttttgtgtccnaaanttgncttgantaaatgttttgcccaaanaggttcaataangnggtttttctanttcantaanncatatgccccanaaatgtaaanaaaaaaagtttactttcccanttcccctngtaaaaancntgcntgccctgacttttccaaaatgntaanaagtgnatttnnnaaaaatgaaattttttcaagggnnttttngcttctaaaaaatnngggganntntnncncccnttnggcccaaaaaaaaaaaa

SEQ ID NO: 18116 - DNA, 359 bp, Homo sapiens
  misc_feature 8, 38: n = A,T,C or G
agtttttntagaattaattaaggcgggaggatcacttnagcccagggtttcgagaccagcttgggcaatatagtgagacctcatctctataaaagaaagtaaaaaatttttaataagaaaaaaagaaaagaaaaaaatgtattaaacaaaatttgaactttgtaacaagatagggtaaatcagggattttaaaattaggttaaaaattctgtctttctttttctctgttggcttcctgtatgtgtctttctcttttttcttatcttttaggagagtgaaatttagtttgttttgctatgagattctttttcatttccagttaaataatgcagctcatcctattgctcctgtaaccagtg

SEQ ID NO: 18117 - DNA, 323 bp, Homo sapiens
acaaaagctgggtccgggccccccctcgagagtacttctagaattaattaaggcggggtggtttttttccttcttcctgatacatgttttagatactagaaatatatataactgacaaagcttgatcatgtgttttgtggtgaaaatataacatttattaagaataatgttttatcttttaatattgaaggtaaaacttgatcttcaatttttctctttatagatgttaccagacctaaaagcagacaaccagaggctaaaggatgaaaatggggccttgatcagagttataagcaaactttccaaattaaaaaaaaaaaaaa

SEQ ID NO: 18118 - DNA, 736 bp, Homo sapiens
  misc_feature 566, 675: n = A,T,C or G
agtacttctagaattaattaaggcgggtggggtcggttctgccctgcagtgagggccttgggggtcactggctgattggtcaccggagctgcaacagagtcacaactgattacccctccacccaagaccctgatttctacagattatggtctctccccaaagcctccttttctcaaaaaaatgccagacctcaattttctaaacaagttgcattttgtatttcaatcgataaaaggtctttgatggcttacaatgcccagccctgctggctaatcttggttgacgttccctttgacaacaatctgcccacaagcctcttaggtagaggtgggtggctgtggccacagtaactacgtaaaacagcatgctgaggagctacgcaggttacatgggctgctggttctcttttcagagaccttggataacaaaaaggaacaatgagctggggacattaagtgtggagcttaatcataacaagaggggattgaaaatggcaccttccactgctatgttgagagggagtttttaaaaaaaatgccaacaagaaaaaagtgactttaaagaanaaatccagccgggtgcggtggctcacacctgtaatcccagcattttaggaggccgaggcaggaagatcacttgaacctgggaagttcaaagaacaacctgggcaagcanaaacaagaaccctgtcttatttgaaaaattaattaattaaggaaaaaaaaaaaaaaaaaaa

SEQ ID NO: 18119 - DNA, 805 bp, Homo sapiens
  misc_feature 401, 472, 539, 649, 674, 677, 705, 706, 719, 738, 753, 760,767, 768, 777, 782, 794: n = A,T,C or G
gtgccgggccccccctcgagagtacttctagaattaattaaggcgggggtggaaattatttgatgcttgttgtagctcagtacagttaaaaactctctgacagttgttgctgctcaacagcccactgagcagcttggaaacagtagtgagctctcttcatggaggcgaaggatctgtcaccagagtgaaggatctatactgttgcaggagccaaagaacagaatcctgcactgggaaagaggttggtcaagatgactttgattataactaccaaattaaccaacatccgagtacttactaagaactaggcacgtaatagatagctaagtgctttatatacagtgtctcatttatttcctacatcatcttttttaatctttagaataagcctggcagctaanaactctggttctccccattttacagatgaagaaactgaggtttattggtaggaagcctcagtttctctaangtcacacagctggtaagtgatagagccacattcagatcctggactctgattatggacccgctccctntacactttgcaatggctgcctgtagtattcccccctgctttgacatcctaaatgtggggaaatgtggttgggtcatgttttccttagccagataagccaacccagggaanggatgaaaattcaaaaaagggcaanggncttgggatcttttttctgggactttaannacttggtggcttngcaatttttggggaatcancagtggcaaaaacanggttgtntcccaannggagggatnaaaanactgggggttanaaaaaaaaaaa

SEQ ID NO: 18120 - DNA, 332 bp, Homo sapiens
  misc_feature 22, 74, 144, 150, 158, 164, 168, 176, 178, 189, 210, 213,221, 226, 227, 229, 240, 248, 251, 253, 256, 257, 259, 263,270, 277, 280, 296, 305, 308, 312, 313, 319: n = A,T,C or G
agtacttatagaattaattaangcgggagggaggggcggctgctgcatggtgacggcacacggaggcccaccangacgcgccaccggtgaatgtgcctctggtggctgctgagaaaaatacactgtgcagctcagtgattaaanattcanatcactanataaanggtnactgtatntnataaaaaatgntaaaactctgttcaacttggnttnaaaatgtnataannanttgtattttgntttttgtnagncnganntngggnggggggnttcatanttnctgatatttttataanaatcccccnccnctcnnccctanaaaaaaaaaaaaa

SEQ ID NO: 18121 - DNA, 450 bp, Homo sapiens
agtacttctagaattaattaaggcgggtaaccctttcattttataattaagactattgagtcacaaagaggtcaagcaacttatccaaagttaaaaagatatttattgagactttttaaaaattgaaattgccagactataggaagagatcaagcaacttatccgaggttaaaaaggtatttaatgagactttttaaaaattgaaactgccagagtataggcactttgcgattatttccttcttccactctgaatatttcctgctttctttctttcatggcattggcagtcctgcaaatcaggtctgtgcaaattttgtcatctactatttcatctctaatacctaatatatagccagccaacttcagtgtgtttttttttgctaaggaattactctaaatttgcagccctgtcccgtggcactaagatagtgaaagattttgcatcaga

SEQ ID NO: 18122 - DNA, 454 bp, Homo sapiens
ggtaccgggccccccctcgagagtacttctagaattaattaagggggcatatttaaagaagtaccaggagtttaccaagtattgattcacattaaaatgattattaaagtgtgtgtttagcctgaggaaatgtaagtccagaggacagtcatgaggatataagaaacaatggagttggtaaaaatatgctggtaaattgaattacattgatcttaaaaaaaatgcttgtattttttttaagaagagaaaatgacaacaaaacaagatggatggggtacaaggacagttcagtgggttgttaaaacttgttaagggcctccttgtttaagagccaactaaacaaccactattggaaaattttggattgtatatacatgttaaaaaattaaggataaatacacacccacacagggagtgaattttcttgcttccatagcagcagacatttaaaccg

SEQ ID NO: 18123 - DNA, 323 bp, Homo sapiens
  misc_feature 244, 249, 253, 269, 293, 296, 298, 302, 307, 308, 312: n = A,T,C or G
agtacttctagaattaattaaggcgggggtggagtttagttttaggttttattgtatataaaatcctgcactgaatctgtgtctcctctgttacctacttttgccagtgaaatttaagttttaaaatactttcagaatgtatttttactactgcaagtttttggtctttaaaatgtcaagtagcatctctctctttctctctgtctctttctgtttctctctccagtttttttttttttaattnccatntggnctaaaaaatccaaatnttttaaaaatctgcccctcttttnttntntcanaaagnnaatnatccctttttt

SEQ ID NO: 18124 - DNA, 695 bp, Homo sapiens
  misc_feature 30, 31, 34, 44, 48, 51, 54, 55, 59, 60, 65, 69, 71, 75, 77,79, 81, 84, 89, 94, 96, 97, 100, 103, 105, 115, 116, 118,119, 120, 121, 123, 128, 136, 137, 148, 152, 159, 161, 168,181, 196, 198, 212, 213, 217, 227, 236, 248, 288, 291: n = A,T,C or G
  misc_feature 293, 297, 298, 314, 328, 330, 334, 335, 339, 345, 346, 350,351, 357, 362, 363, 364, 365, 377, 395, 417, 423, 424, 437,446, 477, 481, 501, 505, 513, 523, 535, 546, 555, 591, 604,623, 639, 655, 656, 660, 664, 677, 680, 681, 685: n = A,T,C or G
agtacttctagaattaattaaggcgggcgnnganaaccgtaaanatancanganngctnngggtnacancngatntncnanttnttccnaacanannggnggntnggcctagctnntnnnntngacgncctgttanncacatattctnatgngtatggncnagaaaantggcaggactgtntttaggtactaattngngtaacaccgttatnntacnccatttgttnctgcggaanggggcaaacgcnttccaacactagggttcctaatgtaaaattttttttttgnacncnatgnnggccgatcgccctaantgtaacctctattntngccnncctnaaaaanngtcnntctttnaaagnnnngtgtaaatatanaacaactcttaagccatnttgggtaaatttccccaacagngtgaanntagaattccttcngggtggatnccaggttctatttggaatttatatacaaccngctngggtgggaaaaaccattgtntttnggaaaacnttgggtgtanttgaactgatanttactgtttgngacctgaanttcacccttaaaaaggggattaccccagccaaaatnatgggaatggttntaaaaagtgattgtggccncatcctatgcaatatnttttaaattgaataanngggncccngaataaaaatttnttnnattngggaattgaa

SEQ ID NO: 18125 - DNA, 373 bp, Homo sapiens
  misc_feature 20, 29, 44, 45, 54, 65, 87, 350: n = A,T,C or G
agtacttctagaattaattnaggcggggnaaaaggatcaatatnngagtacctngtttatataanaataacttcttttttttctgcntagggaagcattcagtggagatcttaataaggattgacttttcttggtaacagaattgatatcagtggtacatgacatctatgcagccagacacaaatctgaactcgttggaccctaaataagtgtttaaatatttgttatatttcccaaaatgattggtttgtaagatggttaatagtaacttatgcaaaagtccagaaattaggtgttcttattcactgagaaaagtctgccttaaaaattaaacttttttttttctgatnccaaaaaaaaaaaaaaaaaaaaa

SEQ ID NO: 18126 - DNA, 633 bp, Homo sapiens
  misc_feature 34, 40, 44, 58, 68, 69, 74, 81, 85, 89, 95, 103, 117, 121,133, 142, 148, 164, 194, 201, 205, 226, 236, 237, 243, 256,257, 259, 270, 272, 273, 277, 279, 281, 284, 286, 293, 294,295, 301, 302, 311, 318, 333, 374, 381, 382, 390, 392: n = A,T,C or G
  misc_feature 406, 409, 412, 413, 429, 447, 448, 462, 463, 464, 465, 466,467, 471, 473, 481, 504, 618, 624: n = A,T,C or G
agtacttctagaattaattaaggcgggggagcgnacgaancacnattggtagactagntcttagtgtnnggcgnttgtcanggcngaanttatanctattacngcgtgtggaaaacnacancatagtgctctnatgaatganccttcncgcttttcgtcatgtnatgcaatgaactatttttaaggtctaatcngaagaanatantgcccgctccgtgtttttttnaggaattatnncacacncggaccatttttnncnggctcctaaangnnggantntnatnantgtgagnnnttatgnntctgacgtncattgancaactaaacttacanatggtgaaaaaaaaagaaaagaaaggagaaaagatcccctntcccctnnaatgcttngntactttttttctangcntgnnccacaggggggatgtnccaataatgagtgacaanngggatcctaaaaannnnnntctnanaattaacnaaaaggtattaaaaataaatccnaatttactccattttgagttaggaaaactcatatttggaaaagcatcactgggcatgtttcatttccaggactggggatttgaaagcagtgcctggggacctttgggcacacantcaacncagggtaaa

SEQ ID NO: 18127 - DNA, 660 bp, Homo sapiens
  misc_feature 35, 36, 37, 38, 39, 49, 54, 56, 57, 62, 70, 73, 78, 99, 108,112, 115, 127, 132, 136, 140, 141, 180, 185, 187, 189, 206,221, 223, 229, 245, 261, 275, 277, 289, 291, 297, 323, 329,333, 334, 335, 338, 343, 345, 349, 353, 357, 368: n = A,T,C or G
  misc_feature 371, 372, 374, 381, 385, 389, 390, 406, 409, 421, 432, 449,454, 506, 511, 523, 538, 547, 590, 602, 617, 627, 634: n = A,T,C or G
atgatactggccgtcgttttacaccccgaaacaannnnnacctttactncttgncnntcccntcctccanagnacttntagaattaattaaggcggggnggagggaanaggncanagaaaaaaaaanctttntttntttnncggtgctcccccgtctcccctaaaaatacaaaaaattancatgncntngtggcaggtgcctgtantcccagctacctggnangctgangccggacaatgatgtnaacccgggaggtggancttgcagtgagccnanattgcgcccctncnttccancctgggcaacatagccagactccgtntcaganaaannnatnaaaananaaanaaangccnccccccccccngcnngnccccccntgtncccnnttaacaagagcttttnccnccccctattgcntatttttttanaaaatctaaagttcaanaaganaatgtatcactgctgacttttattccaatatttggatggagtaaagttttanggtanaattttgttcantttggattttaatcntttgaaaanttaaaatcccttgtttactgggtttgactattaattctcttgntatctttaccanggtaaaaactgcaancctgacttancatgttnctgtgaaatctgcccattcctaaaaa

SEQ ID NO: 18128 - DNA, 217 bp, Homo sapiens
  misc_feature 202, 207: n = A,T,C or G
gagttattctagagagaagtatgttgaaaaatacctgtggcttattttcctaatttccaactatacttttgccgatagaaatcaatgagaaagtatagtgctttgccagcctcagacggagaagttacttgatcaagcacacttctaaatatattttaaagtatcattagcgtccaaaaaaaaaaaaaaaaaaaaaaaaaanggggnccccccccgg

SEQ ID NO: 18129 - DNA, 403 bp, Homo sapiens
gggtgccgggccccccctcgagagtacttctagaattaattaaggcgggggcctctctgggacccttcccttgttatctacctaaggcaagctaactaactcctttcagtatatgaggtaaggcatatattaattatcttgatctggccactccacaatgtatacttatatcaaaacatcatgctgtacaccataaatatatacaaattttgtcagttaaaaaaattaaaaagacattgaaaagaagcattaaaaagttataattttatatgctggcaatgaataatctgcaaatgaaataaaggaaaacctttcatttacattattatcaaaaataataaaacatttataaatacatttaaccaaggatcactgaaacccacaaaacattaccgaaaggaat

SEQ ID NO: 18130 - DNA, 470 bp, Homo sapiens
acttctagaattaattaaggcgggggagggaactggagcattactcttaaagtcttagggttaaacctcaaaggtcttatagagacatttcctgttcagttcagctattcacttattcaacaaatatttactgagcatgtacaatttgccatacactattataggtgaggacaacagtagtgtaaaaaccagtttgtaccctcatagagtttatgttctagtagggaagatggtcaatgaattatgaggtcagatggtgataggtgcttagaagaaaaccaaactgagatcaggggtgagtctaatcaggaagccctccccttaatttattcatttgttgatgtatctgttcatttatttgtttaatgaaataattgttgatcttaagcaagacagtttactttctgctttcagtgacttatgtaagtgagttgtatgaactcagaactagttttctcataccaaaaaag

SEQ ID NO: 18131 - DNA, 587 bp, Homo sapiens
  misc_feature 2, 16, 19, 21, 24, 27, 36, 37, 38, 39, 43, 44, 54, 250, 532: n = A,T,C or G
cnggccgcgttttcanccngnaanaangggaacctnnnntggnngccgggcccnccctcgagagtacttctagaattaattaaggcggggacgaggcaatagatcaaacaagagcagcaataaagctgacgtttgctaagtttgagtggtggttcagggagtccactgtgctagtctatatttgtgactaaaaatttccataacaagttcaaaaaagaaaatgtatttaaaaattagaagcagttatcanccaaatataggttaagaaacattagtaaaataaaaatcctttcacttgccgttaaaaataaaaaacagtaaaaacacattttataaatatatgaaatctgagagcctgccaagattgcagagatgtgattgtaaggcacagatgagattttaaacctggggtttttagagattaaaataaaatgtaggatggtttaagcacctacttttagctcttgagaaaacaggtacagtccaaagtgaagctgcctttagtctctagccttcatgttttttttctagnctctattctgaagtccaaatttggttggtttttttggggggtgaaaatttaacat

SEQ ID NO: 18132 - DNA, 404 bp, Homo sapiens
  misc_feature 271: n = A,T,C or G
agtacttctagaattaattaaggcgggctccaagaacacttaaatatatttggctatgaaatttctgttgcaaatttcatggtgcacggtgtgatttgtggctactttctcatattctcatcaaaatatatccagaattgacattctaaaattaattttctgtaccttccattttgttttatatcgatatctattttaagatctatcttagaaaacatcaagtaatgtttaaattctattctacagcccttggcattaccgcataataatnattttaactactggtggtgtactacacttcctaaagaaactgccttagggctccattaaccttccctctacacttatcatcttcacaattctaattctactgactatcctagaaatcgctgtcgccttaatcc

SEQ ID NO: 18133 - DNA, 414 bp, Homo sapiens
  misc_feature 1: n = A,T,C or G
nacttctagaattaattaaggcggggacaggaccaggtgcaaggccaaggagagcatagtgaaaaaagtaccgaaaaagacatgagagaaaggatgagagagaaaggaaaaggggggaaatgcaagagaaggaagggaaaggaatggaaggaaacgtcctaggctgggacttttgtcggaaaaatcacctacagatgtgcatctatcggtatgcaaagcatgctctagtttcactcattaaatgcaacacatttcaactcagttactgcctcaagacacactcaattatccgataaaccacaggaaggttgtgtaaaaacatcaatgtggtaagcagtctaaattcgaattctagctaatgtcaacattagctcaaaaggctggctgggttaaatccagaaggaggaaaaaaaa

SEQ ID NO: 18134 - DNA, 593 bp, Homo sapiens
  misc_feature 30, 31, 37, 38, 40, 42, 44, 46, 50, 53, 95, 115, 120, 132,134, 144, 147, 150, 163, 169, 174, 177, 193, 221, 286, 288,294, 300, 306, 315, 349, 350, 358, 360, 362, 363, 375, 380,381, 386, 402, 403, 406, 407, 415, 440, 446, 450, 453: n = A,T,C or G
  misc_feature 487, 492, 509, 511, 512, 515, 518, 526, 527, 530, 532, 533,540, 543, 544, 548, 549, 555, 562: n = A,T,C or G
ccgtcgtttttcaccccggaaacaagggtnnacaccnngntngntngccnggnccccccctcgaaagtacttctagaaattaattaaggcggggnaggcattcgtatgcagccancgcangggcttctgctnanggggcaggcnganctngaggaaaccgcangataanttttnttntgtttgaaagataganattaatacaactacttaaaaaatatagncaataggttactaaagatattgcttagcgttaagtttttaacgtaattgtaataacttaagattntnagaganaatatnaagacntagacgagntttaaataaaaaaataccaaacacatgcgtgggnncccccctngngnnggccctactcanccttnnaatantcttctaaaccccccnnaanngcgcaccnttttacaaaagagaaaatctcaccnctgttnttgntangggtgttttaaatttggggggctaaatcatggtntaatntttataagtacctgtantnnttntanccaggctnnaantnnggcattnttnncccnnaaccanctttttnttcctttaaaaaaaaaaaaaaaaaaaaaaaa

SEQ ID NO: 18135 - DNA, 165 bp, Homo sapiens
agtacttctagaattaattaaggcggggtaagatttgccgagttccttttactttttttaacctttccttatgagcatgcctgatactggcattttgtagatgtggtttgactatttctgtatgtctccatctattgatgagggtcaaaaaaaaaaaaaaaaaaa

SEQ ID NO: 18136 - DNA, 580 bp, Homo sapiens
  misc_feature 1, 3, 14, 201, 211, 213, 219, 220, 223, 229, 240, 261, 287,290, 318, 319, 322, 325, 326, 332, 345, 346, 350, 372, 378,380, 399, 403, 405, 426, 428, 439, 441, 442, 450, 464, 465,487, 505, 515, 519, 526, 528, 529, 530, 546, 550, 554: n = A,T,C or G
  misc_feature 555, 562, 564, 576: n = A,T,C or G
ngngtacttctagnaattaattaaggcagggtagcctgaattgctttctgctctttacatttcttttaaaataagcatttagtgctcagtccctactgagtactctttctctcccctcctctgaatttaattctttcaacttgcaatttgcaaggattacacatttcactgtgatgtatattgtgttgcaaaaaaaaaaangggtctttgntnaaaatnnctngggttngggaatccatnttgctttttcccccattgganctaggtctttaccccatttttgaacnggntagaaaaacattttgaagaaccttgttnnttnacnntctggncaggggaattggnntggnttctaaaacccttttcccccanaaaggncnggttctatcccggttaaanaaananagtttggggtttttaaatgcntnaaaaaaccccngnnccaatttngccaaaaaaaatcnngggacttggaagttttattccncccccccccccaaccttntttttcctangggngttttgncnnnaaataagattttttgnaaanaaanncccctgntntttttaaaaaanaaaa

SEQ ID NO: 18137 - DNA, 281 bp, Homo sapiens
  misc_feature 266: n = A,T,C or G
ctgggtacccgggccccccctcgagagtacttctagaattaattaaggcggggaaatgatggagagaaacaagggtttaaaaactacctagtggggtactatgttcactgccctagtgacaggttaaatcatgccacaaacctcagcatcatgtaatatacccatgtaaaaaatctgcatattataccccttgaatctaaaataaaagttgagaaaataatgtgtggataaaatgaaaatatcaataaagaggcagagaacctaanaaaaaaaaaaaaaaa

SEQ ID NO: 18138 - DNA, 487 bp, Homo sapiens
agtacttctagaattaattaaggcgggcgcctgtaatcccagctactggggaggctgaggcaggagaatcacttgaacccaggaggcaaaggttgcagtgagccgagattgcgccactgcactccagcctgggcagcagagcaagactccatctcaaaataaataaatacataaaatcctgcattcctagttcactgcccaagagatcagcgttagatggaaaagagtcttttgaggaaaacacaaatacttgagacctgatgaaccacgctggttatcaacaattcagtgaataatagaaaacttttattagcagcatcttaaaaagtagggaaacaaacacccagtctcttgataaaaatgagtctcttgggccaggcgtggtggctcatgcttgtaatcccagcactttcggaggcccaggtgggcagatcacaaggtcaggagttcaagaccagcctggccaaatggtgagaccacgcccccc

SEQ ID NO: 18139 - DNA, 472 bp, Homo sapiens
  misc_feature 37, 41, 47, 52, 55, 57, 58, 67, 68, 74, 79, 81, 89, 90, 98,99, 101, 103, 107, 112, 113, 114, 115, 116, 117, 118, 122,134, 136, 138, 153, 174, 175, 177, 180, 181, 189, 191, 195,199, 200, 202, 204, 206, 207, 209, 211, 213, 219, 220: n = A,T,C or G
  misc_feature 224, 225, 231, 233, 243, 246, 247, 248, 249, 253, 256, 262,270, 272, 280, 346, 347, 366, 367, 438: n = A,T,C or G
agtacttctagaattaattaaggcgggacgattggtncagnccacgngcgcntgncnngcttggacnncatagngatancntatgtcannactatatnnananattngctgnnnnnnntggnacatgctggttntncngggtcctggggaggnatattagagaaacgatgcttnngnccnnttaggttnangctnttcnnancnannancntncggctnncctnncccttngnctacacagcnagnnnntatntcnctgctnacgcctcnanatccacanaagccacagcgggtggactctgccagggacggggtgggagaggacctggcctaggaaaggcatctnncatgtgctgggctccatanntaactcttttcactaagctgacaaccttttacttcacatccagcagaacttaaaaataatgtgttcttcanaaagagggagtcctggctggtccaaagggagtga

SEQ ID NO: 18140 - DNA, 232 bp, Homo sapiens
  misc_feature 12, 13, 14, 22, 23, 24, 25, 26, 27, 32, 33, 47, 48, 57, 59,104, 106, 107, 108, 144, 145, 171, 191, 198, 199, 207, 211,215, 220: n = A,T,C or G
agtacttctagnnngggggaannnnnnaaggnngttaaaacaaaaannctttttttntntttgtgggcttttagtggtgagagaaagtccataagtcgccaaanannnttcagataaactagaatacatcaaaggaaatcagcnnaaaaaaaaaaaaaaaaaaaaaaaaanccccccccccccccgggggnccccccnncccccccnaaanaaanttttnaccccccccccc

SEQ ID NO: 18141 - DNA, 401 bp, Homo sapiens
  misc_feature 1, 3, 14, 32, 37, 40, 41, 55, 57, 62, 64, 67, 70, 81, 91,119, 120, 134, 136, 137, 144, 146, 147, 149, 158, 169, 171,174, 177, 187, 201, 210, 234, 246, 251, 258, 262, 276, 277,293, 298, 299, 359, 360, 361, 362, 363, 365, 368, 371: n = A,T,C or G
  misc_feature 374, 382: n = A,T,C or G
ngngtacttctagnaattaattaaggcggggnagatngtnnaaggctattactgncnatcgnangantgnaacaagaatcnctaatgaaantcattgtacatagagtatgcttatatannagatggaaggtacntnntcagacnanntncggagaacnatggcataatntncanatntctaagaccntaacattggcatanagatatctntgaccacaaaaatcaagttttccnataaataaatanggacnctctggngctngaaattctgttcanntgttttgactcatcancttcnnctctttctattactgccttttgcctggcttggttttgtctctttgcaactgattttgccnnnnnanaanaanaanaaaaaaanaaaaagggggccccccccc

SEQ ID NO: 18142 - DNA, 383 bp, Homo sapiens
  misc_feature 367: n = A,T,C or G
agtacttctagaattaattaaggcgggcgggtttgtgtgaacaggcacgcagctgcaggtaagagacgcttagggtatccgcgaagaagaccgcggagtcaccttagtcctatgtttcccagctggctgtggaagtaggcacgatggaatggtttgctcatgcgcgcccttaacggtcgcgtgcccttaagaccaggtacgcggaggtggccctttgaaataggattcgcaacgcatttattcattagagaaatacttattggttgcttgcaatattctgtagttaacaccatccgcaaagctaggaccctgctctcatgaagcttgcgttccagtgagtgtggctattagcaacactaccccaaanaaaaaaaaaaaaaaaa

SEQ ID NO: 18143 - DNA, 424 bp, Homo sapiens
  misc_feature 19, 21, 182, 186, 240, 290, 299, 329, 331, 334, 340, 362,363, 386, 390, 403: n = A,T,C or G
gtaccgggccccccctcgnantacttctagaattaattaaggcgggggaggtgttcaaagacatctccctcagtgcggatttatatatatatttttccttcactgtgtcaagtggaaacaaaaacaaaatctttcaaaaaaaaaatccggacaagtgaacacattaacatgattctgtttgngcanattaaaaactttatagggacttgcattatcggttctcaataaattactgagcanctttgtttggggagggaagtccctaccatccttgtttagtctatattaanaaaatctgngtctttttaatattcttgggatgttttcananccnctgtangtctcttcttgcatgtccacannatgtatttggggttttatttttnaccncttgcttttaaanaaaaaaaaattaaccccccta

SEQ ID NO: 18144 - DNA, 378 bp, Homo sapiens
agtacttctagaattaattaaaccaagctcacccaagatattctcccttttgatgaactcaaaagcaactcaattcagttaagtacatctgccaaaccctttcatcttttccatattctattagctagaaggaagatagagttcaattcaaggaaagggggttacataggaggcagagaggctgggagccacccaagggtctgtcagccgcagtgaaatgactgggagaaagataatttgattttggtatggagagggagccatagataaatatgcctactgatctcaaggaagtcaaattaagacaaacataaaggaggccaggtgcactggctcacgcctgtaatcccaacactttgggaggccaaggtgggctga

SEQ ID NO: 18145 - DNA, 430 bp, Homo sapiens
  misc_feature 37, 42, 54, 64, 69, 73: n = A,T,C or G
agtacttctagaattaattaaggcggggggaaaaagngacantcaagtctactntatttttttnccaangttnactattaatagaagcaaatgtaaactcagttgtcactgattttagaaagttcagatccactatctcttttttctaattcctaaatccataaagcactgaaaattcaaagttttttccacaacacaaaaaatgatgatgttcctgacagtcttcattattccctccatggtgaatattgaaatattttgctacagaaatataacgtttaattacagcatgctacttaaggccctaatggttacacatagtagagtatataaactataattatctttctaaaatccaaaaacttctgctttctaaaacatagctggctcctaaggtttcagataaaaaacatgaatgtgtatctgcaat

SEQ ID NO: 18146 - DNA, 449 bp, Homo sapiens
agtacttctagaattaattaaggcgggcttgagtgtggggcccatcaaagaatgacaaagcaactctattcattggttctccttcctgcaatgatggtcttttgatttatttgcaaatgacaagcttgccaggccccacttgagggctgccctcattttttttttttttaaagaattcagttgcattttccaagatgaagttgagtctgcaatgctgtttgtgtaaatttttcccccttcagttccgtctaattaatgacttaaatgttttgacccaactgttgccaagcagagcatttgggctttaatttgtcattttggtaaagatgcatctttgacaaaagcatcacagctgttttagttcctaaatagcacatttccattattcagaaacccttgttatggagttcagaaagagcctgttcacaggaaatgggtattgacttgtc

SEQ ID NO: 18147 - DNA, 443 bp, Homo sapiens
  misc_feature 341, 401, 402, 416, 422, 425, 427, 428, 431, 432, 433: n = A,T,C or G
agtacttctagaattaattaaggcagggcacttgaaactgtgtcaaggatgactaaactctgcttctggtatgagaaagtgaaacctctattcaaaatagatgtgaaggcaacataaaattattgaaattcactgcacatatgtaccatcatcagtgtgaattaacttgatgaattaacttgatcccaaagagaagtcaattggccacagttaaggaggaaaattcaaaatgtcttgaattgtgttgttggacacatttatttccaaaaataaattgtttagctactacatatctttttaaagcacatatgaatttattattatttcatttcctccttaanagtctgactcagaaaattcctctatatgctcaaaagtttgcttatatgatactttaacannggagaaaaaaaaanaaaaantanannggnnncccccccccg

SEQ ID NO: 18148 - DNA, 337 bp, Homo sapiens
accgggccccccctcgagagtacttctagaattaattaaggcggggtaggctgagttcttccatttataataaagcatgaggagcttacccctcagtaaaaatagattgctatcattgagttgtgtggtattccattgaattgatacactggaattgactttctctgtcccacttgtcaggccgtaagatagtcgttttttcatatactacctcatgaaatgctcctggcacctctgcaacataggttttaccagggcctccactcgtggctgtgcagactatgccctgcacaactccagcaggcactattcacacagcagtcctagcttttacagt

SEQ ID NO: 18149 - DNA, 380 bp, Homo sapiens
  misc_feature 29, 30, 33, 39, 41, 44, 45, 48, 49, 51, 52, 54, 56, 57, 63,65, 66, 68, 69, 73, 74, 77, 79, 84, 90, 92, 101, 111, 126,127, 138, 139, 140, 148, 154, 158, 161, 188, 194, 195, 197,204, 205, 208, 214, 215, 218, 219, 231, 237, 250, 256: n = A,T,C or G
  misc_feature 297: n = A,T,C or G
agtacttctagaattaattaaggcgggcnntgnacaagntnganntannannantnnactccntnncnnagtnnggncntggcngttctnanaccatggangaggagaagncattcatggggcacnngttaatgaccnnnttgcaggngaagancganctnattgcccacaacagattctgcccatgnaggggnntnaataatnnttntttttnnctnnacacattcttgnactgtnacccaggctggantacagnggtgtgatcatagctccatataaccttcaactcctggcctnaagcaatcctcctgcctctgcctcccaacagctggaattaacggtgtgaaccaccgtgcccagcccataatggaattttatca

SEQ ID NO: 18150 - DNA, 419 bp, Homo sapiens
  misc_feature 193, 206, 211, 212, 222, 225, 234, 239, 240, 241, 257, 262,264, 271, 273, 274, 275, 276, 278, 288, 297, 299, 304, 305,308, 314, 321, 323, 327, 337, 344, 356, 358, 359, 361, 363,364, 367, 370, 373, 378, 386, 395, 398, 404: n = A,T,C or G
gggctaccgggccccccctcgaaagtacttctagaattaattaaggcggggaggggggagggctgcctgaaaaccatccatctgtggaaatgacagcggggaaggtttttatgtgcctttttgtttttgtaaaaaaggaacacccggaaagactgaaagaatacattttatatctggatttttacaaataaanatggctattatanttaannaaaaaaaaanaanaaaaaaaanagggnnnccccccccgggggggnccccnantcccccntnnnnanaaattttttnccccccccncntgggnncgntttttnaaatacnanttanttataacctnccccacncccctttgcccncnntnannccnatnggnctgtncatcccantgcccttanaangtgaangtttgggctgggccc

SEQ ID NO: 18151 - DNA, 530 bp, Homo sapiens
agtacttctagaattaattaaggcgggcagctgttttgttttgaagtgtgatgagaagccattggggcttttgaacaggggagcaaccaaatctgatttaggttttaaatgtaaccatggacactgaagaacagactgtgggttggagtgtttgtctgcacgaagcagccactgtccacagtttaatatttccttccacacatttcttgtgtgtgtgtctacaagcatacaactgcaaatagatattttaagagaattttttgcatgcatagaattatattgccttaaaaattgctttttacaaaagcagtatgtcatatatttacatattggtaccagtaaatcttcattttctaatagagcctataggtagggtcagcacactttttctgtaacagatcagatagtaagtttattacgcttcatgggcaaagagaccaaatcgaggtatgtaggtactcatgagatgattacataatgagaaaaagacatttttccacaaaatttttattgacactgggaatacattt

SEQ ID NO: 18152 - DNA, 599 bp, Homo sapiens
  misc_feature 568: n = A,T,C or G
agtacttctagaattaattaagagccacagtaagtgaggattctgtttattctgccctgaatgtttgttactgggatttttttccccccatacacacatacaaatcttttgtttcacaatttataaaataacagtgttagggacctttatcctaacaaggagggacataagaatactttcagaaatattctcctcctctccctttcactggtttgcatgtttgttattagtaatgatataatgataccatttttaaattcttttgatagcctgctgtgacttaaagggcaaagccacaccatttaaagtgttcttctaaagctttggcagtaattctgaaacttaagctatgtgctagattatctgaaaaactttttcaaatatcgattgcaaaatgcagaactgttaaagttatttggcggtgggtttccaacatctgcaggttttttggatggtgtttgataatcattggcctaaataatagttgatcattggctttgtatgttactggtgaaaatgaaaatgtttacctaatagccatatagtttttccattatcacccaattancccaaccacattatctggttacttaaaatct

SEQ ID NO: 18153 - DNA, 599 bp, Homo sapiens
  misc_feature 535: n = A,T,C or G
agtacttctagaattaattaaggcgggcggatcacaacgtcaggagattgagaccatcctggctgacacggtgaaacctcgtctttactaaaacgcaaaaagttagctaggcgtggtggcgggcacctgtagtcccagctactcggcaggctgaggcaggagaatggcatgaacccaggaggcagagcttgcagtgagccaagatcacgccactgccctccagtctgggcgacagagcaaggctctgtctcaaaaaaagaaaaaaaaaaataatacaagatagatgcattttccagttacacacacacacacacacacacacacacacacacacacaatgccctcttcacacacattcaccctttggatgagaatttgagaatttggcaggaggataaaagtctgagaagatgactttcaaagtgaatctcaccgatttcttttatatgctcaggtcacaatatgattaacagtgaatcgaatgtgtatttacagtgaagttagggtcttttggccatctctgcccattatttanaaataagcatatgtttacttcctattgaatctaaaaatttctttttcttcttttggaattttag

SEQ ID NO: 18154 - DNA, 323 bp, Homo sapiens
  misc_feature 308, 309, 310, 311, 312, 321: n = A,T,C or G
agtacttctagaattaattaaggcgggaagaagggagttagtttcctaagctgaaaattagaatcgtggctcctcgaagaaaacatctgctcttcctatgtgggtggattctatgtctgtgtctcagttctactggatccttctgtcttcatttctttttgtgtaaatagtggccatattttccagtggtcagatctttcaaatgaatagcaactgtttaatttgtacagtattttcagtacacaaggcaatttttacatattttgttttcttggattctaaaaaaaaaaaaaaaaaaaaaaaaaaannnnnccccccccngg

SEQ ID NO: 18155 - DNA, 324 bp, Homo sapiens
  misc_feature 107, 150, 156, 159, 163, 164, 171, 180, 181, 182, 183, 193,198, 200, 202, 203, 204, 205, 206, 209, 210, 235, 237, 238,239, 242, 243, 248, 249, 250, 251, 256, 260, 305: n = A,T,C or G
agtacttctagaattaattaaggcggggtaagatttgccgagttccttttactttttttaacctttccttatgggcgctgtgtctattgaggtgcttaacaataaanaaaggtagtgagttgaaaaaaaacaaaaaaataaaaaaaaatncccaanaanaaannaaaaaanaaaaaaagnnnncccccccccncgggngncnnnnnccnncccattttaagagaaaatttccccncnnncanngagtnnnnttaanaaangaaaagataaaaggtttctaaaacatgacggaagttgagatgaancttcttcatgggagtaaaa

SEQ ID NO: 18156 - DNA, 606 bp, Homo sapiens
  misc_feature 45, 71, 73, 91, 465, 507, 509, 528, 534, 541, 545, 550, 596: n = A,T,C or G
agtacttctagaattaattaaggcgggaggattgcttgagaccancatgagcatcatagcacaaccccatntnaattaacttgaaaaatanaaaagacatcaaacagaaaagacatccacctccagacaatctaacagagagcctttaaccttaatgctgactgatgtttagggtcagataattctttgtaacacgggctgtccttcgtgttgtaaaatatataccaacatccctggcctctgccccagctgaaaactactattataaccggcctggtgtggtgccaggcattgggattttaaaaagctcccggttggcgcggtggctcacgcctgtaatcccaacactttgggaggccgaggtgggtggatcacaaggtcaggagttcaagactggcctggccaagatcgtaaaaccccgtctctactaaaaatacaaaaattacccgggcgtggtgatgggcncctgtaatcccataatcccagctattcgggaggctgaggcananaactgcttgaacccaggangcggangttgcantganccaanatcacccctgcacttccagcctgggctacaaagcgagacccttgtntcaaaaaaaa

SEQ ID NO: 18157 - DNA, 844 bp, Homo sapiens
  misc_feature 81, 126, 144, 149, 165, 169, 171, 173, 187, 234, 244, 308,314, 316, 387, 416, 418, 441, 448, 452, 466, 511, 513, 515,516, 519, 562, 570, 590, 599, 611, 633, 634, 635, 650, 653,656, 657, 659, 674, 686, 724, 735, 738, 746, 747, 749: n = A,T,C or G
  misc_feature 757, 758, 759, 761, 772, 776, 779, 784, 785, 793, 794, 799,804, 808, 809, 823, 824: n = A,T,C or G
agtacttctagaattaattaagatggggttatgtcctgagaaactcatcctaagttgaaaataccataaaatgaaaattcncttaacacacctactctactgaacttaatagcttaagtagcttancctctcttgccttaaacntgctnacaagacttaaattanccancngntgcgcaaaatcatntggcagcacagtaccctgtagcgtattggttgtttaccctgatctgnggctgatcgngtggctgactaggatggtgtggctgactgggagctgcggcttgctgccgcttgcgcaacatctntgaganangatcacctggcgtattgctagctcgggaaaaaatcaaaattcaaaatttgaagtagggtttctactggaanacatatcactttctcatcattggtaaagntngaaaatatccggaaagttttaancccttanaaancccgggggactgtntgtggaatttgaaaaattaaaccttaaaaaaaaaccggcccggtngntnnttnatatttttccaaaaaaaaaaaaaaaaagggtttttttttgggnaatataanctgggcccttttaacttttnggaaaaggnggttttaaaaanaaaaaattttttttaaaaaaannnaaatttggggggaanttnaanngnccaaatttccttgtnttttttaaaaanaaaaaatgggccccacctttttggggccaaattttttnttttttttttncanaaagcccnncncccttttnnngnaaaaatttttngggnaanatttnnatttgggnntgagnggggngcgnnccccttttaaaaannccccaaaaaaaaaaaaaaaa

SEQ ID NO: 18158 - DNA, 508 bp, Homo sapiens
  misc_feature 497, 499: n = A,T,C or G
agtacttctagaattaattaaggcggggttgcttgtttaattattatttcagaagtaatatatgttcatttcagaaaatttagaaaatagaaaaagaacaagataaaagggtgtttcatagccatattttttgtattacatatattcttgatttggctttgtttacaaaacgtgcaatataaaccagcatatcacctagaactgtttttccactcagtgtattacagcatctttccacgatacagtgcatattcttgttgtgactttgtctttaataacaacgtaatggtcagcccattgtctggttctatcatgacttatgtaattgatacatattatcaaatatttaattgtgggatgttgaactattcaaaattaccacattaatgatacgtaatcttatgtatattctggtgataaccatcttttgtggtttaattttttgcacaccattcatggacatttttcttggacaggattctttttttaagagacanantcttggccg

SEQ ID NO: 18159 - DNA, 252 bp, Homo sapiens
  misc_feature 29, 36, 41, 42, 44, 45, 46, 51, 53, 54, 57, 58, 59, 60, 61,64, 71, 72, 73, 74, 81, 82, 88, 90, 91, 92, 95, 98, 99,102, 103, 106, 107, 108, 109, 112, 113, 115, 116, 118, 120,121, 123, 125, 127, 129, 151, 173, 177, 180, 189, 190: n = A,T,C or G
  misc_feature 191, 192, 193, 197, 203, 206, 252: n = A,T,C or G
agtacttctagaattaattaaggcggggntgcagtnccagnncnnnaaaanannacnnnnntcngcgctannnnagcgggnnattacnannntcnatnntcnnaannnnggnnanntnannantntnanatgccggatcggaactagaatnaattacattatgaatgtgtganatanggnccgggtttnnnnnatgncacacnctntaccccctctagagccaaaaaaaaaaaaaaaaaaaaaaaaaaaaan

SEQ ID NO: 18160 - DNA, 299 bp, Homo sapiens
  misc_feature 22, 33: n = A,T,C or G
gggtgccgggccccccctcggngtacttctagnaattaattaaggcggggacatttatatttgtaaataaaaaggaaatattctttgggcagtgtttcagaatcacctgggatgatctgcatgaagattcctggcctccaccaaagacttactgaatcagaaaggaggcaagaggatgaggaatgcttaagaatctgcattaacaaactttacaaatgaatcttacaacatacagaagcatggaaactactgcctcaagggattatctcaacttgagtttaaacataggaattgctgac

SEQ ID NO: 18161 - DNA, 413 bp, Homo sapiens
  misc_feature 44, 46, 50, 110, 233, 235, 298, 307, 350, 371, 397: n = A,T,C or G
agtacttctagaattaattaaggcgggttttgctgatcagcagncngtanatttcttgctcttatatgtcactccgaacagagttgttttaacattgagaacctatgtanctcaggtccccattctctgatgctgtctccatagtgctcaggatcagaggccaaaagagagcccatcaatccttaggctgctgatcagcaaaacctgcctacaattcatcttctacacaccantnctgagggttattccaccccggatcagcgccatcaagttctacagctggtctgatagtacttantccaagttnacctttggaacttaaaaatgacacacaatttagacatatttgnaaaagacccttaaatggtatnacttgcaatttatatttttgttgaangacaaatctgaaatgg

SEQ ID NO: 18162 - DNA, 473 bp, Homo sapiens
  misc_feature 47, 51, 53, 54, 89, 112, 118, 126, 129, 140, 143, 148, 161,170, 173, 181, 190, 199, 228, 232, 234, 240: n = A,T,C or G
agtacttctagaattaattaaggcggggagaggaagggaaaagcttnatantnnggtgcttatcacatcaagaaattggtaaatttctnaggaaagacaggctaatggggcnctgaantggaacanctnctttaaacgtncanccttntgaatttttcctnaaaaccaanaanttgacctntgagctgtnaggtgaccnctgtgtgcaaaggggatggattctcttgncagnanacggtnttctccatgaagcgagagtaggaagtgtactggaatggccaagcgggactgcttcagctgaccaggttcttttaaaccgtagtcatgctttcccactaactcttaaatccttatgcttaaaaaattgaggataaggctgggcacagtggctcaggcctgtaatcccagcactttgggagaccaaggcgggtggatcacaaggtcaggagatcgagaccatcctggctaacatg

SEQ ID NO: 18163 - DNA, 221 bp, Homo sapiens
  misc_feature 26, 27, 32, 40, 43, 54, 55, 59, 61, 69, 74, 85, 176, 218: n = A,T,C or G
actggccgtcgttttcaccccggaannagcgntaaccatnatnactggccgccnnttcncnagagtaanaatanaattccttaangcgggggaagtagtctcgggtatgctggtgtgaaattgaaactgtaaaagtagatggttgaaagtactggtatgttgctctgtatggtaanaactaattctgttacctcatgtacataattactaatcacttntct

SEQ ID NO: 18164 - DNA, 452 bp, Homo sapiens
  misc_feature 415: n = A,T,C or G
agtacttctagaattaattaaggcggggggtggtcccggtggtgatggactgcgagagcactgtgcaggagaaggccctggagttcctggaccagctgctgctgcagaacatccggcatcacagtcattttcactctggggacgacagccaggtcctcgcctgggcgcttcttactctcctcaccaccgaaagccaggaactgaggtaggttaactgtatgacctgtgttccctatagaagaaggccgtaggactttgtattaataaatttctcctattggtcctcgaaaaatcagctttccagattacttagtgtatgtgaagattaagtattggtctctctttccctgactgacttccaatctcttagatatttttatcgcctgtatgtttgtgacacctgtttggtcacttnctttgcatctgtctgacgctttccagtttcagatttt

SEQ ID NO: 18165 - DNA, 186 bp, Homo sapiens
agtacttctagaattaattaaggcaggtgaaagtggacaggggagaaaatgtggaaggagaggaaggaaggataatcctgagactctcaaaagcaaataattggaaaaagtggaatagagaactggcttgagtttacaaatgaataaataaaacccagatttttctaaaaaaaaaaaaaaaaaaaa

SEQ ID NO: 18166 - DNA, 426 bp, Homo sapiens
  misc_feature 288: n = A,T,C or G
agtacttctagaattaattaaggcgggctcgcagggcaggagccgcacacccaccttatgaggatgcttcacatggacgcagaaacccaactctttgagaactcgtctttccgcctttataatttggttctttaaattaacataatcttgatccagtagtagaggcacgggcttcctgccagagagagagcacagggtctgcaccacagtcaagcagagcaaggcttctgagatcccgtcgttacctccaactatgagcacctaacacaaaccccacaacacaacatngctatgaagtccacatcctctggatgaacaaaactgcacaccgctccccacagcccaagtgccaacctcctcatcccttcccaacgatccctccctgcttttccttatagatcaacaagcttctggtgcacaagcata

SEQ ID NO: 18167 - DNA, 311 bp, Homo sapiens
  misc_feature 230, 239, 251, 258, 296: n = A,T,C or G
aagtacttctagaattaattaaggcgggaacagcagtcgttgggatccctgcgggcgggcgctgtgggcttggttggcgcggggcgaacgtaaggtccgagtctcgagtcccgccccccggcacgaggctgggaaactgaggccggagactgcaggtggctctatcacgttcgtgtctgggatttagggttgcacggacttgtatccacagtacagtggcctcgccttanttagttttnccagttttgcangtggggnaactgaattaaaaaaaaaaaaaaaaaaaaaaaaaagcngcccccccccggggg

SEQ ID NO: 18168 - DNA, 432 bp, Homo sapiens
agtacttctagaattaattaaggcgggtgtcactccttgccaaagctttagaaagccttcctcttcaatgatccctagggctgtgcgcaccattcccctatagggggcagattctcttgcaccgtctcccaaccgagcaagagctgcttctccttgcatttggagtcgagtttttgtgagatccaggggaaaggttgctaacaaaaacacaaatgcagggaaaaacccacaacattcagagaaacaaacaaaaatctaaaatcataggagtaatattttcccaagactggttgttctcaaattttagaatatatcagaatcagctagggagattttaaaaattagaaatttcctagccccgtgcccatggattctaattcagtaggttgaagagggtttagaaacttgattctcacacagtcccaaatttaa

SEQ ID NO: 18169 - DNA, 393 bp, Homo sapiens
  misc_feature 383: n = A,T,C or G
agtacttctagaattaattaaggcgggagttcattgacctgttgaagaagatgctgaccattgatgctgacaagagaatcactccaatcgaaaccctgaaccatccctttgtcaccatgacacacttactcgattttccccacagcacacagtaggtgtcctgcctgatgcttcgtaccagggatcggcaaactttaaaggcccagacactaaatattttaggttttgcggccataaggtcttggtaacaactactcagctgtcactgtagctgaaagcagccacagatgcaatacataaacagatgagtgaggctacattctaatgaaacatttatgaaagtgggcagggctgggcgtggtgtctcatgcctgtaatcctancactttggga

SEQ ID NO: 18170 - DNA, 331 bp, Homo sapiens
  misc_feature 24, 36, 46, 48, 49, 54, 57, 77, 102, 105, 108, 113, 118,144, 162, 177, 195, 208, 232, 265, 282, 285, 291, 292: n = A,T,C or G
agtacttctagaattaattggggngggggaaggagngagctaaaantnnaccanttntctccattttggcaacagantgagactccgtctcaaaaaaaaaantcntantattncctancattattaaatggaaaaaattaaatncaaaaaactttgaatttnaatggaaactaaccnctaaggatagtaattgcntaatgaaagttancaatttttatttttcattttgatncattttatgctgagttcatttattaaagtgccncttcacaaataactcanttncctgcnnaaaaaaaaaaaaaaaaaaaaaaaaacccccccccccccc

SEQ ID NO: 18171 - DNA, 404 bp, Homo sapiens
  misc_feature 165, 167, 172, 199, 202, 206, 221, 224, 243, 247, 255, 269,276, 280, 290, 292, 296, 303, 333, 344, 348, 350, 380, 382: n = A,T,C or G
agtacttctagaattaattaaggcgggagtagctatcagctacaaaacaaaccattgaagaaagcagccttatttggaatatcagtcaataacagtggatttgtcaattttacctttaaaatgtaacatctaagtgaagattttaaaagttaaaaaaaaaaagcntntactnttcccccaaaccctactcctcaaaaanacnctanacttgtaaaattgtncanatgaattttatcaaactanggancccctttnttaaattgtttcanagattanaaanggaataattncntttnttttganacttataaaatctcaatgtttaaaactttntaaagatagtntaananaaaaagttatagctttgtctcatttatcancntagaaaaatcatatatatatat

SEQ ID NO: 18172 - DNA, 594 bp, Homo sapiens
  misc_feature 1, 5, 37, 43, 58, 71, 81, 91, 94, 112, 138, 140, 151, 156,158, 184, 193, 205, 218, 219, 223, 239, 247, 252, 258, 266,289, 298, 344, 354, 360, 365, 369, 377, 381, 392, 413, 416,418, 426, 429, 436, 439, 440, 445, 450, 458, 461, 463: n = A,T,C or G
  misc_feature 474, 477, 486, 493, 499, 505, 512, 524, 526, 528, 529, 535,536, 538, 559: n = A,T,C or G
ntagnaattaattaaggcgggggaatcacgtgatggnaggatncactggaactgaccngtgtgaattgatntacgctctgnctcccggaantanttaaaaattatggcaccnggtgtaagatagccgtcctaaccaananggattggagtnagganantcctgtgaaatttgcctaaatcaggncgctagcantggaatcaaacnggaacacatgcannaganaaatcagcttgatttntcagtaanggaanaacccnccgtttcncatgccctaagaaactttctagnttaatttgncctaatttcttccaaattttaaccaatccttaggccacaattaaanttaaaccccnaacctnccggnaaantaaaaatntttntttgggaattnttggattttccaatttggggnacnantttaaaanacntttttanggnnaaaanaaaanttttgttnaantngggaaaacttnttncttcttacngggttcnatgggnaaaaanggagaanctttcttttggntnanncttttnntnttggaaaactttttaaaaggncccttttttgcccaaaaaaaaaaaaaaaaaaaaaa

SEQ ID NO: 18173 - DNA, 407 bp, Homo sapiens
  misc_feature 23, 344: n = A,T,C or G
agtacttctagaattaattaaantaaataaataaataaaaacccccaaaagacaaatttggatagtctgcagatcatccacaacattttaattgagcaaaaaatgaagccactcatttatttgcccaggtatatatggagtttctgctgttggcataccccatattttatttgtgtttttcttttacagaatgggaaaccacccatcaatgatatgttcacagacctcaaagatggaaggaagctattggatcttctagaaggcctcacaggaacatcactggtgagcaagtcatctttgtaaacaacggagtctccggtcattgctgatacttgatgacccantgtgggtacccattaaagtgaaagtatccattttactttaccgttcaaatgtaaaggctgaaa

SEQ ID NO: 18174 - DNA, 397 bp, Homo sapiens
  misc_feature 1, 147, 153, 156, 170, 171, 196, 208, 210, 230, 231, 232,233, 234, 235, 236, 237, 238, 239, 240, 241, 242, 243, 244,245, 246, 247, 248, 249, 250, 251, 252, 253, 254, 255, 256,257, 258, 259, 260, 264, 265, 266, 267, 279, 290, 295: n = A,T,C or G
  misc_feature 300, 328, 353: n = A,T,C or G
ngagtacttctagaaattaattaaggcgggtggatcacttgaggtcagaagttcaagaccagcctgaccaacatcgtgaaatgccgtctttacaaaaaaatacaaaaattaactggatgtgatagtgtgtgcatatattctcggctnaccttncgngggaagggcctggnnagggccagggagaatccacctttgnaaaccccaccgnangggcaagtggaaggcccttnnnnnnnnnnnnnnnnnnnnnnnnnnnnnnntttnnnngccccccccttnttgttttcccnccccnggggnaaaaaaaaaaaaaaaaaatttttttttnaaaaaaaaaaaaaaaaaaaaaaaanccccccccaaaaaaaaaatttttttttttcccccccccccgggg

SEQ ID NO: 18175 - DNA, 432 bp, Homo sapiens
  misc_feature 289: n = A,T,C or G
ctcgagagtacttctagaattaattaaggcgggacccccacgccctcctggcgctctttgcagagatgttcctcagacccaatccgggatttgggatgtctgtgcgtgctgtggagcagagagtttgcaacatggtctcactttgtcacccaggctggaatgcattggcatgaacacgtctcactgcagcctcaacctcccaggctgaagtgaccctccaactctgctttcacagtagctgtgatatggtttggctgtgtccccacccacatctcatcttaaaacccantgggaggagggatgttctcccttggaaccaggccaccattctatgaggaagccaagcagccacatgaaaaggccgtatgtagacattctaactgacaatactagctaaggttccagctactcaccagcatcaactatcagaca

SEQ ID NO: 18176 - DNA, 302 bp, Homo sapiens
  misc_feature 13, 29, 32: n = A,T,C or G
aagtacttctagnaattaattaaccaggnagnatgtgagacgaagaagggattgtgtttaaatggtggactaagggttaagtaggaggagaaatcacatgaacagttggatttatgaaacaggaaactttttggctatagagacccacaataagatggaaagggaagattagagcagtatcctttagtgtcatctgtccctgtctccaagtgactatgcctccccttccccacagtttctgtgagccagcagccagtctcggctccagtgtccatcgctgcccatgcttctgttgctgggca

SEQ ID NO: 18177 - DNA, 428 bp, Homo sapiens
  misc_feature 30, 74, 334: n = A,T,C or G
agtacttctagaattaattaaggcggggtngtgtaagttttagaaacctgaaaaaggagaataatttagcaaanaagactgttagaatggttagtgaaaataggggatgacattgggagagggagaagcagtaacacataattgacttttactggtctgtgatgctaagaactcactgaaccacaattagtagaacaaattcatactctttggatgtggaagaaaaaataaacaggcttttaaaagacctgagaagacctttagcttactcttcaggctgatcatgaacacagaggcaacttacaacaatcaaaaaataaaaataaaaaagtangtgcagcacaccaacatggcacatgtatacatatgtaacaaacctgcacgttgtgcacatgtaccctaaaacttaaagtataataaaaatatgt

SEQ ID NO: 18178 - DNA, 637 bp, Homo sapiens
  misc_feature 41, 44, 50, 51, 60, 62, 84, 102, 106, 113, 116, 143, 153,158, 163, 164, 167, 170, 171, 174, 175, 182, 183, 185, 193,194, 195, 197, 207, 223, 225, 234, 236, 238, 244, 245, 261,262, 265, 268, 386, 419, 551: n = A,T,C or G
ccccccctcgagagtacttctagaattaattaaggcggganaanagtganncaacaacantnaaaccccaagcataaacaaacnaagagttaatcaaaacancaantgcacanttnatatgattactgagtgttctaatggtnaggagaaatnaaaancatannttntannccnnaatatannanatacaaannnanatatgggggncccccctggggggggngnctctttttncntntatatnngtataattgccccccnnaanggncttgtttttacccaattccactggattcctcatagccccaaatctatctgtaaattcattactgctagaattgccaactacagaattaacttctgtgaccattggcaagtccccagtntcctcatttacaaaatgactaaaagatcactanggtaaaaaacacttcccactccagaatttgattctttctctctagtgagaagtcatatctttttgagaggtatcctattgtttgaacttaacacaagttttttccttgatgcaagaatcacaaatgaaattntttgttttctactaggggctgggggacttgtcttgcttttaaaactgtttcaggacaacccttgggatagggggtcttttcatttc

SEQ ID NO: 18179 - DNA, 425 bp, Homo sapiens
  misc_feature 31, 57, 206, 231, 239, 250, 251, 264, 267, 269, 271, 283,289, 296, 299, 304, 306, 309, 317, 318, 319, 320, 321, 322,325, 326, 328, 329, 331, 347, 352, 353, 378, 393, 406, 421: n = A,T,C or G
agtacttctagaattaattaaggcgggggcnagttgagaagtgaataaatggggctntttctgaagcgtcagtgtttccatgttatggatctctctgcgtttgaataaaaactatctctgttgctcacaaatgtcaaaaaaaaaaaaaaaaaaaaaaaaaaaaaaaaaaaaaaaaaaaaaaaaaaaaaaaaaaaaaaaaaaaaaanaaaaaaaaaaaaaaaaaaaaaaaanaaaaaccnccccccccccnnccaagtactcccnacncncncaaaaatgtttnaagaanccccccnccngcctnanatncttaatannnnnnatnnanntntatcccaaatcttctnattanntcctggctatcttatctatatccanaattaaccttatttnccttaccaaaaanagcacattgaatcanaatt

SEQ ID NO: 18180 - DNA, 630 bp, Homo sapiens
  misc_feature 410, 554, 559, 568, 585: n = A,T,C or G
agtacttctagaattaattaaggcggggtgggggtgggagaggcccaagaccctgtgtcaataggccacaagaggcccggctgtttgcagcctgggtagacagccaagctacgctccatttccagcacttccaatccggccctggagccaacaatagctcctggggcctcccacagcgccagagaccagaagacaatcagacccagaggcggccccggctcagcccagaaacacctaaaggtctttctttggagggcttggttaaaagaatcatagttcacgcaaacaatgaaacattacgcagcctctgaaaaggcggaggtccacctacgtacttgttacgggttgaatcatgtctacaccaccccctcctaaaaagcatgttggggatctaaaccccaggacctcanaatgtgacagtattggaaacagggtcattacggatgtaacgagttaagataaaatcataccagtgtagggtaggaggccaggtgcggtggctcatgcctgtaatcccaacactttgggaggccaagtgaggaggacttcttgangccangagttgganaccagcctgggcaacanaatgagatctcatctctattaaaaaaattaaaataaaattaaaaa

SEQ ID NO: 18181 - DNA, 290 bp, Homo sapiens
  misc_feature 75, 259, 279, 280: n = A,T,C or G
gtccgggccccccctcgagagtacttctagaattaattaaggcgggggaacagtctttggagattagcggcttanattaggtacttaaaaaacactattatagggtatcatcaaattacatttgttggccaatcttatttctctgagtgattcagtctaggaaagaaataacaccctaaagatggtcagatatgatgctaaaggaattaaaaagggttgattttttttttctttgctcaggaataaacaggaattctanaaggtcaaacttcccccccnnaaaaaaaaaa

SEQ ID NO: 18182 - DNA, 246 bp, Homo sapiens
agtacttctagaattaattaagcgggtctctctctcctctcttctctgaacctctcttctctttctcttttcttacatattctactagttgttttccccttcttcttctcctttctctcctttttctccctcctccttgtctcttttactccattcctgcagaagagagagggctaaacttaaagaaaaaaaaggaggaggaggaggagagaaaggagaagaagaaggggaaaacaaaaaaaaaaa

SEQ ID NO: 18183 - DNA, 114 bp, Homo sapiens
  misc_feature 45, 50, 57, 77, 78, 86, 87, 88: n = A,T,C or G
agtacttctagaattaattaagcgcgggggggataaaaaaaaaanaaaanctgcaanttttgtggcttaaaaaaaanngtggacannnctaatggggatctccagctccttcct

SEQ ID NO: 18184 - DNA, 420 bp, Homo sapiens
agtacttctagaattaattaaggcggggtaataatggcaaaaagatagaaatatagatcacaggaatggaatagaccattctgaaatagaaccacacacattgccaactaattttcagcagaatgccaggtcaattcaataaagaaataaaaatctttccaacaaatggtgctagaataaccagaaatccataagaaaaattaaaaaaacctcatgccatatgcaaaacttaattttaaataagttataagcctaaatgtataaaattgtaaggcttttagaacaagacattgcagaaaatttttacaaacttgaataagcagttatttgttaggcaggacacaaaaaaaacaagccattaaaaaaattgacaaattagactttattaaaatttaaatctcatgctctttcaaagatacc

SEQ ID NO: 18185 - DNA, 432 bp, Homo sapiens
agtacttctagaattaattaaggtttaattgactctaggccatgagtaacagtcttattttcttatacatcaacaaagaataaaggacttgaaaaataagcatgatctatcaatttttaaattctaattttacaaaattaaagagatggtttccatttctaatacaacttatacagagatatgagagttgatttaatgcaacaaatattcattgcaaaaccatgttcaaggtgtaatatgaaatgttgtggtcaataaagatgcagctttccatttccaggttttagaacagtgctgtttaatggaacttcatgagattatggaaatgttctgtgctctgtgtttatccagtatggtagccaatagtcatatgcagttactaagcacttgcaatgtttgtaatatgactgaggaattgaatttaaaatttta

SEQ ID NO: 18186 - DNA, 660 bp, Homo sapiens
  misc_feature 20, 24, 92, 281, 284, 306, 307, 310, 312, 333, 355, 359,362, 371, 376, 381, 382, 401, 407, 412, 414, 415, 419, 420,426, 435, 440, 442, 446, 447, 448, 452, 453, 457, 463, 472,474, 475, 481, 486, 487, 488, 492, 499, 506, 507, 512: n = A,T,C or G
  misc_feature 514, 516, 518, 519, 520, 521, 522, 523, 524, 525, 526, 530,532, 533, 534, 540, 543, 544, 548, 559, 560, 561, 563, 567,568, 571, 572, 577, 582, 583, 584, 585, 586, 588, 592, 593,597, 598, 599, 601, 604, 608, 611, 612, 613, 615, 616: n = A,T,C or G
  misc_feature 617, 618, 619, 622, 623, 624, 625, 626, 627, 628, 630, 632,633, 634, 635, 636, 637, 638, 641, 642, 643, 644, 645, 646,647, 648: n = A,T,C or G
ccgtgcgtctttccatcccngcantcaagggtaacactaggctgggtgcccgggccccccctcgtgagtacttctagaaattaattaaggcnggtatgttagtaatgaaccagcaatgttcgatgagcaagaatgaacaatatagcaccaatggaacaaaataaagagccctggaagtagatctctctctatatatatatgtggttgtctaatttgtgataaagtttcctcggccatgtggttgggaaatggtggtcttttcaataaaaagcactggatcntanaacattataacattgctggtgnnaangngcccccccccccggggggggnccccaaacccccttataagggnagtnttncccccgccntgagnccttnntttttccccggaaaaaaangaacantttgngnncccnnaaagancttccccantggtncncagnnntttnnttcntaaaanccccaaacntnnaacccnaatgnnntttnaccggtnaatgggnnaaacnancngnnnnnnnnncctncnnnggtttnggnngganaaaagggctcnnntncccnnacnngggtnaaacnnnnnancccnngggnnncnaanaaanccnnntnnnnnaannnnnnncncnnnnnnnccnnnnnnnnaaaaaaaaaaaa

SEQ ID NO: 18187 - DNA, 308 bp, Homo sapiens
  misc_feature 170, 285: n = A,T,C or G
agtacttctagaattaattaatggaaataaaataaatgcctgggaccaatctttttattgatgagagagcaacaattctatacctgataaggcaaggagaattctgatgttctagtagcagcctgacccaggaatttacttaaggtgtgtgtaggcgaatgggagggtanaggaacttctgggaaatgatgactaatattctatttgaagctgttgctatgccatattcctaaatcttcagcaaaattccgctataaataacttccttgtgtttgtgtaatttgngaaaaaaaaaaaaaaaaaaaaaa

SEQ ID NO: 18188 - DNA, 430 bp, Homo sapiens
  misc_feature 172, 414: n = A,T,C or G
gtaccgggccccccctcgagagtacttctagaattaattaaggcgggggaagttattatgcttggaacttggtttgatggcttgtactatgtgtcagtcatttaacttaccatacttaatgtacacaacacttcttgaagtaagaattatcattccttattttctggataanaaaacagactctcagactcttcagggttcttccttcctgttaaatagtaaagttgcagtgtaactctagatttgtttaactctaaagcctgtttcttcacactaccctatcctgccttctgttttgatgctctgccatccataattactaaagaaaaatatgcttatttccccaattttctagttatgggtactcaatggtggttatcccgtatctgcaatttgctatcttgtagttagaantcaagccaatcccaag

SEQ ID NO: 18189 - DNA, 407 bp, Homo sapiens
  misc_feature 227, 237, 246, 345: n = A,T,C or G
agtacttctagaattaattaaggcgggttgccagaatgagacaggtacttaataaaggatagtatcctttcttaaggtctttattagtgggaaaaactgggaaacaacctatgtctgatttttgcctgttgctaagcagtgaatcgcaaatgtttagctctcccctgtttcagtgaaaggttgggtgatggcagcggtgactcttttttgtctttttttgccagaantaacctggantggcctaanatagaaggtgtggagaaacaaaatctagccaaacatatacatgcatacatacataggtaaatatctcagttggtgaaggtgaatatagaaaatcgggancacaggaaaaattaccatcaaccctaatgaggttactggcagtcaaaattaaaaaaaaagga

SEQ ID NO: 18190 - DNA, 522 bp, Homo sapiens
  misc_feature 34, 36, 41, 42, 48, 49, 52, 58, 64, 70, 73, 81, 84, 98, 100,101, 121, 127, 130, 145, 146, 149, 167, 212, 220, 223, 240,242, 248, 252, 256, 260, 263, 284, 285, 286, 287, 288, 292,313, 314, 322, 338, 345, 353, 448, 458, 468, 480: n = A,T,C or G
agtacttctagaattaattaaggcgggcgaatancncggtnnggaaanngangccatnctggcnaacttnatnaaaccccntcnctactgaaaatacnannattatctggacatggtggcncgtgcntgnaatcccagatacccnngangctgacgcacgatgaatngcttgaatcagggagttggaggtgtgcagtgagaaagatgtcacnccactgcnctncatactggctgacaggnanactccntttnaaancctncgngctgctggatctttggggggnnnnncccnatccttgagcactgaggtgtnntaatattngcaactagcaatgccnttttttntaaatatngggatatttacctttattaagaaattatactaaacattgatggtccttgatcatttttatgttctcatattacttttgattctactatgattggngtggtggtgnaccaaagatnatttaccaaacnaaaaactggaatttttggttatatttgactcaattagaaatt

SEQ ID NO: 18191 - DNA, 242 bp, Homo sapiens
  misc_feature 3, 240: n = A,T,C or G
ctngagagtacttctagaattaattaaggcggggtaggagccgggaaccggaatggaagaggcgtggattctcgtcccagccctggctctcatggcgttttgtgaccttgggttaaccactttcccgccgagtctcagtttcctcatctgtacaatggctctcatgagaatgatgcctgtttttcctattcccagggagggattcgatgcgaggacaccataaaataaggaatgataatnga

SEQ ID NO: 18192 - DNA, 507 bp, Homo sapiens
  misc_feature 20: n = A,T,C or G
gggtgccgggccccccctcnagagtacttctagaattaattaaggcgggggagaaatacataaaatatatgacaaagccctagtattttcaatgtataaaaagctctaaggatcaatatgaaaaaattactatctccataaaaaaataagctagggataaaataagcagttcatcaaagaataaagatgaccaacaatgtgaaaagaggacaaaaatgtaatttaaaaaatgcagtgagtctagacaacatggtgagacttcattacttcaaaaaaatttaaaaagttagctagatgtggtggcacacgcctgtggtctcagctacttgggaggcattgaggcagccagcgcaggggcttctgctgagggggcaggcggagcttgaggaaaccgcagataagtttttttctctttgaaagatagagattaatacaactacttaaaaaatatagtcaataggttactaagatattgcttagcgttaagtttttaacgtaattttaata

SEQ ID NO: 18193 - DNA, 589 bp, Homo sapiens
  misc_feature 333, 443, 449, 453, 467, 471, 475, 486, 508, 522, 530, 532,566: n = A,T,C or G
acttctagaaattaattaaggcggaagcttaggctaatagcctcgtggacggtggagctctagtctctgagaaactcattcattcctttagtcactaggaagaagcaaataagtaccaatggtgtcactggttgtggtgagctgagatcgtgccactgcactccagcctaggcgacagagcaagattctgtctcaaaaaatcaaacaaaaaacactaaaaaaccatacatatatgatataccaacaagattttcttggtggggtgcctaaaccacctgattctcaagttcatgtggaaaaattacacaggtaagaatagcaggaggtcaggcnccctgtaattccagcacttttggaagcccaagtggggaggatcactttgaaaccagcgtgggccatgggaccaggacccccttttttccccaaaaaaacttaaaaaattnacccanggcnaggcttgggggctnaaancctntaattcccacnccttttggaggcccaggccggncaaataccaaggtnaggaattnanaacccccctgggcaaattggttaaacccgggttntttaaaaaaaaaaaaaaaaaaaa

SEQ ID NO: 18194 - DNA, 379 bp, Homo sapiens
  misc_feature 36, 46, 49, 63, 85, 94, 102, 123, 124, 125, 128, 129, 146,147, 152, 155, 165, 166, 175, 176, 178, 181, 186, 189, 190,192, 198, 204, 288, 321, 330, 339, 351: n = A,T,C or G
agtacttctagaattaattaaggcgggcagatcacnaggtcagganatngagaccatcctggntaacacggtgaaaccccgtctntactaaaantactgaanaaaaaaaaaaaaaaaaaaaannntgnngccccccccgggggggnntcccnttncccctttttnnggggctttnncnccnccccnctnngncaggtnttaaanatggagaattgtgggagtgttctctttttcccttggatccggtgcctcctgggccaacaccttggcttccagttctttttgctncatcttaagcctctcaatctctaaattcttttncttcactgncttcatgancaccattcgttnttcgctttggggtattcaataggggggt

SEQ ID NO: 18195 - DNA, 562 bp, Homo sapiens
  misc_feature 54, 56, 155, 181, 182, 183, 184, 185, 186, 202, 203, 209,216, 217, 218, 219, 223, 224, 225, 227, 231, 232, 242, 243,244, 245, 248, 249, 263, 264, 266, 268, 271, 273, 280, 317,324, 325, 330, 335, 341, 351, 357, 388, 390, 395, 400: n = A,T,C or G
  misc_feature 412, 415, 425, 431, 432, 433, 434, 435, 436, 438, 440, 444,445, 461, 462, 465, 470, 473, 474, 478, 483, 484, 489, 492,494, 496, 501, 504, 505, 506, 513, 518, 519, 542, 543, 545,548, 560: n = A,T,C or G
agtacttctagaattaattaaggcgggtgcctgtaatcccagctactcgggagngngaggcaggagaatcacttgaacccgggaggcagaggttgcagtgagccgagatcgcacaactgcactccagcctggatgacaagagagaggctctgtcnaaaaaaaaaaaaaaaaaaaaaaaaannnnnncccccccccggggggnnccccanttccccnnnntggnnnantttnnaccccccccnnnnggnncgttttttaaaaanntntntantnactggtntgaaccctctgtctccttatttaaatgtggatccacnatacctnntgcangtaanattaanattttactantttggngcattattttaccattttaaaaaaaacgccnantgctntgctnacttgaactatnacntacacttttngaggcnnnnnntntntggnntcattacccttttttnntanaaacnccnngaancttgnncttgnatntntntgaanccnnnttaactnccttnnaaaaacttatttttttaaaaccnnancanaattaatttttnaa

SEQ ID NO: 18196 - DNA, 478 bp, Homo sapiens
  misc_feature 18: n = A,T,C or G
ccccctcgagagtacttntagaattaattaaggcggggctcaggcagtaatgctctcccccacaacaccctgctgctcacctcctactgtgcggcccatttcctaacaggccacagaccagtatcacacaccatcctggggtcaggaactcctaaactatgaactatagtggaataattacctgagccaggcacccaagagaaatgtcctaactcagcaaagaagtgactgtcacccgggagacacactggaaaatatcttacacctgatccaggctaatccaagactgcaggtcagtacgacatattaaaacaagggatctcatgcctgtgtatgtgtgtatattctaaagactatgcacacattttttctactttgaactttctctatttctattatgcaatttgctgacctagcaattcccatattctatacaaatttattaagtgccatacctgaccatcaattccacttccaa

SEQ ID NO: 18197 - DNA, 532 bp, Homo sapiens
agtacttctagaattaattaaggcgggggaagagtgtgtggaaacttctgtttacattgtcttttaaaatgtaccatgtacacacgatacctattcaaaaatgaaatgtattcttcacctcaggaagatctatgaaaaacatattctgtaaattatgaacaaatactttgacttctgtttacatttttttaatgtaccgtgtgcacatgatacctattcaaaaatgaaatgtattcaccttgggaagttctatgaaaaaattctgtaaaaaattatgaacaaaccctttgacacagcgattccttccccaggaatttatcttataaatacacttacactcgtgtgaaaataagtacagtgctatgtggaaggataagtaagaagcagataatattggttacctttggagaggggaatctgatgtcaagtcaagagtggaatgagtgagactttttcactacatattcttggtaccttttgaactttaaaccatgttattgttacctattgaatgaatgaataaataaatgtt

SEQ ID NO: 18198 - DNA, 282 bp, Homo sapiens
agtacttctagaattaattaagacgggagtttgagtaaaactgacgtgtaattctagaaatgcccaagcaggatttggaaaaggagtcctagaaattgagaaagaaattggggctagtgacagaggcataggattaagtaataactgaatttattaagagtgaaataggcctccaagttgctgacttagaataaaatctcacaaaattaaggactgatttttaaaattagcctgcactgttaaagctggagatgaaaaaaaaaaaaaaaaaaaaaaaaaaaa

SEQ ID NO: 18199 - DNA, 451 bp, Homo sapiens
  misc_feature 9, 16, 157: n = A,T,C or G
ctgggtccngggcccnccctcgagagtacttgtagaattaattaaggcgggttgaaagtgaaacaatggaaaataatatctcacagaaatattaaaagaaagcaggaagtggctttctacattagatgatattaaaatagagcaacttcagagcaangaaaatgatcagaacagagaggataatcatattataataaaagggtcaatccatcagaaagacatagcaatcctaaacaattctaagcaatcctatacacgttaaacaatagagctgcaaaatgtgtgaagtaaaaactaaatgtgtgaagtagcactgaaaagagaaataaattcataattatagttggatatttcaccaccccttttccagcaattgatagaaacactagatagaattcaacgaacacagagaatttaacatcatcaaccaacaggatctagctgaacttag

SEQ ID NO: 18200 - DNA, 405 bp, Homo sapiens
agtacttctagaattaattaaggcgggattgtatcttatttttacattagaaatgcaaaaaatcattttataagattaaatctattgagaaacacattaaagttcttattgaacagttttatcctatatagttatctcttttatctgtgtaaatcctaattatgtgaccattctttcttaacctcaggatttttttttcctaacttaccagcatactttgccctccccctcctgccaaccagtcattaattagttcaataacattgaatcatttaatactgctctagtgtctgtgacaaaagatattatctggaaacattttaagtatgtgtctcgcgaattggacctctaagaaatattcttactttttggtaaatttttttcagtaaaactattatttatgaa

SEQ ID NO: 18201 - DNA, 298 bp, Homo sapiens
aagtacttctagaattaattaagcttcagattgagaaggagaggggctgggcagtggggtgaagagggaagaaaaaggcagggattatgaagatgtggtattcaaagagtagggtttggataggcgagcattccaaagtatgtctgctgcaatgggaaaggagaggtgccactgcccgcagaaattgatggggggcagggacgggtgttagaaaatggccctaattactggattctgaaacactgaatacactccccctaggaaaaggttttaaactattatcactcttttaagcctt

SEQ ID NO: 18202 - DNA, 349 bp, Homo sapiens
agtacttctagaattaattaaggcgggggatccacaggattttccatagaaaaatggcgcttccaggatcttggtcaaatgaattgtttattaggttggtctttatcatcagtctggttatatctgtaaggttaggaaaatagcatagtgtcggttgtgaattattttcagagtgcttagcctttccagtagatgaagagtaacagcttttactaaattattgagatgtggattagggaattacatctggattggagttctatatctgtttcttgccaggtatgtgaccttgggcaaattacttaatctttctaagcctcagtttttacatttgtaacataatataatt

SEQ ID NO: 18203 - DNA, 500 bp, Homo sapiens
  misc_feature 14, 17, 31, 32, 35, 44, 45, 46, 48: n = A,T,C or G
gcgcgcatcaaccntcnctcaagggcactannctngggaccagnnncngggtaccgggccccccctcgagagtacttctagaattaattaaaaagttataattttagataaaaattctagtcaaatttttacagatattatctcactaattttcagacttttgccaaagtgtgcacaatggctttttgttaataaagaacagattagttttgaagaaggcaaaaatttcagttttctgaagacagcatgttattttaacaatcaagtatacgtattaaaaattgtgagcaatctcaaatgaaggtccatcgtttcattttaaatctctaaatgaattcatataagactcaaaccgtttgtgctggtcactcatggtagcctcagtttttgcaattgtgatgcatatcactgaaattttacagttggtaatgtattaactatgtaacttaacacttggaattaagtagttctttggatatccaaaaaaaaaaaaaaaaaaa

SEQ ID NO: 18204 - DNA, 367 bp, Homo sapiens
agtacttctagaattaattaaggcgggtgatttattcaaacatttgttctagcttaagctggaataagcagtggtcatttcagaagttttcatttgtaattccttcctctcccttgttcccaagtaggtagtagtaagtatgtgccacaggctgattatctgggtaatcttttacgggtgggaggtgagattgatagtgcaataatcagtgatctatagaccctcatgcacgattcaagtttcactcttgtggctgatgccattattgcacattggccattccaaacctgtggagaactttgttgtcaggccctgagcgctcacagcttcatttggcccaggttgaagacaaggaaaaaaaaaaaaa

SEQ ID NO: 18205 - DNA, 330 bp, Homo sapiens
  misc_feature 4, 5: n = A,T,C or G
agtnnttctagaattaattaaggcgggtggctggagctggtttgataattacatggtaatcaactctacttcacaaataaaatgagccactgcatccagctataatagctttaaaagactattttgaaaaggaaggaagaaaaatcaaaagaatctgtaagaaatgtagcatgaataaagcaatataagagcaaaaattaaaaacaaaatcaggtaaattagtgtatctaggagtttctttgaataagtttaataagataaacacttgaaataactaaggtatagggtaaggtagaaaaggaaaaaaaaaaaaaaaaaaaaaaaaaaaaa

SEQ ID NO: 18206 - DNA, 458 bp, Homo sapiens
agtacttctagaattaattaaggcgggaagacagtggaattcagctgtcacttgataatgtagactgaatgcaagaagtagacattatgacaggggaagaacaggagcgctatctgcaaattctgatactgaaaattaacaaacgcaaataatggaaagaaaaagtacatctgtgcatgtaaagctatttttaaaagattctattgccagtcttatgttaaagaaagcttacttgatcctcttcctcccgaattaagtgctacatattctcaaataggaattttattttaaatagcctttgagcagtacctgggtgctgtcttgcatttgcctatgatagatttgcctggaattaacaataggtgtttagggagtgaggctcctgaggtgtttgtcctggcatgtacattcattcctgtgggaggggtcctgtagccttggagctctttgaggctggg

SEQ ID NO: 18207 - DNA, 267 bp, Homo sapiens
  misc_feature 28, 29, 30, 47, 53, 57, 62, 65, 66, 68, 76, 86, 102, 127,167, 174, 177, 188, 195, 221, 230, 232, 235, 236, 238, 241,245, 248: n = A,T,C or G
agtacttctagaattaattaaggcgggnnntgggaataacgccgccncatcgncagncggcntcnntnatgggcgnaactacgacngtatctgatcgtcttnaaacctccgactttcgttcttgatnaatgaaaacattcttggcaaatgctttcgctctggtcacntcttgcnccnggccaagaatntgacctntagcggcgcaatactaatgcccccgnccgtccctntnaannanggnctanttnccgaaaaaaaaaaaaaaaa

SEQ ID NO: 18208 - DNA, 461 bp, Homo sapiens
  misc_feature 14: n = A,T,C or G
cgggccccccctcnagagtacttctagaattaattaaggcggggtaaagagtgttttagatcaccccctccccaaataaaatctgggcagatatggaaactatataaactttggatgtcatcttcaaatcacacacagatccaatggtagaaggtaggttttatgggcttaaggtgtttgaacacaatctttgaccagtcattggctgaccattaagttatgcagatgatgctagaaagccaaactaaaaagtaaaaatataagaattttaaaaattttaacagagacattagtggtgacacatggcagaggacaaaacttctacgtataagtccaatcaattatagaaagaaagagaagaaagaagaagaaaagaaagagaaaaagagaagtgtaaggggtgggaggagaagaaaactcttaactggaaaagtcagaaaaaaagcagaatccagagttgc

SEQ ID NO: 18209 - DNA, 366 bp, Homo sapiens
  misc_feature 19, 43, 61, 69, 79, 83, 87, 96, 102, 108, 111, 144: n = A,T,C or G
agtacttctagaattaatnaaggcggggcgaatactactttgnaacttttaaagtcttaancttttcantaaaattgantganactnataggcccnaacaanaaaaanatncacctaaatctaaaaagctgctgggagtacctnatttcagtattcaccaaatatttattaaacaactactatatgctattctaggcactagggatatagcagtggccacaataaacacaactttactgctcaatgaccttatatttttaatagataatcttggttggtgaatcgctgagtggcatggagaatattctagaattgtgagagtaggaaaagattttatggtctaggcaggcaaagggagagcgctcc

SEQ ID NO: 18210 - DNA, 503 bp, Homo sapiens
  misc_feature 20, 21, 23, 49: n = A,T,C or G
gtgaccgggccccccctcgnngntacttctagaattaattaaggcgggnagaatggtatttgcctcatttacaagtttgtgttcttctttactcctaaatcagtgtaactcaaagcatttctaaagtaaattgcactttgctttcagagctctaaaacactaaaatatttgtgctttattcgaatagatttaaaaattatagtatggtttattttcctttaaaagacatttcattgttataaacacacaaacaaaaacccaaggccaaaactggaatattattgtacatgtcataggttaagtaggaacagtttctggactttggtgtaataactctttactgacgaagaggtctatagtttgtttaagaactatcccacttaaaaaccaatccatacacttttcatgcagctgactccctcccccctttccaaagctcagaatggcagcagatgatacagcaaacacgtaactgcaaaaacagctacagcagctacctgggt

SEQ ID NO: 18211 - DNA, 428 bp, Homo sapiens
  misc_feature 183, 188: n = A,T,C or G
agtacttctagaattaattaaccaacccaggagacaaactacctcgggtcttaggtactgggattataatatttgtagctgaaggcatcccgatactgataatgatgacatttagggttattttcaagtaagtatataactgtagctcctcttaactggtctaactctaatttgttctttaanataanaatctccttgagagccttccctgaactcccatgtgggccagagctatcaccacattccactgtatactataatattgcccatagttttctgtttatctcttcacactatagaaaacaatttcttgaggtcggagactgtggctttactccctattgtatccacagaaatctcctagcacaatgcctggcacatagtgggtgctcaaatattttctaaatagataataagggggaaagagt

SEQ ID NO: 18212 - DNA, 290 bp, Homo sapiens
  misc_feature 271, 281: n = A,T,C or G
aagtacttctagaattaattaaggcgggggccatagtgataggtaaagggatcactggaatggggtcttgcggtggaggagggagattggactcaactccctgtgtaaagcaattgtgaagctttagcttacaaacgaggttgttttccttgtgaatgggttagaatgaccagttttatcaatacatatgttacaatcaactgtaagtgtcataagtcattaattactgatggtagacaaagtacaaaaatttgtaaaagactgtctttanaatacattanagttgattc

SEQ ID NO: 18213 - DNA, 529 bp, Homo sapiens
  misc_feature 353, 359, 368, 401, 403, 409, 412, 414, 416, 430, 452, 456,510: n = A,T,C or G
agtacttctagaattaattaaggcggggagcctttggatcccagcatagaagcagagatcatagagactggattggctgcattcacaaaactctatgaaagccctttaccctttgctactggagaacacggatctatggaggtaaaaatataaaaacaaactagccaaagtttggtgttagaagtagaagatgaaagtcattattataatctgaagcttagctttcttggtgtacagttcacagggagtacaatatgagtaacataaagaatgtggttaatttattggaatatcctaagagctttcctccaaaagcttcaaggtacttgtctgatttttttttttttaaaacncaactntttttttcnataccaaattaaaggaaaagtttaaggccgggngnggggtnttncntntgtaatcccacccntttgaaaggcttaggctggccntttncttgacctcaggagttttgaaactaacctgggcaacatggcaaaaccccttttnaaaaagggaaaaaaaaaag

SEQ ID NO: 18214 - DNA, 579 bp, Homo sapiens
  misc_feature 31, 34, 36, 47, 48, 49, 60, 65, 68, 70, 74, 84, 105, 107,127, 135, 181, 182, 204, 209, 211, 214, 216, 222, 223, 224,225, 226, 229, 233, 235, 236, 241, 243, 246, 248, 250, 254,257, 258, 261, 281, 315, 317, 530: n = A,T,C or G
agtacttctagaattaattaaggcgggcggntcncnaagtaagaagnnngacactgtccngtccnacncnatanatccatcccnctactagtcaatacgaacggnancatcgcccagtggtgaatcncgcctganggaaggtctccggaacatgagtgaggaatgctggcgccagatcaanntacccagctccaggaggcaganccatncncananccaaannnnnccntctntnnttaancnctntncnaatnaannttnactttctctaacccgatctnggtccaagtctaaatccaggtctgcttccagatngncctcccgatctagatctaggtcccactcaaggtcctaactggctatggccacattttggaactacccgagaagtcttttgtacatgtttggtagccgtagcacaagtgattggagtagaacatgtcactgctgtacatttttaactcccctaatggcgtgtctataattgttaaatctaagtgcttcctctcagtaaagcctcctggcaccangccttcctgcttcgactgaaaaaaattttctcttttgaaaatccccttt

SEQ ID NO: 18215 - DNA, 853 bp, Homo sapiens
  misc_feature 17, 20, 22, 31, 36, 41, 47, 49, 54, 58, 61, 64, 68, 77, 78,185, 344, 358, 360, 366, 380, 381, 390, 395, 396, 398, 412,413, 414, 418, 419, 420, 428, 429, 436, 437, 438, 439, 442,446, 449, 450, 464, 471, 472, 473, 474, 475, 476, 477: n = A,T,C or G
  misc_feature 479, 480, 515, 516, 519, 520, 522, 523, 527, 528, 541, 561,573, 577, 579, 583, 584, 585, 586, 587, 599, 600, 623, 625,633, 640, 641, 648, 650, 657, 662, 669, 670, 672, 673, 674,675, 676, 677, 678, 679, 680, 681, 682, 683, 684, 685: n = A,T,C or G
  misc_feature 686, 687, 688, 689, 690, 691, 692, 693, 694, 698, 699, 702,721, 722, 723, 726, 727, 728, 729, 730, 731, 732, 737, 739,740, 742, 743, 744, 745, 749, 750, 751, 754, 757, 758, 766,773, 774, 775, 776, 777, 779, 781, 782, 786, 787, 789: n = A,T,C or G
  misc_feature 791, 794, 795, 796, 797, 798, 799, 800, 801, 802, 803, 804,805, 806, 807, 808, 809, 810, 811, 819, 823, 824, 830, 832: n = A,T,C or G
tttcattccggaaacanctntnaccatgatnactgnccgcnttttcnantcagnaaanatntantacnatgagtggnngacgagtgtttcatcaaggttggtgcggtgggtgatagtgtagcatcaaggttggtgcggtgggtgagagtgtagcatcaaggttggtgcggtgggtgagagtgtancatcaaggttggtgcggtgggtgagagtgtagcatcaaggtcaacacagggggtagcgtgttgcatccctactgtggttctgcaggaggttttccttgtggcaggagatacctgctgtgcatcaggcgaagatgtacaatgcctgcaacacagtctcanaatggccgggctcncncctgtnatcccaacattttnngaggccgangccannanatctttttgaggtnnngagnnnaaacaccnncctgttnnnnatncccnctnntttttttttttttnaaaaatnnnnnnngnnttttggggcttcccccccttttttttttttttttnnccnnannaccnnggggggggggganaaatttttttttttcccccngggggggggggngttntntttnnnnnccaaaaaaaaanncccatttttttttcttccccccngngggggacnaaaagannaaaaaananctttttnttttnaaaaaannannnnnnnnnnnnnnnnnnnnnnnaaannccncccccccccccgggggggnnnccnnnnnnnccccntnntnnnnggannnttnttnncccccccntttttgnnnnncntnntttnntnanaannnnnnnnnnnnnnnnnntttttttnaaanncccccntnttttttttttttttttttttt

SEQ ID NO: 18216 - DNA, 974 bp, Homo sapiens
  misc_feature 7, 20, 27, 89, 97, 98, 99, 133, 145, 152, 169, 188, 256,330, 346, 446, 450, 467, 474, 512, 532, 582, 583, 591, 609,652, 696, 704, 782, 811, 860, 917, 924: n = A,T,C or G
acgccantttgcgcaattanaccctcntttaagggggtaaacaacagaggctgggggttacccgggggccccccctcgaagaagtttcnttctaggnnnttaaattaaagggcgggggggcttaaaaacctangcgcccaaaacnccacttnccaccttactaccaagnacaaaccttaggcccaaanacccattttacccaaaataaaaggttattagggccggaataggaaaaattggaaaacctgggccgcanttaggaaattttaagtacccggcaaggggggaaaaaggaatggaaaaaaaaatttattaaacccaaaggccgtnaattattacgccaaanggggaccttaaccccccttaattacccttttctggccattaaatggaaatttaaacctaggaaaaattaaacctttttggcaaaagggggaaggaaggcncaanaaggccttaaaggaacncccccgnaaaaaaccccaaggaccggaagccttacccttaaaagnaaaccaggccttaaaaaaantaagccaccacccccccgttcttatttgttaagccaaaaaattaggtggnngggaaagnaatttttaattaaggggnttagggaaggggcagaaccaaaaaccccttaacccggaaggcnccttggggttggaaataaggccttggggttttggtccccaaagnaattaagnaaaattctttaaaggttttcaaacccttttttaaaaatttttggcccccaccaaaggaaaccccccttctttaaaaantccccccttttggttaaaaatttttaaancttgggtttaaggttccccaaaaaaggaagggggaaaccaaggccttcntttttgggggaaccaccttaaggggaaaaaaaaaaaaccccttttggttacgcaggnagggaangttaaaaaaaaaaatttttaaaccaacccccattaagttaaaggggcccc

SEQ ID NO: 18217 - DNA, 362 bp, Homo sapiens
  misc_feature 1, 10, 29, 33, 40, 54, 55, 74, 79, 81, 87, 90, 101, 103,104, 109, 111, 113, 114, 117, 118, 119, 122, 124, 125, 127,130, 136, 138, 140, 146, 150, 159, 160, 161, 162, 163, 164,168, 172, 262, 285, 288: n = A,T,C or G
ngagtacttntagaattaattaatgcggnggcnggaccanggagaattaataannttctggacttttaaaaaanaaaananaaaagnaanaaaaaagacgngnnccccncngnnggnnnacntnnantgnccctantncngggccntttnccccccccnnnnnnctangttnttaaaaagctgttttaaagtctgggtcatcgtgcagtcttttccctgacacagagtaaaagctccacagattgcgctgtctacctggtantcagtggcagcaacggtggctgntgnttctggaaaataaatggagtctcccaactggcagcatcttaggattgcttcaggcgtttgcgtgggggccccag

SEQ ID NO: 18218 - DNA, 430 bp, Homo sapiens
  misc_feature 34, 35, 42, 52, 58, 66, 90, 105, 125, 137, 163, 169, 177,180, 187, 192, 201, 207, 211, 225, 252, 256, 270, 291, 402: n = A,T,C or G
agtacttctagaattaattaaggcgggggggttnnaccatgntgaccaggcnctggtntcaaactnccgacctcagatgatttccttgcntcggcctcccaaaangctgggattacaggtgcganccaccacaccangctgaaaatatatttttactctgaanccttangattaaanagngctaatnaaaanaaatgatcncttacntatntaacaagaaaagtnaccccagctaaatccacttacacatcnttgntcttaaaaaataanttataatctaggaatagggcntaaaaaaagaatgttgtaaaacattttctaagaattgctaaagcatttaaatatcctcttggtaggatccgtgatagatcaaaagttgtaacacgtactgcttaggagaanagaagcagaaagatcagaagcggtggag

SEQ ID NO: 18219 - DNA, 694 bp, Homo sapiens
  misc_feature 6, 246, 411, 462, 544, 551, 598, 621, 641, 673: n = A,T,C or G
tacttntagaattaattaaggcgggggattagatgatccttaatgatcatttcaggccaatttctataatgtgcactacacagttgagtgaccacttgcaagatttttaatgtgagcagggatagtagagatgatgaatgtaggtaaggagaggaaatgagaatgaggactttcaggggcaagagatggtggtgtcattttgtgttgtgttcctgagtcaggtaccaacagatttcctctgagtanaatataaatgctaacaaattaaactgtatgttgtatacattcagcccttggtaacaaggaaaatgatagaattgaaatgttcttgtacctcactagaagcagagaaagggtgctggatatttctgtttccgataatgctgcatagatagtgccacttaaatgtanagcaaaattacagtctcctctaagtaattcctccagttccatgtgtcctanattccgatacctgtccaatacaatttctagaactttttcacctccccatcatgtctgccttctatgccccaaaatttgtganatgctanaagttgtttgacctgtgattgtcttgcttccttgggccttacgtacnaattcatagcatgattgggccanaatcccgtcttttgagctcnttctaataaagtaaagtttttgaagataattnccttaagacccccattgggaa

SEQ ID NO: 18220 - DNA, 701 bp, Homo sapiens
  misc_feature 27, 38, 53, 54, 63, 66, 68, 74, 77, 81, 82, 88, 90, 93, 99,107, 108, 111, 114, 128, 133, 134, 137, 139, 140, 145, 150,151, 154, 161, 167, 168, 171, 173, 174, 175, 176, 187, 200,202, 203, 211, 213, 216, 278, 282, 286, 290, 303, 306: n = A,T,C or G
  misc_feature 311, 322, 325, 354, 357, 370, 380, 384, 387, 389, 394, 416,422, 437, 445, 449, 451, 454, 461, 476, 486, 490, 499, 513,516, 518, 523, 529, 554, 556, 560, 573, 591, 598, 611, 625,631, 636, 637, 649, 650, 651, 654, 660, 664, 670, 675: n = A,T,C or G
  misc_feature 678, 683, 690: n = A,T,C or G
agtacttctagattaattaaggcgggnaccaagtattnactatgtaggcatgnnaaactccantgnancatacngcnttgnntcatananacnaaaaanacaaaaannaantgnagaggaaaaaaaangcatnnaanannagctnctccnnccnccggggngaggcnnganannnncttgaacccanggggtggccgccncnntgagccgntnttncaccactgcactccagcctgggccacagaacgagactccatctcaagaaaaaaaaaaaatgngttnttancaanatgtttcccaaancantttancaaacagttanctngatgcaggttttttccctaagggcttaangtnggattattcttcntgatcagtancccnttntngggtntaattggaatttcccctggacnttactnttttaccttatcttnaatatgtntccngnggnaaatttngctaaattcttttcnggggtggctntttnaatactttnttaacaccctaccnttncnccttnggggcnttcaaagcttttggtttttcccagngnagtnttcttttacttgnaggggagggaaaattggntcaaacnttgggaagccggnagggttgcaattangccggngattnnacccccctttgnnnttncaaccntggngtgaanagaanaanaactncattttnaaaaaaaaaaa

SEQ ID NO: 18221 - DNA, 421 bp, Homo sapiens
  misc_feature 28, 32, 34, 38, 39, 41, 44, 46, 47, 49, 50, 56, 59, 63, 75,80, 87, 92, 93, 96, 97, 102, 108, 115, 116, 124, 127, 131,135, 137, 138, 168, 174, 175, 178, 183, 187, 188, 191, 192,193, 194, 195, 196, 197, 200, 203, 263, 265, 275, 281: n = A,T,C or G
  misc_feature 307, 398, 401: n = A,T,C or G
agtacttctagaattaattaaggcgggngtgnanctgnngnctnanncnnggatcnagngatnattgaataatancctgncgctaangaaannctnnagctnttgganttccatnngacagctnaancttnatgncnntcatcctacacactgggatgaattacaaancgcctnnggnacctncttnnatnnnnnnngtnganctgtgttattcacaatcttctgggacgtcgaattttactaaataaagttggagaaaatantngctagagacntacagncaaaattcatatacatcacaggctgncaccactcaattctactggccctcttttactagaggtgacactacttctaaagacacagatgtttagagatccctaaggattcacaatgtncanatcctataactactgaatat

SEQ ID NO: 18222 - DNA, 576 bp, Homo sapiens
  misc_feature 52, 509: n = A,T,C or G
agtacttctagaattaattaaggcgggcaattatcttattggtgtaaaaggntgagccaccagtggaagacctggtttgggattgagggtctcagggtgagtcagcccccaaactgacagatagggaggataaaatgggaaaaaattttccgccttcagtgagcctataaaaattgcaaacacatgtaacaatcaggagctggattaactctaactggattaacttaaagaattttgttgcaatgtgacattttgttttctctctagtaactggtatgaaccctctgtctccttatttaaatgtggatccacgatacctcgtgcaggtaagattaagattttactagtttggtgcattattttaccattttaaaaaaaacgccaagtgctatgctgacttgaactatgacatacacttttggaggcagtaagtctctggtctccattcacccttttttcctcacaaacaccaggagcttggcctgcatctctctgaaaccagttaactnccttcaaaagcttattttttaaaaaccagagccagaattaatttttgaaagcacccccaataaaagt

SEQ ID NO: 18223 - DNA, 346 bp, Homo sapiens
  misc_feature 16, 28, 85, 88, 135, 136, 138, 139, 141, 154, 156, 172, 173,182, 184, 190, 194, 198, 210, 217, 232, 233, 234, 242, 248: n = A,T,C or G
ataaatggggcggttncggaagcgtcantgtttccatgttatggatctctctgcgtttgaataaagactatctctgttgctcaanacnaaaaaaaaaaaaaaaaaaaaaaaaaaaaagaaatgggaactccaaannannanaaaaaaaaaaaananaaaaaaaactgtctgnnccccccccnangggggnatgncccntacccaattcgngtgcggnttgtccccccccccnnntggggatnaatatncaccaaataagctatatactttggttacctatgtacctgttaccactttcaaaaatctacagacagtcaatgtggatgagaactaatcgctgatcgtc

SEQ ID NO: 18224 - DNA, 415 bp, Homo sapiens
  misc_feature 32, 408: n = A,T,C or G
aggcgggatgctggcttctagattgcaataanttatattttatagtgttaagaaaatatctgttccattttataagtttttttcaagaatgaatatcattgggtaccttttctataaatacagatgatttttctcctcaggtctgttggtttatattagatttcatagtgtcagatcatctttgcattcctgaaacgagctctacttgattgtgatgtagtagtcttttgatgtgctgcttgtactatttctttgatacttttgcactgatattgagactgattataaaaggcagttagcagctttctctcttccagtgggctctggaacattttaaaatagtagcaatatttttgccataaatgtttagtagaattcctctaagagctttttggaagaaaacatagnttcttta

SEQ ID NO: 18225 - DNA, 646 bp, Homo sapiens
  misc_feature 223, 224, 225, 232, 233, 243, 247, 248, 254, 257, 258, 259,272, 276, 278, 286, 298, 300, 309, 318, 338, 342, 358, 365,367, 382, 410, 434, 444, 470, 472, 485, 487, 505, 509, 513,520, 525, 537, 541, 556, 563, 570, 572, 581, 589, 596: n = A,T,C or G
  misc_feature 598, 604, 612, 629, 631: n = A,T,C or G
agtacttctagattaattaaggcggggcgtccactaggtttcctgtcccctgctgctccttccgtaagaaaatgaaatattctatgcctaatactcacacgcaacatttcttgtactttgtaagtcgtttgcgagaatgcagaccacctcactaaactgtaaacggtaaagagatttttacttttggtcaaaaaaaaaaaaaaaaaaaaaaaaaaaaaaaaannnaaaaaannaaaaaaaaanaaannaaatanatnnntaaaaaaaaaaangaancnaaaaaaangaagagttaaanangcaaatgcngggaacccnacgaggaggctattgccgtnctanttcacatggtgaaaanaatggcncntccgtattaatgatnatgggattcactctttgaacaaaatttntggcagctttttagttttgaaagngaaaagtttncaaaacttctcactgaggtattctgnanttttttttcactntnaaaaagggaaacctagtnagangttncatggtnaacanaacacttaatgncctnttttacattttaaanttttaanttttgtngnatagccttnaaaaattnccaagcntngggganaaaaattngggggaaaatccctttngnttttaaaaagaaaaa

SEQ ID NO: 18226 - DNA, 789 bp, Homo sapiens
  misc_feature 47, 50, 60, 62, 66, 71, 73, 74, 76, 81, 88, 90, 92, 136,140, 144, 145, 146, 147, 148, 151, 154, 155, 159, 160, 163,164, 165, 169, 175, 184, 192, 196, 202, 203, 204, 212, 630,692, 752, 758, 766, 771, 779: n = A,T,C or G
gggtgccgggccccccctcgagagtacttctagaattaattaaggcnggnggatcatctnangttnggagntnnanaccancctagcnancntgatgaaactctgtctttactaatcaactcaaaatggaataaanactnaagnnnnnccnccnncggnnggnnncctnctacangaatagctnggtgacanctgncccccnnnacaggtcntttggatataaccccgaaaacaaaggttaacaacagacaaatgagatggcatcaaactaaaaagcttctgcataacaaaagaaaaaattccaaagagacaaccctcagaatgggagaaaacatctgtaaatcatccatctgataaagagttaatatccaaaatatgtaaggaacacaagaaactcaacagcaagaaaacaaataacccaactgaaaaatgggtaaggcacttgtactgacttcaaaacttaccgaaaagctatagtaattaaaacaatattgatactgggtcaaggacagacatgtacactgatgaaacagaaacggaaccaggaaataagcccatacatataagatcaaaccatctttcaagataagtctttttcaacaaaatggtggtgggaaaatctcaatatcnatattccaaaaaaaaagaaagcttggacccaattccttacactattttgaaaaatattaatnccaaaatgggtcaaaaaccctaaactttagaagtaaaaaacctggggctggggtgccggngggctnccaccttntattncccagccncttttggggg

SEQ ID NO: 18227 - DNA, 417 bp, Homo sapiens
  misc_feature 32, 33, 36, 38, 39, 43, 46, 48, 54, 55, 57, 58, 59, 61, 62,67, 72, 73, 78, 80, 87, 88, 93, 97, 104, 114, 117, 120,121, 123, 124, 126, 131, 138, 141, 146, 150, 152, 155, 157,159, 160, 164, 165, 166, 172, 183, 190, 199, 200, 210: n = A,T,C or G
  misc_feature 239, 307, 351: n = A,T,C or G
agtacttctagaattaattaaggcgggaggcnnatntnnagtnggnanaaaganncnnnannggcantaacnnttggntntcactgnncctgngganacaaaanctacgttggnatnatnnanngngcttntaacctnggntactncagntnggntnannaggnnnaaaaanttgttccaganaacaatntgctgattnnctttttcatncccatccacttgggcttttcttggggtanagacaacaaaattgccacacacatatacacacaatgctctgaagaaaattaaggaggacacgtccacnaaaatttaccaactaaaaatttatcttggataatgaaaaggaanctaagatttctaagtattatacaggataaaactgaaagcagaagacatgaaactaacagttgtatt

SEQ ID NO: 18228 - DNA, 276 bp, Homo sapiens
  misc_feature 25, 36, 39, 218, 219, 227, 228, 229, 231, 232, 238, 239,240, 241, 242, 243, 244, 245, 252, 253, 254, 255, 257, 258,259, 260, 261, 262, 263, 264, 265: n = A,T,C or G
acaaaagctgggttccgggcccccnttcgagagtanttntagaattaattaaggcgggggggtttcaagaagtgcagccagtgagtatacatgccactgaagtcacctggctacagagggaaggacagtgtgtcgtgcgagatgccagctctggagttctcggttgttgtaggaggttgggtgttttcaaatggtaaaagatgttttgagcaaataanntttgcttnnncnnaaaaannnnnnnnaaaaaannnntnnnnnnnnnaaaaaaaaaaa

SEQ ID NO: 18229 - DNA, 277 bp, Homo sapiens
  misc_feature 248, 249, 274, 277: n = A,T,C or G
agtacttctagaattaattaaggcggggcagtcagggtgggaaggtagcatatctaagggattcagaattttctgggaggtggagacttggaatatatttatcacataattctcacagtcagtgaaatggctgattcccagaagtgaatacatatcctagtggaattataaaaggtattggttatatgtattaaatggaaccttacattagaccagtaaaaaaaaatgaaagctattgtagaacagtnnaaaaaaaaaaaaaaaaaaaaaaaanttn

SEQ ID NO: 18230 - DNA, 431 bp, Homo sapiens
  misc_feature 15: n = A,T,C or G
agtacttctagaatnaattaatacattagtgccgaaactggtgaaatctaaactaaactaactggagattagttaataaagctggagtggctatctgaataacagagaaagtatactttagaacaaaaaatattatcacagataaagagggtaatttcataaggggatcaattcacaaagaagacataatattaactgtgtgtgcactggtaacaacagagctttagaacacaaaatgatgtaactaaaaacttttgccaccaaatggaaaaatagaaaaatgcataattacagttgaagatatcatcacttctctctcaacagtctaaagcagcagtccccaacccttttggcaccagggactgatttcattgaagacaatttttccatggacaagagggcggaggagtgggaagggtagtgaggtgggt

SEQ ID NO: 18231 - DNA, 436 bp, Homo sapiens
ggtgccgggccccccctcgagagtacttctagaattaattaaggcggggtaccaactgaatctaaaatggaagttggaattttttaaaaagtgaaacaaagatgtgagaaaaagataaagggagaagaaaagagagagaagacaagaaaatacataaatatagaaatgatgcatagggccgggcatgatggtctctatctcttggcctcatgattcgccaaccttggcctccccaaagtgctgggattacaggtgtgagccaccgcgcccggcctggatgttggtattttagggagagtctagtttcgttcagaggataaggtagacctatatttaagactgttattcttttatttacttatttatttattttgagacggagtttcgctcttgttgcccaggctggagtgcaatggcacaatctcggctcattgca

SEQ ID NO: 18232 - DNA, 498 bp, Homo sapiens
  misc_feature 2, 23, 30, 31, 39, 42, 89, 101, 104, 108, 111, 112, 116,123, 124, 126, 141, 143, 144, 145, 149, 150, 158, 160, 164,168, 178, 179, 189, 190, 203, 204, 213, 222, 225, 231, 234,236, 240, 249, 261, 265, 273, 274, 373: n = A,T,C or G
anactggccgtcgttttcccccngaataannggaacccntgntgggtgccgggccccccctcgagagtacttctagaattaattaaggngggatcagaacngtnctgnttnnactngccaacnnancagacaaacctgaantnnngacnnctgcattntntgtnaagnctgtggaaanntacaaaacannaaaaatgcactgnntcccccccnggggggagnccngttttnccntncagngggatgttntccccccccatntggngaattttnnaaaaataaccctgatctttacttaaaggagttgctaaatcttgctgaaaacaataaagggaaagttgtggcaataggagaatgcggacttgattctganagatcccctcataatttccccaaagcgtaaccatgtgtgaataaattttgagctagtagggttgcagccacgagtaagtcttcccttgttattgtgtagccagaatgccgcaaaacttccatgcc

SEQ ID NO: 18233 - DNA, 293 bp, Homo sapiens
acttctagaattaattaaggcggggggggatatgtacctgaggtccagtgagtcgtgggtagatttttgtagactcctaggtatttttactggacctggacagggtactgtcagttgcaaattttatgggatcacaaaataaaaaaaaacctcaataatcaacataaacattttagtgcaatatttttaaaaatcaaaattaatttaaaaaatccgtaatgaacaaaatataaaaaattttgattgagtatccactcctgacctcaggtgatccgcccgcgtcagcctcccaa

SEQ ID NO: 18234 - DNA, 534 bp, Homo sapiens
  misc_feature 1, 2, 4, 6, 7, 8, 15, 16, 19, 20, 21, 24, 27, 29, 30, 33,35, 37, 40, 49, 52, 55, 59, 60, 62, 65, 67, 74, 75, 78,80, 83, 100, 102, 117, 119, 124, 125, 126, 136, 152, 161,172, 181, 185, 189, 191, 192, 199, 201, 203, 205, 208, 209: n = A,T,C or G
  misc_feature 210, 211, 213, 214, 216, 217, 251, 259, 272, 284, 295, 305,308, 310, 314, 317, 320, 321, 323, 329, 330, 331, 332, 334,335, 337, 338, 342, 344, 348, 349, 357, 359, 361, 364, 365,370, 459: n = A,T,C or G
nncncnnnccccgcnncgnnngtnctngnngantnantgnaacgcgggngcnggngcgnngntgngnctctgcnnccncnganaaacgcagctgcattgngntaagcttatcggtangnatacnnncttgcggctntcaggaacctggtttnttaaaatgncaaaataaaanacattatgnctgnttgnannaacttgnantncnttnnnntnntnncatcatcgctttagtggtcagtggtatgtccaanggagctgnattggaataactntcttggatcctntgtgctaccangcgaccatgntgngnggcncanctnncnatttgnnnnanntnnagtncnatannacgcgcangntntcnnggctnttaaaagcacctgtaatggcaatgaagtactacacctcaaaaataaatagtcatgaagatcttgaaaatttgacaacttacggttttcntggagaagccttggggtcaatttgttgtatagctgagggtttaattacaacaagaacggctgcttgataatttta

SEQ ID NO: 18235 - DNA, 503 bp, Homo sapiens
  misc_feature 5, 15, 18, 28, 30, 37, 39, 42, 43, 45, 50, 52, 71, 78, 119,342, 344, 345, 346, 347, 349, 352, 357, 358, 359, 360, 361,362, 363, 364, 365, 366, 367, 368, 369, 370, 371, 373, 374,375, 376, 377, 378, 379, 380, 381, 382, 383, 391, 392: n = A,T,C or G
  misc_feature 418, 440, 441, 447, 454, 456, 457, 458, 459, 461, 464, 465,466, 467, 468, 481, 482, 486, 496, 497: n = A,T,C or G
ccgtncgtttttcanccnggaaaagggntngaacttngnttnntnggccngncccttttctcgtaaagtanttagtanaaattaatttaaggcggggaaaggaaacacccttaatctanaataaaggtctgtttcagaaaccaacagtgatggcattctaaagagtcagacgccacaggcattcccattaaagtcagaaactagccaagggcaagctattattcagcagtgtcccggcactactaacccctgcaacaagccagatgaggaacataaggaagaattataattgtcattatttgtagacaataaaactgcctacctgtaaaacctaagaatcanannnnanaanaaaannnnnnnnnnnnnnnannnnnnnnnnntttttttnnaaaaaaaaaaaaaaaaaaaaaaaaanccccccccccccgggggggggnncccccnccccctntnnnngnggnnnnnccccccccccccnncggngggggttttnnaaaaaa

SEQ ID NO: 18236 - DNA, 397 bp, Homo sapiens
  misc_feature 313, 372, 384: n = A,T,C or G
agtacttctagaattaattaaggcggggggagatgtcaatcatcagcttcaacaaacataaaagaatgcttcatgtaccagtcaacagctgctgcacgaaccctcccactccagaaacccagagattttccccctcgccaagcaaggtcccacagcaaaccaagaaaaacagacacactggctgcctgcctagcaagcataggccccttccagagaagcaaaataactcttaaggtccccggcaaccgctacagcaatcgcacagatcagcaacctccaactgcatcatctcggtgagcaagtgcgcaagcantccagggcgctgacctgggcactcggcagctccaggcctggggacttctccctggagtnttaaaaagtgtntcatcacacacac

SEQ ID NO: 18237 - DNA, 657 bp, Homo sapiens
  misc_feature 533, 534, 536, 537, 538, 539, 540, 546, 548, 549, 551, 552,553, 554, 556, 558, 559, 651: n = A,T,C or G
agtacttctagaattaattaaggcgggacagtagaaattaagcagtgaatccttacaatggaatgagtctcatactctatcagctgcatgctaggtagatttaaaacatgaaataaatgcttactattggcattccttctagttaatacttcctatgagcctgttaaaaatagctgaagcattaaaatattctaagatgtgacgctccctgagaattcagtagagtcttttgtgagataggtaatagtattttattttggagcatccagaaactgaagtaattaattcatttaacaggctttatcacccagagagtctgtataggccttattattaggtctgtgatttaattacctgaacaaaaggaaagctatcatgttaatgtttatttctctgttacacaaaaacaggatgtttttcactcattctccacagaattctgtggtaaataaatcacttatctcaaaaaaaatgacatcactaacaatatgaccaaataatttttgcagatcagatttgctatactttttaannannnnnagaacnannannnnananngcggccgccacccgcgggggggagctccaattcgcccctatagtgagtccgtattaccgcgcgctcactggcccgcgtttttacaccgtcgngactgg

SEQ ID NO: 18238 - DNA, 292 bp, Homo sapiens
agtacttctagaattaattaaggcgggggcttcaggcaatacctcttagtgttgacctttggatacattatataaacttcttaaaagaaacattggaccctggtgatcctgagacaaacaatacaataagagggtatgtggaacattgatactgaaatgttttttatgatataaataattattctgatgttgataatagagctcatgaaagctaagctggaagtttaacttctattccattgttaaaaaaatgatacatgtaataaacttaagctttatgatttggaaaaaa

SEQ ID NO: 18239 - DNA, 616 bp, Homo sapiens
  misc_feature 51, 56, 61, 84, 88, 96, 100, 101, 107, 110, 111, 114, 121,124, 127, 140, 153, 156, 166, 168, 204, 207, 209, 210, 218,219, 273: n = A,T,C or G
gtgccgggccccccctcgagagtacttctagaattaattaaggcgggcgcnggggntgccncttgctcacgaaactgatgcggnagantaagctgnacannggaggnaanngtngccaggnacntgnaatgaccccatancactccactgtgntcnaccatagcananctaacaagactccatctcgaaaactaaatagggtgnccncnnatggggtnnataaatgtataaaaacctttgcctccgccctgtcttatgcccaataacaaaganaaaatattcttcaaattcccttctgtactcatgctaaggagcacagaagatatgatttaataagagcctgggaactactcagctaaacctgggttcgaccttctacttctgtcattcactagtgtgactctgagtaagatactaatttctctaggcatcagtttcctcagttataaaatggggatttatcaacttcatgaagtgctaccatgaattaaaagaattcagctgggccgtgggtggctcacactgtaatcccaacactttggaaggcccaaggcagacggactgcttgagctcacaagtttgaaaccagtctgggcaaaatggtaaaaaaaaaaaa

SEQ ID NO: 18240 - DNA, 440 bp, Homo sapiens
  misc_feature 2, 110, 231, 238, 241, 242, 243, 244, 247, 249, 261, 262,264, 265, 266, 272, 273, 278, 279, 280, 286, 291, 292, 312,324, 325, 326, 328, 335, 341, 344, 350, 357, 364, 371, 375,386, 388, 427: n = A,T,C or G
gncgggccccccctcgagagtacttctagaattaattaaggcggggagaagatagggaacactcatccctggtcgtctatcccagtgtgtgtttaacattcacagcccanaaccacagatgggtctgggagagcctggcaaggcattcctcatcaccatcgtgtttgcaaaggttaaaacaaaaacaaaaaaccacaaaaataaaaaacaaaaaaaaacaaaaaaccccangaaaaanaannnnaantnaaaaaaaaaaanngnnnccttannatgtnnnaagatnaaacnnccctgaagatcaaattgtgncccccctcactnnntngttttantaaaanctntcttantcctgancctccanaattctnccantttatgggtananagatgggaaccttatttgaatgtgttttttttttccatnatgtccaattttg

SEQ ID NO: 18241 - DNA, 649 bp, Homo sapiens
  misc_feature 17, 21, 24, 25, 39, 51, 115, 137, 139, 140, 143, 144, 150,158, 160, 162, 164, 165, 167, 168, 170, 172, 180, 204, 249,315, 318, 353, 373, 403, 407, 423, 437, 457, 458, 460, 461,473, 494, 509, 517, 546, 548, 555, 559, 574, 577, 580: n = A,T,C or G
  misc_feature 595, 596, 603, 607, 609, 610, 613, 617, 618, 620, 621, 625,634, 637, 649: n = A,T,C or G
cgcgtgcgtcttttcancccnganncaagggtaacaccnggctgggtgccnggccccccctcgtaaagtacttctagaattaattaaggcggggggttaggggctcaagtctgtnatgctgctggattttatctctngnnaannctagtnacacactntntntnntnncngnatggaatnacctcgctacccacctaccccaanagcctgcaccatgttgccaggtgcgtgggctctcctgaggcccancctggcctttccacatgaccacaagggagacagactcaccctgggccacccatcaacacattcganctntcttttggtaccataatttaatatttctagcttgnatcttatgtccctaaagaantttctttcaagtgtcttatactccctttgncctnccaacattaagcccantttactgccataanaagtgctcaatacctacccnncnnctgatacagggnaagaaggggcttacccccctngaaaaattacccccnggttttcntgaaaaatttcttaaaggaaaatttttananggaaganaaanaccttctcttttttnccngancctttaaaaaaaaannttttttncctntnnttntttnngnngggnaaattttanaangttttttttttn

SEQ ID NO: 18242 - DNA, 381 bp, Homo sapiens
  misc_feature 378: n = A,T,C or G
agtacttctagaattaattaagggggttttacgtgatgatgatgattccatcatcttgattccatcaagatccacaagatgattctgtatcttgattttggtaataggtgattacattaataatgtatacatgagataatgcatagaactatatatttacagaaatgaattcagcttttaaacatggtgaacatttaacaatgtttgtggttaacaataatgtaccaatgccacttctgtggttttgatgctgtacgtagttatataagatgtcaccatcggagaaaaatgaagtatatgtgagactttttgtgcaattttttacatcctgtgagtaataattaattcaaaaaaaaaaaaaaaaaaaaaaaaaaaaangcg

SEQ ID NO: 18243 - DNA, 274 bp, Homo sapiens
  misc_feature 124, 138, 146, 152, 159, 172, 177, 183, 184, 185, 196, 203,213, 222, 223: n = A,T,C or G
ctcgagagtacttctagaattaattaaggcggggtacagtaaggcagtgcttcccacactggacctctttcctggttctcttttgcaatacattaacagaccctttatcaacataaacaatatnccctgaatcccaantacttaanaagctnaagcaanaaaaaaaagattnaaccnaagaannnaacttagccanaaaactnatataatacnaaaaaactnnaatcgtgggtgacagaacaaaacttcaacctccaaaaaaaaaaaaaaccca

SEQ ID NO: 18244 - DNA, 436 bp, Homo sapiens
  misc_feature 5, 43, 50, 52, 57, 59, 60, 67, 68, 69, 74, 75, 82, 85, 87,88, 90, 93, 97, 99, 103, 106, 107, 115, 117, 119, 126, 127,132, 133, 141, 147, 163, 169, 196, 213, 214, 263, 266, 287,321, 351, 371: n = A,T,C or G
gtccnggccccccctcgagagtacttctagaattaattaaggngggggangnccaancnnatggttnnnttatnntcgctcnatntnncnggncatngnttcnttnntattgacntntncctagannttaannacaacccntatgcntagattcaacatttangcatantacatgcaactaagttttgaaattttnagtaaactgacaaaggnntccttttaaagtaaaaaaatcaaggaacacccaatgttaaaatataacnttngaaaaacatttcaaaaataangaagcttttaaattggcaaggtcccgaaccatcnacttgcttcaatttgaacacttaaccgcanacaagaaaatgcagcagctntcagatgccgttagtgattcaactctgaaataaaaggttcaacccataacttcttaaaaaaaaaa

SEQ ID NO: 18245 - DNA, 422 bp, Homo sapiens
  misc_feature 345: n = A,T,C or G
agtacttctagaattaattaaggcgggaacggaagcaatatttgttgcttaatgtttataagaggaagcagtgaaaacaccacacacatagtcttgaaactcaagagggtcccattaacgagataatttgggaaacattccctggtgttttggacaccaacatgtctgcttaaacaagtacttttatttttcatttagaaatcataattcaaataaatcaatgtttaaaaattgcttatgcattttgacaaattttattacgggctaagtattagatgataccaaaaaatgtactaggtgtcctaatggcattgtggttgtataagaaatgtcaatatattttanagaagctgattgaaatatgtgtgtaggagtgaagtgatgtgacatctggaacttgccatatattattttaacaaaaa

SEQ ID NO: 18246 - DNA, 378 bp, Homo sapiens
  misc_feature 25, 38, 43, 44, 48, 49, 56, 58, 63, 66, 70, 74, 89, 95, 106,113, 115, 123, 130, 133, 135, 138, 141, 145, 152, 155, 157,158, 163, 166, 178, 182, 184, 186, 192, 198, 203, 211, 220,222, 226, 233, 236, 243, 263, 267, 337: n = A,T,C or G
agtacttctagaattaattaagggnggactgatcacanactgnntgcnntgtgcgncngctcncanctgnattnccaacccttgtggangctgangcacggggatnacaaggncnggataccngcctgtncancntgnccnaacnccttctntantnnaagtncanaaattaactggncttngngntgggcncctgtnatccnacctactnaagacgctnangctngagaatngcntgaaccngggaggcccaggttgcaatnagcngacttcatgcctccagactgggcaacgagcaaaactccatcttcaaaaaaaaatatcctttttgcttganactaaatgctcattattattactaagttaatgatagttaat

SEQ ID NO: 18247 - DNA, 393 bp, Homo sapiens
gcgggaaatagctatgcctacactagagccattcacacttttgctggagctgcaataatcttctaagtcatgcttgctctcgtgagggcaatgagatggtcacaatccaaggagagttggggttttcacttttcatttctctattaagtgaaaaaagtatatgaaaattgaaaaatagatattacttatgtaatcttcacagtataatttgcttgccaagcagtcactgggatttaatcagtttctttgtctttcgtttttctcataagctgagagagtaattttgtgtgcacagaagtactgtcttcagctacatgctgcattaaacattcctagatgtgaaatgattaaatttccaagtttttaaaatgtgaaaaaaaaaaaaaaaaaaaa

SEQ ID NO: 18248 - DNA, 404 bp, Homo sapiens
agtacttctagaattaattaaggcgggttctaaacacctcagggtctgcaggacatcacatgaggggatccagtaacagtaatccagaggcaacggcagcactggcaggacttaatgggaaacaccaccaactccagaacactattctgggtttgggaggtgctttatctctttgaagatgccccatttggaagaaagcctgtgacccaggccccacacagcgcccaaaggatacactgaaggcagaacctccgcaggtgtgactggataaagtccaaatgctcatccctgtaatcgtgctccttctccaggacactcaccgcatcacactgcagggaagacagacagagtcacctttttgcttcattgcctgctgacgatgggaacacctcattcttcagaaa

SEQ ID NO: 18249 - DNA, 367 bp, Homo sapiens
  misc_feature 48, 53, 54, 64, 89, 112, 126, 129, 140, 143, 148, 161, 170,173, 204, 232, 234, 236, 240, 242, 322, 342: n = A,T,C or G
agtacttctagaattaattaaggcggggagaggaagggaaaagcttantagtnnggtgcttatnacatcaagaaattggtaaatttctnaggaaagacaggctaatggggcnctgaaatggaacanctnctttaaacgtncanccttntgaatttttcctnaaaaccaanaanttgacctctgagctgtcaggtgaccactgtntgcaaaggggatggattctcttgtcagnananggtntnctccatgaagcgagagtaggaagtgtactggaatggccaagcgggactgcttcagctgaccaggttcttttaaaccgtantcatgctttcccactaactnttaaatccttatgcttagaaaattg

SEQ ID NO: 18250 - DNA, 512 bp, Homo sapiens
  misc_feature 46, 50, 51, 52, 58, 65, 66, 72, 83, 84, 88, 92, 93, 96, 103,106, 109, 110, 113, 122, 123, 125, 127, 128, 132, 137, 138,141, 146, 147, 154, 156, 177, 185, 187, 193, 194, 195, 202,209, 213, 215, 216, 217, 220, 222, 223, 224, 225: n = A,T,C or G
  misc_feature 232, 233, 240, 242, 243, 253, 254, 256, 263, 267, 275, 287,288, 293, 294, 295, 296, 378, 390, 428, 431, 441, 445, 449,457, 462, 485, 494, 496, 499, 503: n = A,T,C or G
ccccctcgagagtacttctagaattaattaaggcgggcctggcggntacnnnctttgngataatnnatgggngaggatgaagnnggtngatnnctnaaccctngtnggnngangctccctgnncncnngatncctcnnctncactnnagactgntngattgtttctcaccctgtaanagcgcgtntnttatannnaaaaagnaaaaacnggancnnnaanannnnctgattnntgagggntnnctaaccatgnntntaatccncccntttgggcngtataaggtgtnngctcnnnngttttctttttttaagaaaaaccttgaaacctttgacactgacagatgtgtttgcaaggatacggcttcaagtattactaanttccatggtgtntctggaagtatttttaaatggccatacccaaaaatccnganagtttaaaangatncctntaaaaagntaaancaacaattttattttaaaaaaanaaacttttngnaanatgncctttcttt

SEQ ID NO: 18251 - DNA, 284 bp, Homo sapiens
  misc_feature 27, 30, 33, 36, 53, 57, 62, 63, 64, 69, 70: n = A,T,C or G
ttccacccgggaaaagaggtttgaacntgnatnctnggccggcccttttctcngtanagtannnaatannaattactttaaggcgggtctgactgaagcatgttggtgaagtccccgtgcccaaatgctgtgaaattcacaagttcatttcttctggaaatgtacccgatgcgttacagtgtcgtatatggattggcatgatgtgatgtgcctgaggaagggcagagctaccttccattctctgggtgccttccctcctcctgcacttttcagtgatgggtttc

SEQ ID NO: 18252 - DNA, 519 bp, Homo sapiens
  misc_feature 56, 58, 62, 68, 72, 77, 78, 79, 83, 85, 87, 99, 100, 104,116, 129, 134, 155, 156, 179, 186, 187, 188, 192, 202, 203,216, 219, 227, 245, 258, 277, 278, 456, 458, 469: n = A,T,C or G
tgggtgccgggccccccctcgagagtacttctagaattaattaaggcggggtcccntncggnttcatntgtnatctnnnctancntntgcatatgagannctgntggaaacctccncatcctgaatccncatantagcgaggtaagatggtaatnngcctggcccattcatttgtgttntccctcnnnaaanttcaaaaaannaaaagtaaagaanccntctcccangaggccagggaggaaaantaccttacctatngattaaactcccataaaanngacatccaacttctcagaaatcatgcaagcaagaagagaatagtgaaatatttagtgttgagagaaagaagcccaccacctagaattttatatcctgccatgttgtgttacccttccaaagttaagggaagaataaagacttactcaaagtgaaaattgagggaatttgttgcaaatncnatttgtaaganatatgtataaaagacttaaagcaacaaattgagggaatttattacaaatc

SEQ ID NO: 18253 - DNA, 421 bp, Homo sapiens
  misc_feature 1, 36, 40, 68, 172, 334, 381, 421: n = A,T,C or G
ntgatccctagagctgtgcgcaccattcccctatangggncatattctcttgcaccgtctcccaaccnagcaagagctgcttctccttgcatttggagtcgagtttttgcgagatccaggggaaaggttgctaacaaaaacacaaatgcagggaaaaacccacaacattcanagaaacaaacaaaaatctaaaatcataggagtaatattttcccaagactggttgttctcaaattttagaatatatcagaatcagctagggagattttaaaaattagaaatttcctagccccgtgcccatggattctaattcagtaggttgaagagggtttanaaacttgattctcacacagtcccaaatttaagaatcactacgcaagnagcatcctggatcactagcaaaaaaaaaaaaaaaaaaaan

SEQ ID NO: 18254 - DNA, 543 bp, Homo sapiens
  misc_feature 270, 271, 272, 273, 274, 283, 291, 296, 298, 304, 317, 319,329, 336, 342, 345, 357, 364, 365, 366, 370, 380, 426, 429,431, 433, 436, 446, 449, 456, 458, 462, 466, 468, 479, 485,491, 492, 502, 509, 513, 523: n = A,T,C or G
agtacttctagaattaattaaggcgggtgctggagtcagagaactttctctgccaggttgataagggattagagagaagagagagacaggggtgaaatcttgggctctagaacaatttttgattcaagacaccggtaaagctcagtgagtaaaaggtgtggtggctcgtgcctgtaatcctagcacctgaggtcagtagttcaagaccagcctggccaacatgatgaaaccccgtctccacaaaaaaaaaaaaaaaaaaaaaaaaaggannnnnccccccccngggggggnccccnancccccntttgggggggttntntccccccccnttggggncttttnttnaaaaattgatgncccaaannntaancttctttgtnaattgggaatttttcaaaataaaatgttctgggagatggtaaaacnaantntnganaaagcaagtncanaatgcanancttnaacntnaaaaaaagccnttttgntttttnngtttgaaaanaataacncctngttttttaanaattttcatgcccttttaaa

SEQ ID NO: 18255 - DNA, 281 bp, Homo sapiens
  misc_feature 193, 199, 200, 201, 206, 207, 209, 212, 219, 221, 225, 227,229, 234, 236, 239, 243, 248, 250, 256: n = A,T,C or G
agtacttctagaattaattaaggggggatagttttcacagtttgagtcaaaacaagttgacttcccactattaatagaacaacaaccaccacaaatccttaggaaaacaaaatagattcactacaataaagtatctgccattccatttttcaactaaaaaaaactagatgtttaaaaaaaaaaaaaaagggangggggnnntttanntnagnaaactantnccangnanccccnanggngggnttttngncccttnggggaaaaaaaaaaaaaaaaaaaaa

SEQ ID NO: 18256 - DNA, 422 bp, Homo sapiens
  misc_feature 21, 23, 52, 53, 54, 56, 80, 82, 126, 128, 142, 144, 154,174, 177, 178, 183, 186, 187, 188, 192, 196, 207, 208, 212,217, 221, 224, 231, 242, 244, 245, 249, 253, 258, 260, 264,266, 269, 280, 283, 289, 299, 315, 318, 344, 358, 363: n = A,T,C or G
  misc_feature 365, 375, 376, 383, 385: n = A,T,C or G
ggctaccgggccccccctcgnanagtacttctagaattaattaaggcggggnnngnttcaagaagcctaagtctagaacntnccgagccacccctgtgctctaggcatcccaggctatctcctgcnangaacgtaaatgtgngntgccctaacngggtggggaataccgaatcnganngcttntgnnnattncacngtatgacttanntgcnctaanattngcncttaaanctgacattttngnntaanaatncactntnaaantnatnaaatctataanctnatttgnttcttaaaanaacattaaattgcctnctntcaaatctaccactgtatgagtgggncccccccaccctgnggggncnccatatgccnnaatatgngntcaaataaaccccccctattgggcaaaaaaaaaaaaa

SEQ ID NO: 18257 - DNA, 542 bp, Homo sapiens
  misc_feature 465: n = A,T,C or G
agtacttctagaattaattaaggcgggcagattggagaagaagaaataaatctgttttcattcataggttatataattatctatatggaaatccctacatatttacccccaaaagctactggaaactaataaatgggtttagcaagactagaatataaagtcaatgtacaaaaggcaattgtattcctatgtaccagcaatgaataactaaataggaaactagaatttttaaataaaattaaatgtttaaaaaacatttacaatagcaacatatgaagcacttagatattaatttaataaaatatatgcaggatatgtcatgttcatgggttggaaaagattcttgttagtgcatcaattgtccccagttttatctataaattcaatgctattctaatcaatatcttagcaatcagatattgatcaaataattctaaaatctatgcagaaaggcaaaggaactanaatggtcaaaacactatgaaaaagaacagagttggtaggactctcgttacctaatttattccccgctggccccaatt

SEQ ID NO: 18258 - DNA, 765 bp, Homo sapiens
  misc_feature 531, 583, 586, 592, 613, 622, 631, 642, 650, 674, 676, 686,687, 689, 722, 723, 730: n = A,T,C or G
agtacttctagaattaattaaggcggggggtgacatcgtgggagactgtgtttcctgcttcaaagaaccagatcagagttcagaggcgctcactcaagcctggcgttctgagctgcagtcaggaagcataacgcaactctactgctggtgacccagctggtttaacaaatggggggaaatgttttctcaaaaatgcagcatggttaaacagcagtgtctgaggattcaagaagtctcccagagaataaaatctcatcagtgctgagttacctaaattactaaaaccagcctgaaacacttttggttattccaataatattttcctttggaaaatgaaagacactgatcacatgaaataacattcatacccgctcccaattgtgatctctctgtggatagatttcattttcattcattaataaatttatttcctggatttatacttatcaagtcttccagcaaatgtgaatattaaaatatatatttctaaatgcttaatacttaatattcttggagcttaccatgtcaaangtaaaatgctagctttttttttttaacaatgaaaaaactgcaaaacaattcnttnttggtnaaccctttccaaccagcttantcccaaacncttaaaaanaaatttttaancaagcccnaatttggaatctcaattcaaattntnaaccctgganntnaaacccctagggcaaagttaggcaacccttatnntgcgggnggaagtttccctttttaaaaaaaaaaaaaaaaaaa

SEQ ID NO: 18259 - DNA, 309 bp, Homo sapiens
  misc_feature 110, 113, 114, 162, 173, 174, 175, 176, 190, 204, 223, 225: n = A,T,C or G
agtacttctagaattaattaaggcggggcggtgatgtaaagggtgatggtagatgtggccactgtggatttttcgcaagaacattaataaactaaaaacttcatgtgaanaannaaaaaaaaaaaaacaaactaaggaaaaaaaaaaactaaagacaaaatntacaaacttannnnacccccggaggatngaaccacccatccnccatgaaaatattgtcaananccccccatagaaaatgaaaaacaagctaagacaagtattggagaagtatagaagatagaaaaatataaagccaaaaattggaaa

SEQ ID NO: 18260 - DNA, 419 bp, Homo sapiens
  misc_feature 20, 31, 34, 48, 49, 50, 55, 62, 63, 65, 66, 68, 70, 75, 81,83, 85, 87, 88, 90, 91, 95, 98, 99, 100, 128, 138, 150,152, 153, 154, 156, 162, 163, 172, 176, 180, 193, 205, 211,218, 231, 377, 386, 395, 398, 400, 419: n = A,T,C or G
attaattaaggcgggggccncttgtacaagnaantaaatgagggcggnnntggangcgtctnngnntncntgttntggatntntntnngnntgantannnactatctctgttgctcacagaacccaanccccaacccnaaaatactggcncnnncngcgtgnntgggggcanggangaanggtgtgtgatgtnccacccccccangggatngaaggtnctccccaaggcanatgtcaggaaactcaagtgcctttaggcacagcaggcaacataaatgtcctggggggtaagatgatcaaaggcaggctgggtctgggggtaatcccagtgctctaggtggacattgcttgaggccagtggtaaaagaccagcctangcaacatancaagacctnatntntaaaaaaattaaaaaaatn

SEQ ID NO: 18261 - DNA, 452 bp, Homo sapiens
agtacttctagaattaattaaggcggggtaagatttgccgagttccttttactttttttaacctttccttatgagcatgcctgggcaacatagtgagacccctatctctacaaaaaataaaaaaaaaattagccaggcatgattctgcttgtctatagtcctaactacttgggaagctaagctgggaggatgcttgagcccaggggtttgagactgcagtgagttataatcatgccactgcattggctctttggaaaaaaaaaaaaaaagagagagagagagaactgttatttacagtttggtcaggtccctcttttgtgcttcataactgctcaaacagtaagtttgaataagctcattcagatatgaggtgtggttgatttgggtaacatgaaacttttaagggagatacaggatttaaaatggctttttatgtaatataaacatttatt

SEQ ID NO: 18262 - DNA, 355 bp, Homo sapiens
  misc_feature 333, 343, 344, 347, 349: n = A,T,C or G
agtacttctagaattaattaaggcgggggggaggccagtcattaggagatatacctaatgtaaatgacgagttaatgggtgcagcacaccaacatggcacatgtatacatatgtaacaaacctgcacgttgtgcacatgtaccctagaacttaaagtataataataataatacgaatttcatcattctgaatagctcaaaatgttcctctaagtctcgatagtagcaatagatcacagaactaaactgagttgcctgattgttgtgtatcaataatgagtatgctagtggggctttggatcattaaaaaaaataattaaataaagcgaagaanaaaaaaaatnnaananaaaaaa

SEQ ID NO: 18263 - DNA, 799 bp, Homo sapiens
  misc_feature 375, 390, 396, 397, 403, 413, 422, 423, 425, 426, 427, 433,434, 435, 436, 437, 438, 439, 441, 444, 445, 451, 456, 463,468, 474, 480, 488, 494, 496, 499, 502, 516, 517, 521, 526,532, 534, 541, 544, 547, 548, 556, 558, 559, 560, 561: n = A,T,C or G
  misc_feature 570, 585, 590, 593, 597, 605, 632, 650, 653, 666, 673, 675,687, 688, 700, 701, 704, 705, 711, 712, 719, 722, 733, 737,760, 768, 770, 772, 773, 775: n = A,T,C or G
agtacttctagaattaattaaggcgggggtagaaagtttattcaaaggaataataacagagaacttcccaaacctagggaaagatatcaatattcaagtacaagaaggttatagaacaccaaggagatataacccaaagcacacctgaaaataccagtaacaagtaagaagatcaaagctgtaataaaaaaaagtctctcagcaaagaaaaccttaggacctgatggcttcttctgaattttgcaaacatttaaggaagaactatagcaatcctactcaaactattctgacaaatagagtatttgggaatatttccagactcattgtatgaggacagtattaccctgataccaaaaccagacaaaggcttattanaaaaaaaaaaaaaangaaacnntccggnccattttccntaaaaaaanngnnncaaaannnnnnnanaanntcttcncaacntaatttnccccncttttnaaaagntttttttnttttgncnaanggnaatttttcccgggnntccnagggntttttnanaatttcnacnttnntttttgcnannnntttggcatnttgggtggggattgncaaanccntttnttgggggnaaacttttttttttccccgaattgggngggcccaaaccccctttnggnttttttttaaagnggggggncnggaaaaaaaggnnttttttaaaaannccnnaccttnnttttttntanaaaaaaatttnccanaaaaaccggggcccctaaaaaanggggaacncncnncnccctttaaaaaaaaaaaaaaaaaa

SEQ ID NO: 18264 - DNA, 283 bp, Homo sapiens
  misc_feature 157, 165, 172, 175, 176, 179, 181, 184, 185, 186, 188, 189,190, 193, 198, 202, 203, 214, 215, 218, 220, 221, 225, 230,231, 235, 242, 246, 251, 271, 283: n = A,T,C or G
agtacttctagaattaattaaggcggggacagccagggttgatctggccccgagggttttggatgtttttaggatgacataaaaggcaagtgttttccccaaaaaaaaaaaaaaaaaaaaaaaaaaaaaaaaaaaaaaaaaaaaaaaaaatgggggncccccccnggggggnccnntantnccnnntnnnaanggggntttnnccccccccctnnttngnncatntaaannaaancttgcantganccaanatcgcaccactgcactccancctgggcaacan

SEQ ID NO: 18265 - DNA, 435 bp, Homo sapiens
agtacttctagaattaattaaggcgggagtgtatgaaaaatacatagtaaggatgcctaaggagagtgcagaagcccagcactgagcgtcctggaaagacttcaaataaatctgcacattcaacataaaaaataaaacaaaaatagacagcttttctccagttccatagtcacctgtgagagactgatgaaggctaggagacattcattaaagagtgagaatcattttctgggttccttcagtggttaatctttcactttttggcagtttctaagttcataacagtttttatgtctatgaaatcaattacctcagtctgcaagtccccgtgcacttattgtgaaatataatgaaagcgttgataaaggtgtgcagagaagatgaatacatctggtgaaatacaaatctagagaaataggttggtgaactcctcca

SEQ ID NO: 18266 - DNA, 587 bp, Homo sapiens
  misc_feature 503: n = A,T,C or G
agtacttctagaattaattaagctcatgaatacagatgtaaaactcttatattgttgacgtgatatagaacttaggctgcagctcagttttggcattttttcatgttgagaatttttgctctaaatttacttaacatttagattttaatttacttaaaatttacataaaattggatttcccttctagagggtctggttgcagtttacataggtcttttgcccctgttgtgcctgttgtctaaaatgttcttccctatctgtaaatcccaccttaattaaggcggggactgatgcctggcaatatggtgagagactggacttggagatgacggtataacttaggagtaaagagcctgaggtctagagccagattgcctggctcagccacttactagccatatgaatttggtaagttacttattctttgtatgctttattttcgttatttgtaaagtatggataatattgcctaccttgtagggcaagtttgatgattaaattangttaatataggtaaaatgctttaggaattagtacctgggcatgtgcaattaactagactacagacctttactcaaatttgggtt

SEQ ID NO: 18267 - DNA, 429 bp, Homo sapiens
  misc_feature 28, 30, 33, 40, 41, 42, 43, 44, 49, 54, 66, 68, 69, 77, 78,80, 87, 88, 89, 90, 100, 102, 103, 109, 110, 112, 114, 115,116, 119, 120, 124, 140, 141, 143, 149, 150, 153, 154, 156,157, 159, 169, 178, 183, 184, 186, 187, 191, 224, 228: n = A,T,C or G
  misc_feature 234, 237, 238, 245, 246, 249, 254, 260, 271, 293, 299, 318,334, 335, 337: n = A,T,C or G
agtacttctagaattaattaaggcgggngnatnacaacgnnnnnaaatncttancattaccattcntnncgaaaaanncnttatttnnnncaaccacaangnnttgaanncncnnntannctgncctctgtattccgacnnantgtggnnagnnanngnctgattaaangttttgccnagaanncnnatcntgctgtgagaaaactagccactcacatgcactnaatnctgtgncanncaccaannctnccttnactaancctggattcangttccaagtcttcgttcccccnactatntttaccactacacaattancctaaaagaaaggcanncngcctgtctctttattaacttttgattaggttgttaagcatataattaaggggagaattcctatatgcaggtccaaggagttgcttgttttct

SEQ ID NO: 18268 - DNA, 397 bp, Homo sapiens
  misc_feature 22, 23, 385: n = A,T,C or G
tgggtaccgggccccccctcgnnagtacttctagaattaattaaggcgggcgcctgtagtcccagctactcgggaggctgaggcaggagaatggcgtgaaccctaaagaaatgtaaacaaggagataatggaaagctagactgctggtatctttctttagctgtgggcacagaagcccaagagggacacctaggcacctgaaatgagaattcctggggtgatgccagcctccctgtgtgggcctcaggtatggcagccacagggcatccaccctgacccaatgacgctgcacaagactgatgagctcacatcagacagattgaccctgtccacctgttcctggttcataaatccttctctctcccctctaccccctctagagcanaaaaaaaaaaaa

SEQ ID NO: 18269 - DNA, 395 bp, Homo sapiens
  misc_feature 22, 40, 41, 45, 50, 58, 63, 65, 68, 70, 75, 114, 296, 359,374, 393: n = A,T,C or G
agtacttctagaattaattaangcgggggaggaagggaanngctncatantaaatttnttttntnttntngagancggtaaatttctgaggaaagacaggctaatggggcactnaaatggaacaactcctttaaacgtgcagccttttgaatttttcctcaaaaccaagaagttgacctctgagctgtcaggtgaccactgtgtgcaaaggggatggattctcttgtcagtagacggtcttctccatgaagcgagagtaggaagtgtactggaatggccaagcgggactgcttcanctgaccaggttcttttaaaccgtagtcatgctttcccactaactcttaaatccttatacttanaaaattgaggataangctgggcacagtggctcangc

SEQ ID NO: 18270 - DNA, 429 bp, Homo sapiens
agtacttctagaattaattaaggcgggggagaatgttttcatgttacttatactaacattagttcttctcaaaagggatgaaattttggacatggtgatatttcagagaacagacatgattatagagtccagtgtatcattttctcccatgtcactccactcagagatcttttagcatagcccagtactctgtttcaataaagtagaagaaatggaaagacagaaagggcaagatttaaaatgacagtaagttctccatactttcatagttaagatacaaagggaggtattatcaaagagaaacactgggccggcgtggtggctcatgcctgtaatcccaaaactttgggaggccgaagtgggtggatcacctgaggtcaggagttggagaccagcctggccaacatagttgaaaccccatctctacta

SEQ ID NO: 18271 - DNA, 577 bp, Homo sapiens
  misc_feature 316, 383, 395, 412, 421, 429, 452, 464, 471, 473, 485, 489,495, 500, 504, 506, 527, 538, 554: n = A,T,C or G
gtacttctagaattaattaaggcgggcatgtttaaacctctcaataaactaggcatttaaggaataaaccttaaaataataagagccatctatgagaaacccattgccaacatcatgctgaatgggcaaaagctggaagcattccccttgagaactggaacaagacaggatgcccactctcaccactcctatttgatatagcactgcaagtcctagccagagcaatcaggcaggagaaagaaatgagaggcctccacataggaagagaggaagtcagactatctctgtttgcaaacaatgtgattctacaccctangaaacgccatagtctctggcccaaagctcctagatctggttaaacactttagccaaggtttaagganccaaattcatgnaccaaatttcattgccntttttttcncccaccancttcaactggaggccaatttagnaaacaattccgntccaatngncccaaaaaggantacnttcctnggaancccncntcccaggaaggggaaaaggcncttcaccagangtttttaaaaccgggnggaaaaaaaaaaaaaaaaaaaaa

SEQ ID NO: 18272 - DNA, 421 bp, Homo sapiens
agtacttctagaattaattaagggggatgagggtggaggtggggatcattcctaagcaataggatcaaaaggagataagctaagaaagtacatcaaggagatatggaataggaatggtaatgttggtctcatcacaaccctacatgtttctaggctggaatacatatacccgtagcaaagcaaaggcaaagatgtaggtagcccagcattatcaaatacagtaggcactagcttcatgtggcaatttaaatttaaaccaatccaaataaaattttaatttcttgtttgcattagcaatatttctgtgcttattagccacatgtggctactggacagcagaaatatagaacatttccatcactgcagaaggttctattggacagcaatgctttagtagaaaaccgttgaatctattaaaagc

SEQ ID NO: 18273 - DNA, 414 bp, Homo sapiens
agtacttctagaattaattaagggcgggggaaagttagtagaatgtgccaccatttttctagaagagacatgaatatttatgttgaatgcatgaaattgctgtttttttaggttaaaaggcagtgaaatatctaaaatttgatgtggttttgtctaatgtatatgtattagcctatatattttaaggaaaaagactaaatttgtaaataatattttcaagacagaatgacatatatgccagatttgcctggaaaagttccagtttattcttctcttcaaagtgcaattattaatagaaccccttttcacttttgaaaatgtctcaatgtagaccaaagttatatggtcatttggaggatagggagaaaaaggtggagaggaccggtggaaatgaagaaataaaagtgtgaagag

SEQ ID NO: 18274 - DNA, 430 bp, Homo sapiens
  misc_feature 8, 22, 120, 121, 151, 161, 164, 167, 174, 180, 182, 185,190, 191, 199, 201, 206, 209, 210, 211, 214, 217, 219, 225,226, 229, 231, 238, 242, 247, 248, 251, 252, 260, 262, 263,264, 267, 272, 273, 278, 283, 285, 290, 291, 292, 298: n = A,T,C or G
  misc_feature 301, 308, 310, 314, 330, 344, 350, 351, 367, 369, 370, 371,375, 377, 378, 379, 383, 387, 388, 389, 390, 391, 405, 407,408, 409, 410, 414: n = A,T,C or G
agtacttntagaattaattaangcgggaaccttgggttgagtaatgctcgtctgtgtgttttagtttcatcacctgttatctgtgtttgctgaggagagtggaacagaaggggtggagtnntgtataaataaagtttctttgtctctttanaaaaaaattnatnaanccaaaangcgggncnttntaaanncaaaaaancngccanttnnntcnatncngggcgnnggngnaaaaatncatntaaannaanncccccccncnnnaanggggnnccccnaaaangnaaaannnttttcnccnccccccngntttnttttttttaaaaaagntttttttaaaaaanaaaaanntttttttttttaaaantnnnaaangnnntggnacannnnntgaccctttttttnannnnaaantttttttaaaaaaaaa

SEQ ID NO: 18275 - DNA, 248 bp, Homo sapiens
  misc_feature 82, 105, 109, 111, 112, 113, 123, 140, 144, 145, 146, 147,148, 149, 151, 153, 155, 156, 158, 170, 171, 173, 174, 175,176, 179, 181, 182, 184, 185, 195: n = A,T,C or G
agtacttctagaattaattaagggcggggctgagtaaatgccggcttaccatctctaccatcatccggtttagtcatcccanaaaaaaaaaaaaaaaaaaaaaanaaangnnncccccccccngggggggaccccattancccnnnnnnanancnntnttgccccccccnncnnnngtntnntnnaaaggacatnctgcacatcctgcacatgtacccctgaacttaaaagatgaaaaaaaaaaaaaa

SEQ ID NO: 18276 - DNA, 339 bp, Homo sapiens
  misc_feature 16, 27, 28, 44, 61, 66, 69, 71, 72, 110, 113: n = A,T,C or G
tccagagtacttctanactgggggaanngagggggatcgtggcnataatattttttttttnttttngcncnngctttttgtgaattcttcgataatggcccatttgggcnaanatccggttagcgggggcaggcctcctagggagaggagggtggatggaattaagggtgttagtcatgttagcttgtctcgggtatgctgttgtgaaattgaaactgtaaaagtagatggttgaaagtactggtatgttgctctgtatggtaagaactaattctgttcgtcatgtacataattactaatcacttttcttcccctttcagcacaaataaagtttgagtt

SEQ ID NO: 18277 - DNA, 390 bp, Homo sapiens
agtacttctagaattaattaaggcgggaagcatggtttaaataagtgtgggtgacgtactttctctacactgggtgtcggtggtgtgggtgaggagaggactaaggcttccattaaagctggcaactctcttatgtaagagaatctagtagagtgcaacgctcgtaggccattttacctttttgttcctttgcttttcagctttaatttttacaatttcagtttctctaataagtcaaaatgtaatttgataaaccaattttttaatgctgttaatgaagctccattttggttctgatgcttggtaattcagacaaatcaaacagtactgctatttgaggcagtattaaagaatgaggagtgtttgccattctttttttttttttttttt

SEQ ID NO: 18278 - DNA, 335 bp, Homo sapiens
  misc_feature 292: n = A,T,C or G
agtacttctagaattaattaaggcggggaaacacgcctggccactgacctctgtcgtctctgtgaagggaaacacgcctggccactgacctctgtcatctccactctgggtgtccgttagaacagacagcacagccctacgaagggagtgtgagctgctttagggactggggcccagctcctctccgtacagtgatggacagacagtgtcatagactggagaggaaattcgattttctccttagtttaagaaaaaaaaggccgggtgtggtggcttacgcctgtaatctcancacttttggaggcccgaggtgggtggattgcttgaggtcagga

SEQ ID NO: 18279 - DNA, 310 bp, Homo sapiens
  misc_feature 58, 108, 117, 119, 120, 124, 125, 128, 146, 149, 150, 151,160, 164, 167, 169, 170, 176, 184, 188, 189, 190, 191, 195,196, 197, 208, 209, 211, 213, 214, 216, 220, 228: n = A,T,C or G
agtacttctagaattaattaaggcgggggttgaaagttgttatctttaaatacatgtncaaatcgttgtcaaaagtaacgttattaaaatagatttattatccctganaaaaaaaanannaaannagnataaaaaaaaaaaaaaanggnnnccccccccncggnggncnncctccnacccctanatgnnnngatnnnacccccccccnngngnncntttnctcaattngatccaataactttgaccaacggaacaagttaccctagggataacagcgcaatcctattctaagagtccatatcaacaatag

SEQ ID NO: 18280 - DNA, 564 bp, Homo sapiens
  misc_feature 199, 324, 480, 510: n = A,T,C or G
agtacttctagaattaattaaggcggggatacggttttaggaattaatgctttgaaaactgagcctcagccaatcaccttaatttcctgaagtgataatctgtggtacatttaaaatttgaaaagtaattctttcagggtgttacatgattattgctctggtttgatgggtttaggttcgaggtacctataaactttantaccttgacaatcagttagtgaaggcattaattggttggtagagcagctcatttaatttcttataccatattctcagaattatttagaattactagagtaataactgtaaatcaatttttagcanactgaataggtcatttagtgatgtgctttggtggtgaagtgttaaaatccttatccgacccccttaataatgattattgactgagttttattattaataacaattaggtcattgaacattctgattttccttttttcttacagatgaaccaactanccctagcattgatcatgatattgcacatanccctgcctctgctgttatatcaacctctacctcttcaggtcccctccttccaac

SEQ ID NO: 18281 - DNA, 322 bp, Homo sapiens
  misc_feature 20, 21, 22, 58, 79, 272, 306, 307, 308, 317: n = A,T,C or G
gtgccgggccccccctcgtnnntacttctagaaattaattaagggggtgggtaaaagnaaactcttaaaaagcacaggnaaatttgaaactggttaatgccagtgacaattgatgaaaatttaaagcatatggatgattcccttgcatcatcaaaaatagaggtgagattgcacaatttaagtagatcttgatcttgctctgaaagcagacagcactgccctgcatatcacaaatacactcccaatggacagaacatatatctgtccagtcngaaaaaaaaaaaaaaaaaaaaaaaaaaaaggggnnnccccccccnggggg

SEQ ID NO: 18282 - DNA, 388 bp, Homo sapiens
agtacttctagaattaattaaggcgggagctgtctgcagtaaatggggcatccgtctcacatcaatgggaaaattaatccatgtagattttggatctaaatgtgactgtcataacagtagagctgtgtgaaaataatagaatagaatatctcagctcaggaagggattgctgcatttgactgaattaaaatcaagaacttctgtacatcagaagacatcagaagtgaaaagaacaagctaccgagggaaagttacttgcaacatatttaaatgcagaaaaacatatatctagaatacagaattatcccagaattgcacttttagcagtaagggaacgggagcagcgttccagcctcagtttctatttataatggtgacatggaaaaaa

SEQ ID NO: 18283 - DNA, 217 bp, Homo sapiens
  misc_feature 18: n = A,T,C or G
aattaattaaggcgggtngaccttgcatttctaatcttctgctcatttcacatgttcggtttcatgtttaactttaaacaattcaatgtttgcattattcctaacagatccagaaatgacgctgtctgggtcaacatttcagggaggagtctgccaccagtgtaatgtatcaataaacttcatgcaagcatactaaaaaaaaaaaaaaaaaaaaaaa

SEQ ID NO: 18284 - DNA, 312 bp, Homo sapiens
  misc_feature 247, 292: n = A,T,C or G
agtacttctagaattaattaaggcgggtgcttaataaataacgttgaagaaatttcagttacaaagtatgtcttctgaacaaaactattgatttgtttcatttctttaactccattgccttaggaaatgtttgcgatgtggacgggagaaggtggagtgtttcatgggctaacttttctattttattacactgtgttctttcttaatggctcgactcactagataataaaagtagaactagattcanaaaaaaaaaaaaaaaaaaaaaaaaaaaaaaaaaaaaaaaaaaaanaaaaaaaaaaaaaaaaaaaa

SEQ ID NO: 18285 - DNA, 294 bp, Homo sapiens
agtacttctagaattaattaaggcgggtgggaaggttgtgttgcttcatgaaatatcaaggtagccagtgtctctgagaaggatgtaacctctagtatcttagattttttataacattattctgtttgaaagtctttaaagcagaagttacgtcatcccctagggcccagctgttccacagatatgttggatttgactatacgatgttaagaattttaaaaatttattgccagcatttaaaagtcaatagaactcacttgaattccagatttctggcatctctgaaaaaaaaaa

SEQ ID NO: 18286 - DNA, 476 bp, Homo sapiens
  misc_feature 249, 258, 270, 272, 275, 276, 277, 292, 293, 294, 295, 297,299, 310, 311, 313, 314, 316, 317, 323, 335, 338, 339, 340,342, 347, 348, 353, 386, 397, 417, 433, 436, 439, 442, 457,459: n = A,T,C or G
agtacttctagaattaattaaggcggggtaagctctacagcacatatataatctgtggctgtgcttgcactaataagcgagcattccaactctcaggccagggcctcttccacaataccaaacattaggggacctgtgtactaactagttctcttatatatacccatcatttaaccagtctgcacctcagctactgatcagcaactctgtgctaagtcacaatgacttctctatctcaaaaaggaaaanaaaaaaaanaaaaaaaaaaananggnnncccccccgggggggnnnncnanttccccctttnngnngnntttttncccccccctttnggnnngnttttnnaaaanatgctggattccgtttaaagaagacattattanagcaggaagtncaagcatttaaaatatgtanttcccatatatttcanggnctntgngtattaaactaactnanatgttttgaaagctttt

SEQ ID NO: 18287 - DNA, 540 bp, Homo sapiens
  misc_feature 30, 31, 32, 35, 37, 43, 49, 52, 55, 57, 69, 76, 80, 81, 82,87, 90, 92, 96, 103, 105, 108, 114, 116, 120, 123, 137,139, 142, 145, 152, 153, 158, 161, 162, 168, 177, 180, 188,192, 194, 197, 199, 200, 203, 229, 240, 242, 254, 259: n = A,T,C or G
  misc_feature 265, 268, 279, 282, 296, 297, 301, 304, 307, 308, 309, 311,313, 319, 320, 324, 325, 326, 327, 329, 336, 347, 350, 351,355, 357, 364, 393, 405, 418, 450, 462, 513, 534: n = A,T,C or G
agtacttctagaattaattaaggcgggggnnnctncngaagtnaataantgnggncnctcctgacccgnatggacnaccnnnatatntantnatangggtaangnatnaaggcnangctntgnctggtcccgcctgnantcncanctactcnngaagntgnngcaagngaatcactngancccaagangcanangtngnngtnagccgaaataacccccttgcactccntcctggacaanangagcgagacttngtctngaaccnaanaaggcctaaangcnaattgtcatgggcnntgcnccngcnnnancntttcanntgcnnnntntaggggnggaaattgacnctnnccantnacagaantttgaaattgctaaagaaggcctatgaancctccctttcanaaaattaaggaanggccatgaaatagaaaagaaatcgcttggaanatttactttttntgagaagccagggaatcgcttagagaagcaaatcaatgatctgaaagagtngaaaaatgatgccttttaaantgaaaa

SEQ ID NO: 18288 - DNA, 485 bp, Homo sapiens
agtacttctagaattaattaaggcgggcacctacagccgcagctacttggagggctgagtggatctcttgagcctaggagttcacatccagggcttttcacaagaatattgaccaaatcttctggtagcacacttcaacaagatgtcccggttatcttattgtagcaaatacaatgaatgattagttactagtttttcccattgagtttctagtacttaacactgcacgaggcacatggacaactatttgttgagtgagtgaatgggagttcactgctgcagtaaagatctgcctttatacatgaaatgttaattccaggtagactttgctaagcgaaggatgcataacctaattccctagagcaaccactaaaaacaaaaatgtagctaaaaagccaatagcagatataaagtaggattctagatgctttcttaaattcatgaaacagcagaaaagggcagggtgggggaaagaaaaaatggga

SEQ ID NO: 18289 - DNA, 549 bp, Homo sapiens
  misc_feature 122, 137, 171, 178, 184, 185, 186, 187, 189, 193, 205, 211,212, 230, 235, 249, 258, 269, 277, 278, 281, 285, 301, 326,344, 359, 367, 368, 371, 384, 386, 395, 400, 404, 432, 439,463, 468, 474, 477, 484, 485, 498, 505, 507, 524, 525: n = A,T,C or G
  misc_feature 526, 533: n = A,T,C or G
aagtacttctagaattaattaaggcgggagaatcgcttgaaccccgggaggtggaggttgcagtgagtcgagattgcaccactacactccagcctggacaacagagtgagaccctgtctcanaaaaaaaaaaaaagnaaaaaaaaatttttttttaaaaaaaaaaaattangggaccntttttnnnntncccntcaaaacttttnttttcnnaaggtgggccttttttanttgtnggaggtttcaattnaaaggcctnccccccccttnaaaaaatnnttntttntttttgacaggggggngggattttacctgaatgctttgaanccccttttaatcccttgnggccaaaaaatgganaaaccccnnccntttttttcctggnanttttccccnaaaantaanaaatttttttttttcccctttttttaanggggggncccttcttttttttggcccaaaanccccncccccnctnttttttnnaaaaaaaattttnccccctncntttaaaaaaaaaattcnnnaatttcnaaaaaaaaaaaaaaaa

SEQ ID NO: 18290 - DNA, 461 bp, Homo sapiens
  misc_feature 13, 342, 354, 383, 388, 389, 390, 397, 404, 411, 414, 417,425, 427, 431: n = A,T,C or G
aagtacttctagnaattaattaaggcggggcggtgaagctggagtgtggggagcagggaagacctgtagcaggaaaggagaagtgtcggcggtgagcagccagagatgtaaatgagcagctgcagagtttatttaataggccacagataagggctgggcacggtgggtcacacctgtaatcctaacactttgggaggctgaggtgggtggatcacccgcagtcaggagttcaagaccagcctggccaacatggtgaaaccccatcttttcccaaaaaacaaacaaaaaaactggccccctgtgctggcccgtgccctgtggtccccacttcttcggaagctnaagccagaagancttaagttgggaacctccaccagcttttnattgnnncccttgntttccancctgggnggnaantgagactntntttnacccccccccaaaaaaaaaaaaaaaaaaaa

SEQ ID NO: 18291 - DNA, 544 bp, Homo sapiens
agtacttctagaattaattaaggcgggaaaagatgcatgtggataaaatcagaatcatcccatcagataatatctgctatcatttctatagtatttaacattgaaatgtcaggtagtgttctcagtagtctaagtattccacacacattaaatcagttagccccatttaatcagtatttccaatctataattatcccaattttacagatgaggaaactgaggcacacagaagttaaggtgataacactgtaactagctgagctgggattcaaaagtaggtaatctagttccagagtctgtattaggagaacttcgtcctgaggttactctatatttttagattaaataatttcattcttagaggttgggaaaccgctaatatttgttagatttgtagctgataagagaatgtaaaaagagaagataattcacaaaaatcattatcccttaatattaaaaagactggaagccagacacagctgggacacatgcctatagtcccagcaactcaggaggctaaggcaggaggattgcttgagcccag

SEQ ID NO: 18292 - DNA, 671 bp, Homo sapiens
  misc_feature 368, 371, 376, 387, 394, 402, 440, 458, 479, 484, 493, 518,536, 565, 575, 585, 593, 597, 598, 609, 611, 615, 618, 631,637, 641, 653, 660: n = A,T,C or G
agtacttctagaattaattaaggcggggggcagagcccggggcggcggcgctgttcaacctcgggctgctccacgcaggtgactgccaacagccagcccaatgtcgaatccagaaatgcaccacggacttcgtgtccctgacttctcacctgaactctgccgttgacggctttgactctgagttttgcaaggccttgcgtgcctatgctggctgcacccagcgaacttcaaaagcctgccgtggcaacctggtataccattctgccgtgttgggtatcagtgacctcatgagccagaggaattgttccaaggatggacccacatcctttaccaaccccgaagtgacccatgatccttgcaactataanaanccacncttggagccanggaacanaggaaaanggggaccagaaccccttcccaagttacctttttttgtnggctttggttgggagatncctcaccttaagaaactttcnaaggnataactttncaaaacattgcaaaaggttagaaangggggcctgggccacctnattaagaaaaataaattaatctttttaanttcaaaaggngacaaaacgntaccctgngggnnccccttggganancaantgnctaattgggttanaaaaanaaanggcaaggatttnacccttntttttttttcc

SEQ ID NO: 18293 - DNA, 327 bp, Homo sapiens
  misc_feature 19, 21: n = A,T,C or G
tgaccgggccccccctcgngnagtacttctagaaattaattaaggcggggggctttaaagaaacaaagaaatgcattgtaaaaatgtagttttagagcaaattaataatgatggtggggaaagtgttgctaatttgtttatttccctggaagaaatgggaagtgtgataagcagtttaatttttaaggagctggtctcaattttagtactttttaattatgcaaataaatcaatgtttccttaaattttgtcattgctttgtcacagttgtctagggttcatatccaaccttctgtggcaattcaattttatatagtcttttaagag

SEQ ID NO: 18294 - DNA, 317 bp, Homo sapiens
agtacttctagaattaattaaggcgggtaaccctaaagctgtagccagccaggcagaggtgagggtggctaggggacacatcaagacttgtggctggcatctgaggtgggagcagtagtatgggagggagccccttaacctagggggtctgtgctaagtgggtagtatcaaaacttgaactggggccaggcgcagtggctcacgcctgtaatcccagcactttgggaggctgaggcggtggatcacgaggtcaggagatggagagcatcctggctaacacggtgaaaccctgtctctattaaaaaaaaaaaaaaaaa

SEQ ID NO: 18295 - DNA, 362 bp, Homo sapiens
  misc_feature 1, 9, 17, 29, 34, 42, 43, 44, 101, 127, 131, 136, 137, 142,146, 148, 149, 150, 163, 165, 166, 167, 168, 192, 198, 199,201, 203, 205, 206, 207, 212, 215, 216, 217, 222, 226, 228,229, 230, 237: n = A,T,C or G
ngagtactnctagaatnaattaaggcggngacancaaacatnnntaacaaaatgatgtacaaactaaggactatttattgataatgttttgctactcttgncagacaatggctataaactgaattangcantctannaaaanaaanannnaaaaaaaaaaatngnnnncccccccccggggggaaccccacncccccnnantntnnngtttnaannnccccnctgntnnntgttttnaaaaacaagagtctcaaaggctgtgggtaagctgaaggcttgcctccctgacagatgcttaaactacaggcttcttgggacaggtggccccttcctaagctcacaggagtggccaccactcttga

SEQ ID NO: 18296 - DNA, 370 bp, Homo sapiens
  misc_feature 1, 26, 58, 75, 158, 163, 164, 165, 169, 170, 172, 185, 186,188, 193, 200, 202, 203, 206, 209, 210, 211, 212, 213, 214,216, 223, 227, 232, 233, 238, 246, 249, 250, 251, 254, 255,256, 257, 259, 268, 276, 282, 284, 311: n = A,T,C or G
nccgggccccccctcgagagtacttntagaattaattaaggcgggagtggagtggaanaagagggagaggtggancaaagtgagggccgagtgagagcgtgctccagcctggctcccacaggcatctttaaccattaaaactgaagtctgacaaaaanaaaannnaaannanaaaaaaaaaaaannanggggnccccccncnnggnggnnnnnnanccccccntttnggagnntattntttccccnccnnnatnnnngntttttaaanaattcctnctgatnancagagactgatctttgctggcaagcanctggaagatggacgtactttgtctgactacaatattcaaaaggagtctactcttcatct

SEQ ID NO: 18297 - DNA, 420 bp, Homo sapiens
  misc_feature 22, 29, 48, 55, 59, 113, 119, 163, 167, 169, 195, 205, 208,237, 240, 241, 243, 244, 255, 257, 268, 275, 288, 297, 319,326, 368: n = A,T,C or G
agtacttctagaattaattaangcggggnaccctagggattcatctgntttcttnactntcctttgcatctgagatcctgctggaaaccacagcaacctgtatccactattangaggtnaaaatcaataaaatggcccattcatttgtgttgtagctcaaaanagananacaaaaaaaaaaaaaaaatgaagaangtaaacttanaanaattctatgtaatgaaatgcacacttttnganngnncccctttgagnancaggctaatanttctttnttttttttgacanaaccccccnctcctctttaaagttatagagnatttttntgggtttaaatttcccttatatttccacctgtaaatgtcagnggcaacaacatcatacttcacttacttgttaattactttttacccttattct

SEQ ID NO: 18298 - DNA, 283 bp, Homo sapiens
  misc_feature 33, 34, 36, 67, 73, 75, 96, 102, 103, 126, 133, 136, 141,142, 173, 178, 186, 190, 191, 192, 193, 194, 195, 196, 203,207, 211, 215, 219, 226, 232, 242, 255, 261, 269, 273: n = A,T,C or G
agtacttctagaattaattaaggcggggtaaannantagcagtaagatagggaaattatgaagatanttaacntncttttagaagaaaaaagatanatttanncctgaaaagtaggaagcaggaanaaaaaanacnagctnngaaacaaaaagctaagggcattttaataacnttaanattttaanagannnnnnnccccctngggngagncccntgangcccganaagatnaaaggtttcncccccctgacggnggttgntattaaancttnttcatggagt

SEQ ID NO: 18299 - DNA, 206 bp, Homo sapiens
  misc_feature 142: n = A,T,C or G
agtacttctagaattaattaaggcggggtgtggccatgtgcctatattctggacaaggatttgtgcaacgtctacattaaagggaaggagtgatcctttagcttccctacctagccccaaacccactccaccttactaccanacaaccttagccaaaccatttacccaaataaagtataggcgatagaaattgaaacctggcgcaa

SEQ ID NO: 18300 - DNA, 401 bp, Homo sapiens
  misc_feature 23, 28, 45, 50, 74, 80, 82, 83, 84, 90, 93, 99, 102, 105,107, 114, 117, 119, 121, 122, 132, 140, 142, 147, 148, 150,155, 158: n = A,T,C or G
agtacttctagaattaattaaancattntcttggtgtttaaaaancaaanaatgtgaaaaaaaaaaaaaaaaanaaaacngnnncccccnccngggggngcnccncntcccccnttntngnnttattttcancccccccntnggggnnantttanatnataattcattgaggatgagttcaaggtaatcctggaatttttgagaagatactccgaaaattagggaggaaaaatttataccgtatatgactgaaattagaagaagtaatcagaggagatttttatggatcctccataacctaaagtaaggaaaagacagaaagagaatctgggaaccccattttgctatatgaccttggatatgttccttagcttctcttagtgctagttcattcgttcaca

SEQ ID NO: 18301 - DNA, 599 bp, Homo sapiens
  misc_feature 21, 24, 26, 33, 35, 40, 44, 46, 49, 53, 63, 64, 73, 81, 429,469, 472, 502, 521, 528, 532, 533, 539, 544, 548, 550, 551,552, 554, 555, 556, 557, 559, 560, 561, 562, 567, 573, 576,579, 593: n = A,T,C or G
atactggccgtcgttttacanccngnaacaagngntaccnttgntngtngccngcccttcctnnagagaactngtagaatnaattaaggcgggcgggtcacgaggtcaggagttcgagaccagcttgaccaacatggtaaaaccctctctctactaaaaatacaacaattagccaggcatggaggagtgtgcctataatctcagctactcgggagactgaggcaggagaatagcttgaacccaggaggcggaggttggagtgagccaagatcacaccactgcactccagcctcggggacagagtgagacttcgtctcaaaacaaaaacaaaaacaaaaacaaccaaatgcttagcatgtcagggtggaataagacagatcaagactctgtctagaaaaaaaaattaaaaaacattgtttttatatgttnaaataacattatgttcgaatgctataaatatatctatgtnttnagtgtgtatgtattaaaggttcgttgcaanaacatttggaaaattcacntcccggnggcnngggggnggganaatncnnngnnnngnnnnggggnaggccnaantanaaaaaaaaaccccncccccc

SEQ ID NO: 18302 - DNA, 435 bp, Homo sapiens
  misc_feature 72, 115: n = A,T,C or G
agtacttctagaattaattaaggcgggcagacaggaaccaatgggacatggttcagtggactcctggtttanaatccaagaatgctttttctttactgcctagtttaaggctcanaataaagaaatgtatttgggatgccaaccccagatctgctccctttgtggttcgggtggagtgtctgaaatcagcattactcatgtggaaacattttgctccttaatagtttcagagtcctggaacagcctgtggcaaaccatgaaagcaggcaagacagagcagctccattatttgctgaatccagtgattaattttcaaggcacactcaaggttttataaggattattcataaatttatacagctttattcctttaagatgtttatctctgtttctatatagaaatctggccttattttttcaaattccctttggaaa

SEQ ID NO: 18303 - DNA, 483 bp, Homo sapiens
  misc_feature 32, 33, 37, 41, 42, 45, 50, 51, 55, 56, 57, 58, 64, 70, 72,73, 78, 79, 87, 90, 91, 92, 93, 99, 104, 112, 122, 123,126, 132, 133, 136, 138, 140, 141, 143, 144, 151, 155, 157,158, 165, 167, 181, 183, 186, 187, 189, 200, 216, 225: n = A,T,C or G
  misc_feature 228, 229, 233, 235, 238, 244, 251, 260, 270, 279, 307, 325,330, 348, 436, 465, 467: n = A,T,C or G
agtacttctagaattaattaaggcgggcggannatgncgcnnggnataanntacnnnnctgccnaacctngnnaaacnncgtgcttnctnnnnactcgnaaatngtgctggnctggtggcannagncttttnnccnantnncnnaagacgntgangnnagaagantncttgaactactgangnagnncnttgcactgagnttaatactatcgccantggactcgngcnngggntnacntctgtntcacaantggtcccanatacttaacncatctgtgnggccctgggatatggttttttcctgganttgacactggcataagcnctcangttcattgatcgtaaaanctctctcctcacagagctcagcaacagcctcaccaaggactccatgaatatcaaagcccatatccacatgttggctagaggggcttanagaactacaaggcctgcagaatttcccananaagcctcaccattgac

SEQ ID NO: 18304 - DNA, 651 bp, Homo sapiens
  misc_feature 220, 305, 332, 341, 343, 345, 348, 352, 359, 378, 381, 382,387, 390, 394, 396, 402, 415, 420, 425, 433, 434, 435, 437,439, 449, 456, 461, 469, 471, 474, 492, 493, 520, 523, 524,525, 526, 527, 528, 529, 530, 535, 537, 555, 556, 557: n = A,T,C or G
  misc_feature 558, 559, 560, 561, 562, 563, 564, 565, 566, 567, 568, 569,570, 571, 572, 573, 574, 575, 576, 577, 578, 579, 580, 581,582, 583, 584, 585, 586, 587, 588, 589, 590, 591, 626, 627,628, 647: n = A,T,C or G
agtacttctagaattaattaaggcgggtattaactgtaaaacaaactagtgtagaaaaaattagtaacaaaaaataattaacagaataagccccagagtcaatagccataaacattctgggtttttattctgctaatgaagataaataaattaggcaattaaacaaattcagtcctggcctagtggctcacacctgtaatcccatcactttgaggggacnaggcaggaggattgcttgagacttggagttctagaccagcttgggcaacatagcaagacactgtctttacaaaaaaaaaaaattngttggttttttttgttggtttggtttngaaacaaantntngcnccancccgganacagaactgaaactttgtntcnnaaccnaangacnanaaaaanttcaaaatttttnccccnttttnttgaaaannnantnggaaaatttnaaaaaanttttncccaaaangnttncctggccccccccccggnnaaaaaaaaaaaaattttttttttaaanaannnnnnnnaaaantncccctttttaatgggtannnnnnnnnnnnnnnnnnnnnnnnnnnnnnnnnnnnnccccccccaaaaaaaaaaaaaaaaaaaaaaaaaannnccccccccccggggggggncccc

SEQ ID NO: 18305 - DNA, 425 bp, Homo sapiens
  misc_feature 56, 58, 60, 64, 95, 98, 101, 106, 119, 124, 126, 131, 136,141, 155, 191, 199, 200, 242, 255, 301, 350, 352, 386, 391,394: n = A,T,C or G
agtacttctagaattaattaaggcgggggggagccctcagacaacctaaatgttcntnantaantgaccacttaactgatggattccatatgatnggnaanaagtnctttaaaagaccnatagntnacctnaaaantgatnataacaattggctnatactaaaatggtaaataataatgttgaaaccttgntcacattnnggatgtattttaaaaggtatcatataaatgctaaatgaccanttgatgggtgcantacaccaacatggcaaatgtatacatgtgtaacaaacctgcgtgtngtgcacatgtccctaaaacttaaagtataattaaaaaaaaaagatagtntntggaatgagcccatcagctggctgcttatgaaanagtanctnttagtgagtaaaaaaaaaaaaaaaaaaaaaa

SEQ ID NO: 18306 - DNA, 636 bp, Homo sapiens
  misc_feature 13, 24, 27, 40, 147, 520, 584: n = A,T,C or G
cgggccccccctngagagtacttntanaattaattaaggngggggaagttactcagtatgtaagcaatgccttactgtgcatatgtttgtcaaagtaattttccccgtgactggacaggcctgggatggacccacagcaatcagcanttactgggtggaaaggaaataagagtctcaaagcagagggaaacagtgacacaggctgaggaattaaatgactattgtgacttcttttatatcattgattactttatatcgcaatctgaaatcagcaaaaatatttctagagcttatgcattctctatgaacatttaaacatttattacaatatgttaattaaggcggggagtgacgtgacacgcagcccacggtctgtactgacgcgccctcgcttcttcctctttctcgactccatcttcgcggtagctgggaccgccgttcagtcgccaatatgcagctctttgtccgcgcccaggagctacacaccttcgaggtgaccggccaggaaacggtcgcccanatcaaggctcatgtagcctcactggagggcattgccccggaagatcaagtcgtgctcctggcangcgcccccctggagggatgaggccactctgggccaatgccggggtggaagcc

SEQ ID NO: 18307 - DNA, 715 bp, Homo sapiens
  misc_feature 3, 49, 167, 175, 248, 327, 350, 369, 377, 392, 425, 465,470, 481, 491, 506, 511, 515, 521, 526, 529, 537, 539, 540,564, 570, 571, 580, 581, 585, 587, 589, 612, 619, 629, 633,641, 668, 691, 696: n = A,T,C or G
ggngaacaaaagctgggtacccgggccccccctcttgagtacttctagnaattaattaaggcgggataggtttggtcctagcctttctattagctcttagtaaggattacacatgcaagcatccccgttccagtggagttcaccctctaaatcaccaccggatcaanaagggggnaccaagcatcaaagcaccgcaagcaatgcaagctcaaaaaaccgctttaagcctagccaccaccccccaccgnggggaaaaccaagccaagtgggatttaaacccttttaagccaataaaaaccggaaaaagggtttttaaacttaaaggcnttattaccttaaaccccccaagnggggttttgggtccaaatntttcggtngcccaaggcccaccncgccggggtccaccaccgtatttaaacccccanaaggtcaaattatgtaaaagccccgggcggttaaaaaggnaggtngttttttaagnaatcaacccnccccttccccccaantaatntaanagaaanttatntanattagganannataaaatgagggccgggcgcggcncaaccnnggcggggtnngggnancnttcccaaatttaccgcccccctnattaggngggaaggtcnggtnatttaacngccgccgccttcaacttgggctcgttnggtttttttacaaaaccggtccngttgnaccttgggggaaaaaaccc

SEQ ID NO: 18308 - DNA, 434 bp, Homo sapiens
agtacttctagaattaattaaatttacttgttggttgggattcctgaatttgtttgtatttctttgtatgttaattttaattcatcagattgtaaactcacaaatatggaaggacaagttagttccgcagagaaaaaaaaaaaacccaggtctcagcactatgcaactcaggtctctttagctgtgtaataggaggtaatcatggcatttaaaaacattgactatggagttctctgagtaaatgagaatattagctccaccacctttatccgtatgacttttggctaattacttaacatggatgagtcagtttcttcctttctaagatgggaataatagtatttttactttatgggatgtgtaagcacaaaatgagataattgttttaaaatacttaccgtagtgcctaacaggtaagaattgccccataagtt

SEQ ID NO: 18309 - DNA, 423 bp, Homo sapiens
agtacttctagaattaattaaggcgggtactaagtgtggtgatgtcttttgtcatagtacatccttaattcgacatcagaaaactcatttcagaaaggaaaccttagcagagtaatgagtgtgggaaagcctgcagtcagtcgtaggttattgtttacacctgagcactcacagttcaagcaaccctaggattgttatgtgaggaaaatcttaggcaaaacactcatttacttaatatgctatttgtactgagaagaaggactatgcttataatctaaaaaaggtgttattgaaagagaaagttataatggaagtgttcatccaaaactgaggtttgttttttaaagacatttagaaagttactttcagagataatttattaaaatgtatatatttgcttataaaaaaatttttttttttttt

SEQ ID NO: 18310 - DNA, 430 bp, Homo sapiens
agtacttctagaattaattaaggcggggtaaagagtgttttagatcaccccctccccaaataaaatctgggcagatatggaaactatataaactttggatgtcatcttcaaatcacacacagatccaatggtagaaggtaggttttatgggcttaaggtgtttgaacacaatctttgaccagtcattggctgaccattaagttatgcagatgatgctagaaagccaaactaaaaagtaaaaatataagaattttaaaaattttaacagagacattagtggtgacacatggcagaggacaaaacttctacgtataagtccaatcaattatagaaagaaagagaagaaagaagaagaaaagaaagagaaaaagagaagtgtaaggggtgggaggagaaaaaaactcttaactggaaaagtcagaaaaaaagc

SEQ ID NO: 18311 - DNA, 701 bp, Homo sapiens
  misc_feature 571, 591, 595, 600, 618, 622, 636, 642, 643, 644, 654, 670,671, 679, 680, 685: n = A,T,C or G
agtacttctagaattaattaaggcggggtatgtttcttttcactgctttcatctctaagtcctacagcagtgtaggacctcaataaactattctacaaagtcggcaaatgccccacagataagagtttctcctaataaaatcctacctgtatcacccaataaatgactaagaactcctgaaggttccaaaaatctaaaatcacaaccacacctaccttatccatatttcttccttaacctacaatagcccccaactaatctacccactccactttctccttctctacttcgtctttcatactgatgccagaatgttgttctcaaacaaaaactttatctcattctcctacttatgtgtcccttagctccacaagaaaaagtccaagctccttaaaaaaggaaaataaagtcttctacaaagcaagccatctcttcagtcagctctccagccttaccaaagcacttcggttcacagcccactgcccactttcaaattcctactgccatactccacctggaatgacctttcccacttcgtacaccctctgctcattttgttttgatttttggngtttttttttttttttggcnaggnaaatnttttttttccccggggtngggngcaatgggcaaaantttaannnaagggctttncccggggcaaaaaaannaacccttnnttcanaaaaaaaaaaaaaaaa

SEQ ID NO: 18312 - DNA, 415 bp, Homo sapiens
agtacttctagaattaattaaggcgggatggtaatgaaatagtggaggagtctcaagaggaatcctggaggcttggtccccaggccttgaggtggaatcccagtggcaactctcccccacaatggacctcagagcagtgggagcgacgcagtcctgtgggaagcattcaggctcagaatcaggagatgtgattattgtcctggctctgttatgactaatttgggtctggaatggcctcatcgggggaaaaattggtgacaactttaagaaatactgtttatatcccgtcctcaaatattgcttgactcaaccctctactgaaccagtagtccagggtggctcacaaagaccactttgaggctcttgctctgctctttagccaaggagtctcccttcctgccttcagtaacaacat

SEQ ID NO: 18313 - DNA, 457 bp, Homo sapiens
  misc_feature 194, 423, 431, 437: n = A,T,C or G
agtacttctagaattaattaagacggggtaataatggcaaaaagatagaaatatagatcacaggaatggaatagaccattctgaaatagaaccacacacattgccaactaattttcagcagaatgccaggtcaattcaataaagaaataaaaatctttccaacaaatggtgctagaataaccagaaatccatangaaaaattaaaaaaacctcatgccatatgcaaaacttaattttaaataagttataagcctaaatgtataaaattgtaaggcttttagaacaagacattgcagaaaatttttacaaacttgaataagcagttatttgttaggcaggacacaaaaaaaacaagccattaaaaaaattgacaaattagactttattaaaatttaaatctcatgctctttcaaagatccattnagaaaaanaatgtnttatataaataaaaaaagcg

SEQ ID NO: 18314 - DNA, 689 bp, Homo sapiens
  misc_feature 178, 181, 182, 184, 185, 188, 189, 198, 206, 217, 219, 236,238, 239, 241, 242, 247, 249, 250, 251, 254, 256, 262, 266,267, 271, 274, 275, 278, 279, 280, 288, 289, 300, 313, 314,320, 321, 326, 328, 331, 333, 335, 342, 352, 354, 362: n = A,T,C or G
  misc_feature 368, 374, 379, 383, 387, 396, 400, 401, 409, 413, 414, 424,427, 431, 436, 437, 441, 448, 452, 453, 457, 463, 481, 483,486, 487, 498, 503, 513, 520, 527, 530, 533, 534, 570, 584,603, 607, 621, 622, 625, 628, 629, 630, 643, 644, 652: n = A,T,C or G
  misc_feature 655, 663, 669: n = A,T,C or G
agtacttctagaattaattaaggcgggtcagggcctggccttggtccccactctgcgatgatttctgtgaaattttgctgtagcgatgacattgttttcagaatttccaagagttctgtctgttctgttttttattcagaatgaaatgaaatattttttttagttctgaacaaaaaanaannannaannaaaaaaacnaaaaaaanaaaaaaccaananctaaaaaaacccaaacnannanntgaantnnntananccaatntggnnccgntgnngtnnnccctttgnnaaaaactaatngttaggtttaagnnaacatnnaaaancnttncncncccccantaacccctgngntaaaaatnaaaaanccctgnaaccnggancaanttaaaaagncccnntttttttnacannttaaaccaancangggnttttnntttnccccctnaatnngtgnaaaccncaaaaaaaaagggcattncnttnnttaagggaaangggtnaaaaaaaaanttaaaanggaaacntcnggnnaaatttttaaccccccccttgtttacccaaaaaaanataacccttttttngcattcccccagttttttnaaangggccccccccttnnccnctnnnggccccccttttnntataaatnagnaaaaaaanaaattntttttttaaaaaaaaaaaaa

SEQ ID NO: 18315 - DNA, 709 bp, Homo sapiens
  misc_feature 32, 35, 41, 43, 51, 57, 69, 70, 72, 73, 85, 86, 87, 90, 91,102, 117, 122, 125, 135, 139, 157, 171, 173, 179, 185, 187,190, 193, 202, 207, 208, 213, 217, 224, 229, 282, 295, 296,302, 306, 383, 406, 417, 431, 476, 481, 553, 583, 608: n = A,T,C or G
  misc_feature 610, 612, 618, 619, 620, 643, 656, 674: n = A,T,C or G
agtacttctagaattaattaaggcgggtgtgnttntttatnantaattatnattaantaagggctcttnngnnaaactcagatannnagnnatgagactttncggaaaaggaaaganactanaanttgctgagcncctnctctgggatataagcatntaaaaaactaatananaatcanagaatnanggnatntttcctganagatnntcctntganttgacantactntggggcacctggcagccaggctatggcttttggggccacgtccatttcttcancggaatcctggtnntgcagngctnctggatgggcccctgtattaaaccattcttgccctgctataaagaaatacccgagattgggtaatttaaaagaaaanaggttggccaggcgaggtggctnatgcctgtaancccagcacgttgtnaggtggaggcgggtggatcacttgaggtcaggagttcgagaccancctgnccaaaggggcaaaaccccatctttacttaaaaatgccaaaaattactgagcatgggggtacctgcctataanttcagccctcaggaacctgaaggcaggganaatcactttgaacccaagaagccanangntggcannncagcttaaaaaatcattgccacnatactccaccctnggcattcaaagtaaaaancttgttcttttccaaaaaaaaaaaaaaaaaaaaaa

SEQ ID NO: 18316 - DNA, 258 bp, Homo sapiens
  misc_feature 212: n = A,T,C or G
agtacttctagaattaattaaggcgggatggccaggttgacagcagaggaagtaactaacactgtggtgactctgtctactcggggaggagtgctttctggaggcaatgtgagacatctgaaatctgaccatgggtttaatgtggcttctgttcttttttagtacggcattctcttcaaacaagagcaaggtaagtagcctgcctgtttaancaattcatctgtgaaaaaaactgtgttgtccctggtttaagacttt

SEQ ID NO: 18317 - DNA, 219 bp, Homo sapiens
  misc_feature 190, 191, 193, 194, 196, 198, 200: n = A,T,C or G
agtacttctagaattaattaaggcgggtcactggcagtttctctgaccaatctgacccgtcaaaaggacggacatcaaaggttttgtaagaaaggagccccatagggagaccacagtcaacaagccctatgtgtgtgctcagagcttccaaactggcttccaggcacttttcttttctttttttttttgnngnnanantntcaaaaaaaaaaaaaaaaa

SEQ ID NO: 18318 - DNA, 441 bp, Homo sapiens
  misc_feature 317: n = A,T,C or G
agtacttctagaattaattaaggcgggacaggtgcattacactgagggcctttctctcccaccattgttgactgttgccatgcaaattcctaggtgaccctctgaagactggttaccatagccaagctgttgttcatcaggggatttccagcaatgcttagaactccctagtatctgaaaaacaaaatcataagcaggaatcaccccaatgctacagctgatccgggccatcctgaaagtccctgaagatccaacccagtgctttctgctttttgccaaccagacagaaaaggatatcatcttgcgggaggacttanaggaactgcaggcccgctatcccaatcgctttaagctctggttcactctggatcatcccccaaaaggtatccttcccatttctggacatcccactatcccctcatcgtcaaaatcaaagccttg

SEQ ID NO: 18319 - DNA, 840 bp, Homo sapiens
  misc_feature 34, 237, 288, 323, 335, 339, 371, 378, 412, 463, 470, 573,586, 613, 616, 692, 699, 702, 709, 749, 752, 761, 772, 817: n = A,T,C or G
agtacttctagaattaattaaggcgggggttcgngactaggggaaaagaacaaaaacaaaaacacacattagcaatagccctgacagctttaatggggacaatgtttgcggatgctgcgtggtgaaatttggcagtcctcgcctcagtagtaagaaaccctctattgctacaagccctccccgctctgatcatcacccgcacttaggtcatttttggggatgggatttcaaaacagnaaggacatgggagcctgaagtctcacccaggctctagggcagcccccgacnaatgccgcccatcgcccatcgggcatccgggaccntgaagttttgcnaaanatgggattaacaccatttttcaagttttccanttggctnatcaggtctctttaagctctagtaagaaataagnaaattagtcctgtggggtgggagggtctctttggaaaggaaaagacccaancctaggntaaaatgggtattattctggatttaagccacttttcaaaaggcagggacttaaatggatggaggggtttgggggggagggggaaccaaaaaagaaggcccagnttgtgcctcccangggtcaaaaacaacccaatcttcaacnttnttgggcgggggcccttttggcttaaaccaccttacctttttacttcaacccccccaggggggttttttttttaacnaaatggntcntggcccnagtgggtggaatggaaatgtttggggggaaccctcccttnttnaaaatttcnttccaaaaaanttttttttatttttcaccgcccttaaaatttttctttcccctttntttaacctgggccttggaaaagg

SEQ ID NO: 18320 - DNA, 542 bp, Homo sapiens
  misc_feature 194, 370: n = A,T,C or G
agtacttctagaattaattaagggggctttagatgtgaaacttttttttcccttttttttgtaatgacctctccttacgatagacatgcaactttctatgctaagccagttgttagttaatagccgaaggaatatctgattttttctgcaagctatttaggcatattttcacttaaatgactggaacactcaanaaaatgtcctgatttcattttactttaagttgtaactgccaaagtagataggttagtctggcttctagctccaatttgctaaatggccttgttcaagtgactcaatctctctagtccttagtttcttcatcagtaaagtgaaggagttatagaaggcatgatatgttactaaatanaataagtgtgctaacaaagtgaaacagagttactgcattaggtcctgtatctacatcaatactataactagatctatttatatgtactctatatttaaactatctcaaactatatgtcactttactatatatgtaaggcctaccattaaagaaatgataatcattttaaaaa

SEQ ID NO: 18321 - DNA, 386 bp, Homo sapiens
  misc_feature 16, 42, 62: n = A,T,C or G
tccgggccccccctcnagagtacttctagaattaattaaggngggggggcaatgaattttanaactctaacctttcaagaaaattgagatcaggaagccatctttcagaatgttttactctttgaataatcaacaggatgtatatgtatcattgtagtgaaatcgctagtaattatcactggcatgtctgtttttcatattttcttctcccgtgttattgtgcagctttgaatggatgctgggattacaggcatgagccactgcaccaggcctggtacagtactattaattgagggagggaatgacacttccctaagtgtatcttcttgtattattttgacttctggtagcatatttgtgtcttacatatattaaaaaattcaatt

SEQ ID NO: 18322 - DNA, 448 bp, Homo sapiens
  misc_feature 5, 37, 39, 42, 43, 46, 49, 50, 54, 60, 66, 67, 70, 72, 76,79, 81, 88, 89, 113, 120, 123, 129, 133, 135, 136, 146,150, 152, 154, 157, 159, 163, 167, 172, 184, 193, 195, 200,201, 202, 203, 215, 230, 234, 246, 247, 249, 259, 260, 262: n = A,T,C or G
  misc_feature 265, 272, 275, 280, 285, 300, 304, 307, 317, 330, 339, 416: n = A,T,C or G
cctcnagagtacttctagaattaattaaggcgggggntnatnngcnatnnaatnaaatangactannaangngacnccntngaaaacnntggattgaaaaaagaattttaatntcctccnganattatntttngnntgttcattgntctnananacntnaaantaangagtnttttatattgtnaaaaaaaananaaagnnnnaaaatgaagaantaaaccatacatgtncaantaaatgactccnncngacatcatgnngnccncactatnaanatcantctgnggcatacgctgcccnggancangtacatactntacctggtgggancatgaggantaccagctgtgccagccccagtccaaggaccaagtccgctggcagtgcaaccggcccagtgccaagcatggcccggnagaagcctgtctgaaaagttccagcgcttcca

SEQ ID NO: 18323 - DNA, 545 bp, Homo sapiens
  misc_feature 181, 204, 272, 304, 376, 414, 448, 449, 451, 512, 513, 514,515, 518, 519, 520, 521, 522, 523, 524, 525, 526, 527, 528,537: n = A,T,C or G
agtacttctagaattaattaaggcggggaaaatacaagattagtttgaaatattttgtcatgttaggaagtaaggaaatgctcacaaaatggagaagatgtgaaagggaaacagatccactttgaataaacttccatagcccaatttgagaaaattggggcaataaaatagataacaatantaatatattacaatctacagaanaaaattttcaattaatccaggccgggtgcggtggctcatgcctgtattcccagcactttgggaggcanaggcgggcaggtcacttgaggtcaggagttcnagaccaccctgaccaatgtggtgaattcctgccttcactaaaaatacaaaaattagccgagcatggtggcanatgtcttgtagtcccagctactctggaggctgaagcangagaatggcttgaatcccggaaagtggaagtgcnntnagtggaaatcgcaccattgcacaccaacctggatgacaaaacagactccaactcaaaaaannnntannnnnnnnnnnaaaaacccncccccccc

SEQ ID NO: 18324 - DNA, 403 bp, Homo sapiens
agtacttctagaattaattaaggcgggctaagagttaaaccctaaggaaatcaaataattttagggagcagcctaggatatgaatatgagctgtttgtttaacagcaagaatatccacctcaatctagaggctgctgggagtacctcatttcagtattcaccaaatatttattaaacaactactatatgctattctaggcactagggatatagcagtggccacaataaacacaactttactgctcaatgaccttatatttttaatagataatcttggttggtgaatcgctgagtggcatggagaatattctagaattgtgagagtaggaaaagattttatggtctaggcaggcaaagggagagcgctccaaaaaaagaaaaaaaaaaaaaaaaaaaaaaaaaa

SEQ ID NO: 18325 - DNA, 620 bp, Homo sapiens
  misc_feature 200, 202, 234, 259, 269, 282, 288, 292, 298, 341, 343, 355,375, 387, 396, 441, 445, 457, 536, 554, 592, 597: n = A,T,C or G
agtacttctagaattaattaatacaaataaaaacccacaaaaatgagccaggtgtggtggcgtacacctgaagtcccagctactcgggaggctgaggcacaagaattgctttaagccgggaggtggaggtagcagtaagttgagatagagccactgtaccccagcctgggtgacagagactctgtacaaaaaaaaaatancncggaatcaaatcataattgcctggggaaggancaaggaaaaggggaaaaaaggattntaaaggggcntgaggaaatgttntagggngatnaatatnctcattacctggttacattcatgaaaaaacttatcaaattacntnttttaaaatgtnccctttatagtatgtcaacnttacaggtcctntcacaaagntttcaccaaaaataggaaagcagcagcagcaagcaacaacagccntaantactgcctgganaatttcccccaaaacaaacaaaccaaaaaaagtgtgggctgcagctaaaagcagtacatttttaggattaaaatttatntttaaatgaatttaattnaaagaaggacttgaaaagtaataagccaaacatccatnttaanaattcggttgggtttttggtttt

SEQ ID NO: 18326 - DNA, 780 bp, Homo sapiens
  misc_feature 278, 279, 287, 288, 300, 301, 308, 309, 313, 315, 325, 326,327, 330, 339, 340, 341, 342, 345, 346, 347, 348, 349, 350,351, 352, 359, 380, 392, 407, 408, 429, 443, 444, 445, 446,447, 448, 449, 450, 451, 452, 453, 454, 455, 456, 457: n = A,T,C or G
  misc_feature 458, 459, 460, 461, 462, 463, 464, 465, 466, 467, 468, 469,470, 471, 472, 473, 474, 475, 477, 478, 479, 480, 481, 482,483, 484, 485, 486, 487, 488, 490, 491, 492, 493, 494, 495,496, 497, 498, 499, 500, 501, 502, 503, 504, 505, 506: n = A,T,C or G
  misc_feature 507, 508, 509, 510, 511, 512, 513, 514, 515, 516, 517, 518,519, 520, 521, 522, 523, 524, 525, 526, 527, 528, 529, 530,531, 532, 533, 534, 535, 536, 537, 538, 539, 540, 541, 542,543, 544, 545, 546, 547, 548, 549, 550, 551, 552, 553: n = A,T,C or G
  misc_feature 554, 555, 556, 557, 558, 559, 560, 561, 562, 563, 564, 565,566, 567, 568, 569, 570, 571, 572, 573, 574, 575, 576, 577,578, 579, 580, 581, 582, 583, 584, 585, 586, 587, 588, 589,590, 591, 592, 593, 594, 595, 596, 597, 598, 599, 600: n = A,T,C or G
  misc_feature 601, 602, 603, 604, 605, 606, 607, 608, 609, 610, 611, 612,613, 614, 615, 616, 617, 618, 619, 620, 621, 622, 623, 624,625, 626, 627, 628, 629, 630, 631, 632, 633, 634, 635, 636,637, 638, 639, 640, 641, 642, 643, 644, 645, 646, 647: n = A,T,C or G
  misc_feature 648, 649, 650, 651, 652, 653, 654, 655, 656, 657, 658, 659,660, 661, 662, 663, 664, 665, 666, 667, 668, 669, 670, 671,672, 673, 674, 675, 676, 677, 678, 679, 680, 681, 682, 683,684, 685, 686, 687, 688, 689, 690, 691, 692, 693, 694: n = A,T,C or G
  misc_feature 695, 696, 697, 698, 699, 700, 701, 702, 703, 704, 705,706, 707, 708, 709, 710, 711, 712, 713, 714, 715, 716,717, 718, 719, 720, 721, 722, 723, 724, 725, 726, 727,728, 729, 730, 731, 732, 733, 734, 735, 736, 737: n = A,T,C or G
  misc_feature 738, 739, 740, 741, 742, 743, 744, 745, 746, 747, 748,749, 750, 751, 752, 753, 754, 755, 756, 757, 758, 759,760, 761, 762, 763, 764, 765, 766: n = A,T,C or G
ctcgagagtacttctagaattaattaaggcgggcggatcaccggaggtcgggagtttgagaccagcctgaccaacatggagaaaccccatctctactaaaaatacaaaattagccgggcgtggtggcatgcgcctataatctcagctacttgggaggctgaggcaggagaattgcttgaacccaggaggcggaggttgcggtgagttgagatcgtgccattgcactccggcctgggcaacaacagcaaaactccgtctcaaaaaaaaaaaaaaaaaanncccccctnngggttttttttnngggcccnngggntngaaaacctcnnnctngaaaaaaannnnaannnnnnnnaaaggcnccccccccggggggggaaccncaaatccccttnttagggggggttttnntccccccctttttgggggggntttttttaaaaaannnnnnnnnnnnnnnnnnnnnnnnnnnnnnnnngnnnnnnnnnnnntnnnnnnnnnnnnnnnnnnnnnnnnnnnnnnnnnnnnnnnnnnnnnnnnnnnnnnnnnnnnnnnnnnnnnnnnnnnnnnnnnnnnnnnnnnnnnnnnnnnnnnnnnnnnnnnnnnnnnnnnnnnnnnnnnnnnnnnnnnnnnnnnnnnnnnnnnnnnnnnnnnnnnnnnnnnnnnnnnnnnnnnnnnnnnnnnnnnnnnnnnnnnnnnnnnnnnnnnnnnnnnnnnnnnnnnnnnnnnnnnnnnnnnnnnnnnnnnnnnnnnnnnnnnnnnnnnnnnntccccccccccccc

SEQ ID NO: 18327 - DNA, 434 bp, Homo sapiens
agtacttctagaattaattaaggcggggactcatcatcgatccaagcacgttcgaagaggcagaacatttgacaccacaggctgggcagtgggagagctgatgaccttaaacaccttcagcatcctggggaacccagagccacaccactgagcaatgaacacagacaatcagctctgggagtggaactcgccatgccattagtggcctgctgagaaacagctctttgcaggtctcaaaattcaaaagacacctctgcacacagggcagaggaatgcttactaccctgagccactcaccagcattgggtgcaccatagatgccaggccacaccaaatcaggactcaaggcagcctctgttggtcagaagaattgaccatcttccttgccagcaagcggcagacctctcatgacaactgctgctgagaagtgtaaa

SEQ ID NO: 18328 - DNA, 625 bp, Homo sapiens
  misc_feature 22, 33, 55, 59, 109, 116, 133, 150, 163, 171, 188, 189, 227,237, 248, 250, 257, 266, 268, 269, 281, 287, 289, 290, 294,296, 298, 299, 317, 318, 323, 324, 330, 332, 333, 524, 565,576: n = A,T,C or G
gggtaccgggccccccctcggngtacttctagnaattaattaaggcggggcgatnaatnctctgaatgttttattttgtgcgagattctgggggaggggaaggaaagcncccccantatgactgtatatctanttctccaggaaaggganttaaaatgggatnatttcctntacgaaaaataagattnnagttactttttgcacctgtaacaattaggaagaatgcncacacacggnaaaaaaaccananacaatangacaatagncnncccccccccggngggagngnnccanancnnttattaatccaataaacnnccccnncttaantnnacagttaaaccagattataaatttgaatattttaaaaatagccaattaattataagttacatactcaaaacattaaaacatggaaagttggaagtaaaaggattttttaaaatgtgctatgcaaatatgaacgtataggaggctagggtcattgttaatatcaaacaaaaatgacttgaagagaaaaagcnttattaaaactagagctaatagtttgtgtaccaggaaggtncaggttgagcncacccaattcaaaatctggaatctgaaatgctccaaatttaaaactttt

SEQ ID NO: 18329 - DNA, 511 bp, Homo sapiens
  misc_feature 404, 447, 469, 471, 476: n = A,T,C or G
aattaattaaggcggggaagaaagaattcatgaggaaatcatttaaatattggatttttaaatatatgacactgctctcaattactaggtgctaataagacatacataacctaccatatagccaaggttttaattatcagatttataatttgaaactgaaggaactttagttcataaaagtgaaaaagataaaatgaagtccaatgaaagtaaaatattatctttgcttccttgattaaatctatagttatttttactaaagtatgatatatgttcccattatttagttttgtttagggaagtatataagatgagagagagagagagaaactttaaaagtttgatctatgtacttactaccaaataaagatttaccctatagattgaaactaattgtaaatgtnccaaatacttttccgatgaaaatccaaccaaatttggcttttntccccccaagccaaaccaaacncnacctntttttaattccaaaaaaaaaaaaaaaaaaaaaaaa

SEQ ID NO: 18330 - DNA, 467 bp, Homo sapiens
  misc_feature 423: n = A,T,C or G
agtacttctagaattaattaaggcgggttccagcaattctcctgcctcagcctcctgagtagctgagattacaggcacccgccaccatgcccagctaatttttgtatttttagtagagatggggtttcagcatgttggccaggctgatctcgaactcctgacctcaggtgatccacccacctcagccttccaaagtgctgggattacaggcgtgagccaccactcctggccccagttttgtacttctttgcctagtttgggactatgaacaagaggaaatgtagctttgtttgacttctgccacttcctctttccattcttccatttgggtgggtgttccggtagcttgtgttgagaaattttaacttcttaatgttttgtattatcagcaggcttaaagtatttattgttggctttcctcangctggattttgatgatgatggagaagggaacagtaaatttttga

SEQ ID NO: 18331 - DNA, 485 bp, Homo sapiens
  misc_feature 24, 29, 34, 38, 39, 43, 46, 47, 50, 59, 64, 67, 68, 70, 75,78, 81, 84, 99, 102, 106, 107, 113, 121, 129, 130, 142,148, 167, 190, 200, 207, 213, 214, 218, 226, 229, 230, 232,247, 258, 259, 264, 267, 277, 279, 284, 285, 287, 288: n = A,T,C or G
  misc_feature 302, 314, 316, 322, 323, 324, 374, 379, 391, 402, 404, 420: n = A,T,C or G
aggatactggccgtcgttttacanccggnaacangtgnnaccnttnntgntggccggtnctttnctnnanagaantantanaancctttaattgcgggnccngcannggggancagaaatnacaactannccacttactttngcaaangctcgatccaaatgttatnacacacttaaatgtggaacgttnaagtgtaaancttttgngaaaanncttngagaaaanctnnangcattggcactaggnaaagagttgcnncactnganaccaaaagcncnatccnngnnaggaagaactgctnttctgaacctcntnaaaatnnnaaactttcactctgtgaataaccctacacgaggatgaaaagacaagttanaaccnggggagaaaatnctagcaaaccncntatttgacaaagaacnagtatccagactgtataaagcactcaccaaaatttaacaaaatcaccggttaagaacttaactaa

SEQ ID NO: 18332 - DNA, 811 bp, Homo sapiens
  misc_feature 325, 362, 365, 372, 388, 391, 393, 399, 419, 422, 436, 454,456, 469, 470, 475, 493, 497, 506, 508, 510, 513, 519, 523,533, 534, 537, 538, 550, 560, 561, 565, 569, 570, 580, 583,588, 599, 604, 610, 628, 643, 644, 652, 673, 685, 686: n = A,T,C or G
  misc_feature 703, 705, 711, 712, 713, 717, 718, 746, 748, 765, 766, 782,783, 789, 799, 801, 802, 803, 804: n = A,T,C or G
agtacttctagaattaattaaggcgggaggattgcctgagcccaggagttcgagaccaggctgggcaacgtggcaaaaatccatctccaccagaatcctttgtcatgaggcatcatggagaccatatgcaaatagaacggcaaggaagaaaggatacatacctctgcttgcatattatgctctgctataccactggacttacaaaacagatagtcaaacataaaagtattacaattttcaagacagtgactacagagcattaaaccaagcactgggccctgtgtgactatacttgtcgcatgttcatgaagttgatggctctgancgcttgggtttctcaaatgggggcttttggcattttnggngaaacanttttttttttgggcanganantttaanatccctggcccccatgcccntanatgccattggaaanaaaaaaaaaatcccccantnttttttttaaatnnccccnaaaaagggagtggggttnttcncccaaaaancncnaanaagccncccnccttttgggnnccnntttttaaacccntgcccccctnnaagntttnntttaaaaaanggnttttnaaatttttttnttttncccggnaaaaaaaaaaaaaaaaanaaaaatttttttttnnggtggggnaaaaaaaaaaaaccccccccnttttttgggggnnaaaaaaaaatttttttnanaaaaannntttnnggggggggggggggggggttttttttcncnaaaaaaaaagggggggnnccccccccaaaaaaanngggggntttttttttntnnnnaaaaaaa

SEQ ID NO: 18333 - DNA, 435 bp, Homo sapiens
agtacttctagaattaattaaggcgggcaattcaggtttcaacctttccctaggtgcaaatagaggaaagcatgtgccataccaggtaagtctttctcttcacatgttactgggatattgggtgaataaagtaggcttagtcagccgcatcactgtgaagtaaaaaagtaaaagaaaacaaaacattaatactgcttagggttaatattctcaagtctagtgtatgacattcatccattttatactaacataaaatataacctaaatacttcctaaatataatactacatacttctaaggttatcacacatcagtgatttattaagaattgtaatgttcaaaataagcaccatttatttacaacctatgaattataaaaattaaatgtaaatacaatatgcattcattatagaaaaactggaaaatataattttt

SEQ ID NO: 18334 - DNA, 286 bp, Homo sapiens
  misc_feature 43, 44, 75, 90, 91, 166, 180, 194, 219: n = A,T,C or G
agtacttctagaattaattaaggcgggcaaaagatagatgacnngaaaaacctgctgtgtagcacagagagacanaaggcaaaaaatatnnaagagagagtaagagacgtactaacagactatctgatgtatgtttaatcacacttccaggaggaaaagaatggancatgggcaatattngaagagataattgntgagaattttacaaaagtgatgaanaatagcaatctatagattcaagggacccagtgaattccaattcggcaaagccctagcaaaaaaaaaa

SEQ ID NO: 18335 - DNA, 827 bp, Homo sapiens
  misc_feature 6, 139, 140, 141, 142, 143, 152, 159, 164, 168, 173, 176,177, 180, 181, 182, 183, 184, 186, 187, 188, 189, 190, 199,200, 201, 202, 207, 208, 220, 222, 225, 226, 229, 232, 233,234, 235, 236, 238, 240, 244, 258, 269, 274, 276, 283: n = A,T,C or G
  misc_feature 305, 313, 314, 315, 317, 318, 322, 331, 339, 351, 352, 362,363, 370, 374, 376, 377, 379, 385, 387, 388, 394, 396, 397,398, 403, 405, 409, 412, 417, 418, 421, 424, 428, 429, 431,432, 434, 436, 437, 438, 439, 441, 444, 451, 454, 463: n = A,T,C or G
  misc_feature 464, 471, 472, 473, 477, 478, 479, 480, 481, 482, 483, 485,492, 498, 507, 508, 510, 512, 513, 515, 517, 522, 525, 526,527, 530, 531, 532, 542, 543, 544, 545, 546, 547, 549, 557,558, 560, 561, 562, 563, 564, 565, 566, 567, 568, 570: n = A,T,C or G
  misc_feature 571, 572, 573, 574, 575, 576, 581, 584, 585, 586, 589, 590,591, 596, 597, 608, 610, 611, 612, 613, 614, 615, 616, 617,628, 636, 637, 638, 639, 662, 664, 670, 674, 675, 676, 677,679, 686, 687, 692, 707, 713, 723, 736, 742, 752, 753: n = A,T,C or G
  misc_feature 754, 755, 756, 757, 759, 760, 761, 764, 779, 781, 787, 791,792, 796, 801, 802, 803, 804, 805, 806, 807, 808, 809, 810,811, 812, 813, 814, 816: n = A,T,C or G
tacttntagaattaattaaggcgggaggatgacttgaggccaggagttggagaccagcctggccaacatggtgaaaccctgtctctactaaaaatacaaaaattagcctgaaaaaaaaaaaaaaaaaaaaaaaaaaaannnnnccccccccnggggggnccccnaatnccccnttnnggnnnnntnnnnnccccccccnnnnggccnntttttaaaaaancnggnncanggnnnnncntntttnttgctactgaaaantgccatttcanaaaananaaacttntttttgctctttgacatcttgnaaaacatnnngnntttnttttttaanacaaaaanttttgtgctcannaaaaattttnnttgaaancttntnntnaaaccntnnaaattntnnnttggncntttnggnctttnnggnttnaaannanncntnnnngnaanttttttnccntaaattttnnacccccnnncccnnnnnnngnttttttntttttnaaaaaattnncntnnananttttnggnnnttnnnaaaaaaaaannnnnncntttttttnntnnnnnnnnntnnnnnnnttttnaannnaannnggggnnttttaaaaaanannnnnnnnttttttttagnggggcccnnnnatagggggggtttttttttttgngnaaaaancccnnnngnggggggnnggggnccccccctttttttncccccntttttttaanggggggggggggnaaaaantttttttggnnnnnngnnnttnaaaaattttcccccncngggggnaaanncttntttcnnnnnnnnnnnnnnanaaaaaaaaaaa

SEQ ID NO: 18336 - DNA, 315 bp, Homo sapiens
  misc_feature 22: n = A,T,C or G
ggtgccgggccccccctcgtgngtacttctagaaattaattaaggcggggaggtaagtactaccgattaccgaatccagaggtccagattagctactaatttgagttagaacaataataatcaactaccatttacagtgtatctctatgctattacataaagatatactggttcctgcccttaggcagcttagaagaggagacagcatttacaaaataacttactgaagtgacttagtgattgtttaggagatgggaagaacattcaaggaatatatttaacagacttgtagtgttttctttgggtaagaaattt

SEQ ID NO: 18337 - DNA, 438 bp, Homo sapiens
  misc_feature 416: n = A,T,C or G
agtacttctagaattaattaaggcgggagcaagatgtcatatcatcagaaaggacgttacagcctcaaagggttggaagcctcacttataagtgatgacttggaattgtagattcttatttcttggagtggaattagaattctataggtaaagcttttgactgattttggtaggcagagttgggccatcgttaccttctaaccttttagttttgttctgtcttagcaagccttagaaaaacagtgggctgtcttcaattccagctgcagcacatcctaatgactcctgccatgccaagacctctgcaccacacgctcaaaacccagatgtttccagcgtttcaaatgagcagacggaccccacagacgcagagcaagaaaaagaacaggaaagcccggagaaactggataaaaaangaaaaaaaaaaaaaaaaaaaaa

SEQ ID NO: 18338 - DNA, 637 bp, Homo sapiens
  misc_feature 589: n = A,T,C or G
agtacttctagaattaattaaactgattcttttgataactgcttataagaagataaaccagacagacaataaacgttcacaatagaaagagctaaaaacaaaactttggagaatatggacagccagtttgaaaggaggaatttcttgaatgctgatcacatgagacatgactcgtcagaagcaaccacaggtgttaactgatcaaactggctaaggatttaaaaagttccagtgagggcctagggaagtggcattgtccaacatgctggtaaatatgtatttgcacttcttctgaagaggaaatttgaaaataggtatgtaaagtttcaaaaaaatttattcttttaactaaataagttaaacctgggtactaattctaaggaagtcaagatgtatgcaaaattgtatgtacaaggctagtcattatattacttcaaaaatagatttatatatattctgattattaaaaacatgctacttataaaagagtcaagaagacacagcgatgtccatagaaataaaaacaaagaccttaggattttatctcttaaacttgccattgttacaactggacccccctaccccttantccatgtatatatatctaatttgaatttttatactcattggtttttaa

SEQ ID NO: 18339 - DNA, 230 bp, Homo sapiens
  misc_feature 20, 22, 26, 30, 33, 35, 37, 40, 41, 42, 46, 48, 50, 54, 69,118, 122, 128: n = A,T,C or G
tatactggccgtgcgttttnancccngaanaangntnaannngctngntnaccnggccccccctcgaantacttctagaattaattaaggcggggtgggggttgggggcataaacaanacanagggcncgcgcttgtcgtgttggtctcttgggaggtagtggggctaggccgggcgggtatccgcctctcccagcttaggtgagcgtccccgggcgcctccggagcgcc

SEQ ID NO: 18340 - DNA, 554 bp, Homo sapiens
  misc_feature 28, 30, 32, 33, 42, 49, 50, 56, 58, 59, 61, 63, 65, 67, 70,72, 75, 76, 82, 85, 90, 94, 96, 101, 110, 111, 113, 115,124, 132, 136, 147, 148, 149, 156, 157, 159, 160, 161, 164,171, 173, 176, 179, 183, 185, 191, 194, 199, 201, 210: n = A,T,C or G
  misc_feature 219, 226, 233, 243, 251, 262, 263, 267, 276, 278, 283, 309,310, 312, 317, 318, 320, 322, 323, 328, 347, 383, 384, 474: n = A,T,C or G
agtacttctagaattaattaaggcgggngnannatgacgtcnggacatnnacatcntnntngntnanacngngannccccgnctntactnaaantncaaanaattaagcnngncntggttgcangtgcatgnagtnccagcttctcnnnaggctgnngnnnganaatggcntnaanccnggangnggagcncgnattgngnggaaatggnacctctgcnctcgacnctgggcnacagatcaancctccatnctctcaggctnnaaanaggtgctgnanccacngaattgaaaaccctaacctacagagnngncctcnntnannggaanctcgtgaaagatttttacntttccctctccccccaacagcaatattgcttgccannatcccactgggggtcctaagctcaaaggttcttcatggttggttgtataggagttcttccttgtcccctgaaaccccaccctcaaccttnctgagagccttcaaagttggaaaaatatcaggattttctttctggtcactggaaaaaatatattccgataattttaaata

SEQ ID NO: 18341 - DNA, 713 bp, Homo sapiens
  misc_feature 53, 157, 562: n = A,T,C or G
agtacttctagaattaaattaaagggcggggcttaatgtttgcacagcagcanccagtggcacaaaacaccaaccgggccagcaccaaggctttggcagccaagcgggctggtccttcccaaggctggtgggcaccaggcaggggcctcaacccaangccgccaccccaggggcacaagccaggcccccaagggatccatctgggggcccctcaaggatctgaactgaaacctcaaaagcctggtttctccttaaggggggttactcttgaaaagggggggcattgggtgggaagcctttctggaagtgctgggaaatattctacatctcgatctggggcaagggtattgttggtatattacataatatttcaattaaagttgtaaccaccttaaagactttggtaccttaaaccttcttgccgttggataccccgtaccatgcctttttaaagggccggggggaatacctggaatttcaagaaaaatcctggtaagccgtggtaaattaaaaaaggaaaggaaggggaaaaatggggcaattggggaaatcacttgccttnctgtggaattttggaagggccaattggtggaaaggaaaaacaaatggccagttgaaaaaggaaaaagttctttcattattaagggacaagatatcaatttgcattcacaatttaatttaatctttcttggggtaatttttaataagcccct

SEQ ID NO: 18342 - DNA, 348 bp, Homo sapiens
  misc_feature 65: n = A,T,C or G
caaaagctgggtacccgggccccccctcgagagtacttctagaattaattaaggcgggtattttnaaaatttttatttattttattttttgagacggtcttgctctgtcgcccaggctggagtgcagtggcatgatcttggctcgctgcaacctctgcctcccgggttcgagcagttctgcctcaacttctgagtagctgggattgcagacacccaccactacacccggctaatttttgtatttttattttatcttattcatttatttatttttgagatggagtctcactccagtctgggcaacagtgatcccatccgaaaaaaaaaaaaaaaaaaaaaaaaaaaaag

SEQ ID NO: 18343 - DNA, 580 bp, Homo sapiens
  misc_feature 45, 46, 52, 59, 62, 71, 75, 76, 77, 79, 80, 89, 95, 103,104, 109, 111, 112, 113, 114, 115, 117, 121, 122, 125, 127,131, 135, 137, 141, 144, 146, 148, 149, 153, 155, 158, 163,167, 169, 172, 173, 174, 177, 181, 182, 184, 185, 188: n = A,T,C or G
  misc_feature 197, 199, 201, 208, 217, 228, 230, 236, 238, 245, 247, 248,249, 283, 336: n = A,T,C or G
agtacttctagaattaattaaggcgggtggatcacgatgccctgnnatcatntagcatnctngctaacctngtgnnncnntttctctantacaantatatatnnttatntnnnnntngtgnnggncncctncacncntagntantntnnaagntnacnctggngaangntgnnntcncaanncnnaangcttacttngnanccaatcntgccactanctttcccggcngnggacanancctagantnnntttctgtgagttctccacttcagtctcttcagcngagaacatggctcattcactggtctctgtttgttttcttcaatcaccccaaangtcccgataatattattgacctcttcctttatcagccacaatatcttaatgcaattcagacaatgtgtccacacattcttcgctatttgactacagcagtcataacaaacaaggatgttcgaaaacgtcggcaggttctaaaagatctagttaaagttattcaacaggagtcttacccatataaagacccaattacagaatttgttgaatgtttatatgttaactttgacttttgatgggggct

SEQ ID NO: 18344 - DNA, 228 bp, Homo sapiens
  misc_feature 5, 30, 47, 51, 75, 101, 102, 105, 108, 142, 160, 167: n = A,T,C or G
gggtnccgggccccccctcgagagtacttntagaattaattaaggcnggtnggggtgcttctggtacgacagaanggcctgttagtattgcctaatatccnncantcnctttaaaacaaagaccttcgtatatacactctgnacactggtctaattctgnttccccngagcatagtacaatatatgtttgctaagaatccaaggaatataaggtgatcaccaggaagg

SEQ ID NO: 18345 - DNA, 247 bp, Homo sapiens
  misc_feature 161, 202, 208, 235, 236, 237, 246: n = A,T,C or G
agtacttctagaattaattaaggcgggggaaatgttacttattggccgaaatcatctaatgtcttttttgtgaacaagaaattaatttgttaggacttttgtactataaattagaggtaatcttaagatttaaaaaaagaagaaaacacccttaaatgatnaaaaaaaaaaaaaaaaaaaaaaaaaaaaaaaaaaaaaaaancccccnaaaaaaaaaaaaaaaaaaaaaaaaagnnnccccccccng

SEQ ID NO: 18346 - DNA, 520 bp, Homo sapiens
  misc_feature 29, 30, 31, 33, 35, 39, 41, 44, 45, 51, 60, 61, 62, 64, 65,67, 68, 70, 74, 75, 76, 79, 82, 84, 85, 87, 93, 94, 126,158, 162, 178, 180, 189, 224, 241, 242, 245, 257, 263, 281,338, 360, 393, 418, 449, 453, 501: n = A,T,C or G
agtacttctagaattaattaaggcgggannntnanaagncngannaatatngaccatctnnngnnanngngagnnnccnggngnntnctaatnntgctgacctttatctcaggcttggctgctttngccaagtcttcctgggagaagcttacgcactnatantggaatagaactcttnangttggtacnttgcacatgatccatggatctgtgcctttgatcanccatctctggtttgagnnttnacactccttctngggctnaactcacattctgggaangccagccagctttacctgctgttcctgagccttacgctggccactgtcaacgcccgntggctggaaccccgcaccacancttgccatgtgggccctgcaaaccgtggagaangaacgaggcctgggtggggaggtancaagcaggcaccaaggtcccgatccctaccnccancttttaaaaaaagaccccaagtcagtgctctccccagaatttttttanatacatgggcttgcctttt

SEQ ID NO: 18347 - DNA, 639 bp, Homo sapiens
  misc_feature 578: n = A,T,C or G
agtacttctagaattaattaaggcggggtggtgcatgcatgtaatcccagctactcaggaggctgaggcaggggaatcatttgaacccaggaggcgggggttgccatgagcagagatcatgccactgcactccagcctgagcaacagagcgagacttcgtttcaaaaaaaaaaaaaggaagtttaatatttgttgcaggctaatagcatatgttggagtaacttgattatacaggaagaaataaaatactatttgtaactctgaaagttatggtttaatttttttaaatactgcaactagttttgatatgccagaaaactcagtaatgaggtatcatatatacccacagctaaaccattaactcaaactcaattgctatatattttaaatttaagattttactatacatatatttatcactgacaaatacataagttgtgaataacaatgagaagggtgaaacgttttcaattcgggtcaaaagtaattattgatgaaggatcaataagccaccaaagaagtataatgacaattttctatctacaggatagtttgagagctaaagttagagtatctgncctaaacttcaaaaacagacccacttcaccctactaccagacaaacctttagccaacccat

SEQ ID NO: 18348 - DNA, 217 bp, Homo sapiens
agtacttctagaattaattaaggcggggtaagatttgccgagttccttttactttttttaacctttccttatgagcatgcctgtatttaatttgattaagtggaggctaaaaacaagtgggaagaatgacggtattctaataaagcgaattatgttaaaaaaaaaaaaaaaaaaaaaaaaaaaaaaaaaaaaaaaaaaaaaaaaaaaaaaaaaaaaa

SEQ ID NO: 18349 - DNA, 488 bp, Homo sapiens
ctcgagagtacttctagaattaattaaggcgggcagatcaagaggtcaggagtttgagaccagcctggctaacatggtgaaaccccatctctactaaagatacaaaaaattacctcagtgtggtggtgcatgcctgtaatcacagctactcgggaggctgaggcaggagaatcgcttgaacccaggaggcagaggtttcagtgagctgagattgtgccactgcactccagcctgggcaacagggtgagactctgtctcaaaataaataaataagtaagtaagtaagtaaaaaaacaaaagtaaagagcaggtttggcgctctgagccctctccagttgagttcttaccccatctttttaagggccttcttgacaaatccattacatttctgaaaagagcccggtttctcaagggatcaagaatcttctttcctagtctcctgctagagtgctgttatttttggggggttgtccagattaaaaaaatct

SEQ ID NO: 18350 - DNA, 431 bp, Homo sapiens
  misc_feature 51, 296: n = A,T,C or G
agtacttctagaattaattaaggcgggatcttggctcaccacaacctccgnctcccaggttcaagcgattctcctgcctcaacctctcgagtagctgggattccaggcatgtgccatcacaccctgctaatttttttttatttttagtagagacggggtttctccatgttggtcagcctgggcaacaagtgaaactctgcctccaaaaaaaaaaaaagaaaataaatacccataaattgaaggaaactgtattttatttttaaatagccacaattactaatgggttgtacagcttntcaaacttcagaatcagattggactccgtcccaccccaccccttgtttcctgttccatgttgatttcatgcagagcttgcttttttatcacagcagccactgcaaacagggctttattaggatgtgacgtcatcg

SEQ ID NO: 18351 - DNA, 338 bp, Homo sapiens
  misc_feature 136, 181, 194, 202, 207, 208, 212, 213, 221, 223, 226, 229,235, 238, 245, 248, 251, 260, 268, 269, 280, 284, 287, 290,296, 298, 304, 308, 311, 314, 315, 320, 323, 327: n = A,T,C or G
agtacttctagaattaattaaggcgggagaatcgcttgaacccgggaggtggaggttgcactgagccaggatcccgccactgcactccagcctggcgacagagcaagactcagtttaaaaaaaaaaaaaaagggancagggagggaaaaaaaaaaaaaaaaaaaaaaaaaaaaaaaaaaangacccaaaaaaanaaccaaancaaanntaanntaacccgnanggnaangggggnttntcccccnggnccnggcaaaccntttaaacnnggccccaaaantggnaanagnatgggntnggccanaacnagnttnnaaaanaantttngcccttttttc

SEQ ID NO: 18352 - DNA, 322 bp, Homo sapiens
  misc_feature 33, 37, 54, 143, 153, 155, 159, 163, 172, 177, 178, 181,183, 187, 193, 207, 213, 214, 244, 246, 251, 262, 263, 265,278, 280, 283, 288, 290, 293, 296, 298, 300: n = A,T,C or G
agtacttctagaattaattaaggcgggagaatngctngagcacaggaggcagangttgcatgtaagctgaaataacaccactgcactcccgcctggaagacacagtcagactgtctcaaaccataaagaaaaaaaaaaaaaantgaggctggncncagnggtngatcccttnggtcnnacntncttnaaaggntgaaacaaaaccanccctcnnccccaggatttgggggcctggcggttgcantnacctntaactgccccnntnaactccaccctgnanaanaaacnangtnccntntntccaaaaaaaaaaaaaaaaaaa

SEQ ID NO: 18353 - DNA, 444 bp, Homo sapiens
agtacttctagaattaattaaggcgggcagatcacttgaggtcatgagttcaagaccagcctgaccaacatggtgaaaccccacttctaaaaatacaaaaaaaattagccgtggtggtgcgtgcctttagtcccagttactcgggaggttgaggcagacgaatcgcttgaacctgggaggtggaggttgctgtgggccaagatcacgccactgcactccagcctgggctacagagtgagactttgtctcaaaaaaaaatatatatatatatatatgattgtaatccatagcttgaaaaacaatgatttaatctctctctcggcctttatctcatgctgctttccactttaaaaaaaccccctgtgggtaccaaaatctacagattcttaagtcccttttcataaaatggtagtagtgtttcagtgcacatccttttgtaccctt

SEQ ID NO: 18354 - DNA, 465 bp, Homo sapiens
  misc_feature 37, 56, 57, 65, 70, 77, 99, 102, 105, 108, 109, 116, 126,129, 137, 146, 166, 200, 201, 202, 203, 205, 207, 231, 252,253, 258, 261, 262, 263, 277, 320, 344, 347, 398: n = A,T,C or G
agtacttctagaattaattaaggcgggggagaggacnatcggctctgggagactgnnaagtgttntcatnctctgtnaacgtggtgctggtagtgactngtngantgnnaattctntctcatacanaanttataaanattctctangaaaaaaaaaaacataaaangaaacgcctaatacaaaatccaaaattcttactnnnncnangtaaaatgtccccgttgctacaanatcaccacggttttcaccccnnctcanacnnnggttctttgtgtangttgttcaacagtgttgtgccagcctacaggaggaaaggccanactcacagaagggtgttcatttanaanaaagcaacactaatgattcaaacagcttctgaattttgtgttgtctcacanaaagccttatcataaattccataattctaattaatttaccaagataatgtaattcatttggttttgt

SEQ ID NO: 18355 - DNA, 197 bp, Homo sapiens
  misc_feature 89, 93, 104, 107, 115, 125, 149, 159, 160, 165, 166: n = A,T,C or G
aacaaaagctgggtacccgggccccccctcgagagtacttctagaattaattaaggcgggaggagaaccagagacctgatttcaagttnggtnttagaatcatntgnagagcttngggaaacttntctgagcctcagtttataaatagncattcattannctggnntttattgagagcctactgtgccatttaaaaa

SEQ ID NO: 18356 - DNA, 416 bp, Homo sapiens
  misc_feature 3, 21, 27, 51, 69, 124, 125, 134, 169, 185, 192, 200, 204,209, 210, 246, 251, 262, 268, 269, 299, 382, 403: n = A,T,C or G
tgngtaccgggccccccctcnagagtncttctagaattaattaaggcgggnggatcactacgtcagganttcaagaccagcctggccaacatggtgaaaccctgtctgtactaaaaatacaaannttagctgancatggtggcgtgtgcctgtaatctcaactactcangaggctgaggcagganaatcgcntgaacccnggangcggnngctgcagtgagctgagattgtgccactgcactccancctgngagacagagcnagactnngtctcaaaaaaaaaaaaagcatttttctgntttaatgtttggagactttttttttgttctctccctttcctgaaccctattctgatcctgaaccaaatttatagcaatataantagtgttaatctaaggcattnctcatcaaaaaaa

SEQ ID NO: 18357 - DNA, 249 bp, Homo sapiens
agtacttctagaattaattaaggcgggaggaataaaaaatacatttctacttgtgtgcacctgcataaagaaacactgaaagaatatataagaaactaataaaagcagttacctaaggggtgtgagatggaatagggtagataaggacaggaataggagtgagtcctcacaatgtagatcttgttatattgttttgataactgtgccatataaatgtaattacctattcaaaacaaaaaaaaaaaaaaa

SEQ ID NO: 18358 - DNA, 266 bp, Homo sapiens
  misc_feature 141, 143, 144, 160, 167, 170, 181, 183, 185, 187, 193, 199,204, 209, 212, 218, 225, 233, 235, 238, 249, 255, 258: n = A,T,C or G
agtacttctagaattaattaaggcgggagaatcacttgaacccaggagttggaggttgccataagccaagatcgtaccattgcaatccagcctgggcgccagagtgagattcggtctcaaaaaaaataaaaaaaaaaaaantnnaaattgtcaaactgcncaaaaanatnagggagtcatntntncntgtgtncaacanctttntaaanacncagggntttaaanaatgacancntantcccatggaancattanttntaaaaagt

SEQ ID NO: 18359 - DNA, 393 bp, Homo sapiens
  misc_feature 21, 48, 335: n = A,T,C or G
aagggaaacaaaagctgggtnaccgggcccccccctcgaaagtacttntagaaattaattaaggcgggggacagaacgcagcaccttcttagcgatctaggcctggcaagagctctggccccaaggcctcctcttcccaggggctgccaagtcctggccctggccctggcatatcaccccgcactgtggggccaggcaccactagcctggctcaaatattccccaggggagactgctgtgtgcctgccccgcctgcctgctggctctcccccagccccacatcccctctgggaagaagaatgttaaaataaaacctggacacaagggaaaaaaanaaaaaaaaaaaaaaaaaaaaaaaaaaaaaaaaaaaaaaaaaaaaaaaaaaaaaaaaaa

SEQ ID NO: 18360 - DNA, 463 bp, Homo sapiens
  misc_feature 83, 194, 199, 238, 245, 247, 301, 308, 311, 319, 321, 322,335, 355, 356, 357, 358, 359, 360, 361, 362, 363, 364, 365,366, 367, 368, 369, 370, 371, 372, 373, 374, 375, 376, 377,378, 379, 380, 381, 382, 383, 384, 385, 386, 387, 388: n = A,T,C or G
  misc_feature 389, 390, 391, 392, 393, 394, 395, 396, 397, 398, 399, 400,401, 402, 403, 404, 405, 406, 407, 408, 409, 410, 411, 412,413, 414, 415, 416, 417, 418, 419, 420, 421, 422, 423, 424,425, 426, 427, 428, 429, 430, 431, 432, 433, 434, 435: n = A,T,C or G
  misc_feature 436, 437, 438, 439, 440, 441, 443, 444, 445, 446, 447, 448,449, 450, 451, 452: n = A,T,C or G
agtacttctagaattaattaaggcgggctctggagaagattgaccttaagttcattgacaccacctccaagtttggccatggnccgcgtcccagaccattggagggagaagaaagcttcattgggaccacttgaagaaaaaaccaattgcaaaggaagaaaggacttaatgccaggacaaaattttcaagttgnggggncttaattaaaagtatttttcacttgaaaaaaaaaaaaanaaaaaanancccccaaaaaaaaaaaaaaaaaaaaaaaggccccccccccggggggggcccccnttccccnttnagaggggntnnttccccccccccntggggccggttttaaaaaannnnnnnnnnnnnnnnnnnnnnnnnnnnnnnnnnnnnnnnnnnnnnnnnnnnnnnnnnnnnnnnnnnnnnnnnnnnnnnnnnnnnnncnnnnnnnnnnaaaaaaaaaaa

SEQ ID NO: 18361 - DNA, 309 bp, Homo sapiens
  misc_feature 299, 309: n = A,T,C or G
agtacttctagaattaattaaggcggggtcacaagaagcctaggaaagacccaggagttccaaacagtgctccctttaaggaggctcttcttagggaagctgagctaaggaaacagagggtaagttatgttagccagaattttcattgagtggtgtagtgtgttatgtgtgatatttttcagagtaaggtaacaacactagtcactggttcacctatttcccttatggctctgacagcttgaagaactaaaacagcagcagaaacttgacaggcagaaggaaaaaaaaaaaaaaaaaanaaaaaaaaan

SEQ ID NO: 18362 - DNA, 451 bp, Homo sapiens
  misc_feature 216: n = A,T,C or G
agtacttctagaattaattaaggcgggtgatggtggctatgatggtggggatgatgaggctattgttttttgtgaattcttcgataatggcccatttgggcaaaaagccggttagcgggggcaggcctcctagagaacaggctgtctagtcagatgtagcttgatctgtggcaaaaccaagtgtggtctttcagcttcagtgtgttagcatcccancacctgggatggggtttgtgggcaagttgattttgccacactgtagggcccaggtggtcccattgccaccgtgaagccaaattctagcccaagtctggtagagcagtctggcagctagttttccggggaggatgatgtggtgggacagaggacctcagtggcctattacggagccctcttcccagactaaattcatagccgagagctcggggggatggtagagttaaaatttaaa

SEQ ID NO: 18363 - DNA, 428 bp, Homo sapiens
  misc_feature 27, 34, 38, 45, 48, 50, 62, 64, 67, 71, 78, 79, 92, 95, 98,100, 102, 111, 112, 117, 121, 133, 134, 143, 145, 149, 154,158, 160, 161, 172, 174, 187, 188, 189, 191, 192, 195, 298,311: n = A,T,C or G
agtacttctagaattaattaaggcggnacgattnttgntaacctngcncncacacacaggtngngantctnacgggcnncatggttcctganccntgntnangatgcaacnntcttntaanaaaaaaattgtnntataataanantaanaatangaantnntctctcttgtnantgttttttggacnnnannggngctcgcatttggcttttcgttggtttcatgttggcctttggatctctgattgcatctatgtggattctttttggaggttatgttgctaaaaaaaaagacatantatccctggaatngctgatttttccagaatgccttcatcttttttggagggctggtttttaagtttggccgcactgaagacttatggcagtgaacacatctgatttcccacagcacaacagccctgcatg

SEQ ID NO: 18364 - DNA, 431 bp, Homo sapiens
  misc_feature 211, 289, 291, 306, 321, 331, 341, 347, 348, 349, 350, 351,354, 355, 356, 358, 359, 360, 386, 410, 412, 415, 416, 417,418, 419, 420, 421: n = A,T,C or G
ctcgagagtacttctagaattaattaaggcgggtgtgctgtgagctgtaatcccagctacaaggtgggaggattgcttatgcctgggtgattgaggatgcaatgagctgtgattgtgccactgcactccagcctgggcgacagagtgagactccgtctcagaaacaaaaagataaactgacaagatacctgcacaataccatctctcacantgtgaataaataaaggcatgatggaattacacagcaatgtatgcttacctctacctgaagacaaaaggaaaagttttntncaagttgattccctngagttgaaccctaangaacaaattntagaaaaaantttaannnnnaannnannnaaaaaaaaaaaaaaaaaaaaaaattngggctaaaaaggggggaattttcntnaannnnnnncccccccccc

SEQ ID NO: 18365 - DNA, 400 bp, Homo sapiens
  misc_feature 114, 197, 200, 203, 208, 209, 213, 220, 229, 243, 245, 250,262, 275, 298: n = A,T,C or G
agtacttctagaattaattaaggcgggaggcaatggaaaagagactaaaggcttgaatggagaaaaaaagaaattaaatgtgtcttgtaagcctggcgtctgatcatgtcttanacgaagtaaggtataagctggccagagactcctttgtgacacaaaaggtgaagttacagatattccactaaatttaatttttnttntgncttannacanctggtantatgcaccntgatggaaaaaaancntctcnttcaattccatngggctttgacgtnagaatagacataaagaagctaanaattgacaatctaaaaataagcttgcacttttacagtcaattgattttatacaaacttaacgaaagaacacaatgggaaaagaatagtcttttcaacaaatg

SEQ ID NO: 18366 - DNA, 348 bp, Homo sapiens
agtacttctagaattaattaactagaaatttttataatttttagttcaaccaaagtaaataattatgtggtgtatttatttctatttgtaggatatgggccctcacattttccaaacctgtccatctgctaactattttgactgcagagccatgtccattggagcccgttcccaatcagctcgtacttacttggagagacatatgtctgaatttatggagtgtaatttaaatgaactagttaaacatggtctgcgtgccttaagagagacgcttctgcagaacaggacctgactacaaagaatgtttccattggaattgttggtaaagacttggagtttacaatctat

SEQ ID NO: 18367 - DNA, 405 bp, Homo sapiens
  misc_feature 221, 222, 226, 230, 231, 232, 236, 237, 244, 245, 246, 247,249, 252, 266, 287, 288, 289, 296, 303, 304, 311, 335, 339,353, 362, 363, 364, 373, 374, 377, 378, 383, 388, 391, 394,401: n = A,T,C or G
actaaagggaacaaaaagctgggtacccgggccccccctcgagagtacttctagaattaattaaggcgggtgcctgtattgccagctactcggaaggctgaggcaggagaatggcgtgaacctgggaggtggagcttgcagtgagcggacatcgcgccactgcactccagcctgggcgacagagcaagactccgtctcaaaaaaaaaaaaaaaaaaaaaanntttntttnnnaaannttttttnnnngnccnccccccggttttgnttttttttgggaaaaaaattnnngggtttnaaaaacnngactttncccccttttttgaaaaaaaagggnggcnttgcatgggttttnttggggggnnnaaaaaaaanngannacccntttgnggnccnccccccntttt

SEQ ID NO: 18368 - DNA, 416 bp, Homo sapiens
  misc_feature 270, 273, 274, 280, 285, 288, 289, 300, 305, 306, 309, 313,314, 320, 322, 323, 327, 328, 329, 331, 332, 336, 337, 348,349, 351, 355, 366, 367, 368, 369, 370, 371, 372, 374, 375,376, 377, 378, 379, 380, 383, 391, 393, 395, 400, 401: n = A,T,C or G
  misc_feature 404, 413: n = A,T,C or G
agtacttctagaattaattaaggcgggcggatcacgaggtcaggagatcgagaccatcctggctaacacggtgaaactccgtctctactaaaaatacaaaaagaaatcagccgggcatggtggcgggcacctgtagtcccagctactcgggaggctgaggcaggagaatggcgtgaacccgggaggcagagcttgcagtgagccgagatcgtgccactgcactccagcctgggtgacagagcaagactctgtctttaaaaaaaaaaaaanacnnataaanaaagnggnnccccccccccnggggnnccncaanncccccntnnaggnnntnntttnnccccccccccnngncccngttttaaaaannnnnnngnnnnnnnaangcccactnancnttgcnntgngctccctgnggg

SEQ ID NO: 18369 - DNA, 367 bp, Homo sapiens
  misc_feature 159, 244, 261: n = A,T,C or G
tccaggaagttcaggctgcaggaagctatgatcatgccactgcactccaacttgggtgacagagcaaggccctgtctccaaaaaaaaaaaaaaaaaaaaccactttaatggatgaattttagctaatttgatctatattttattccacatcctctttgnaataacatttggcaaatatgtgttgatttatactgggtattaggcactgtggtgatgtggaagcttagggcaaaatgcatactgntttctgccttctataancttacaatctgtctgtatgtgtgaagggaaataatgctagatgccatttattgagttctactctgtgccaggcaccatggcttgactcattttacttcttatcctt

SEQ ID NO: 18370 - DNA, 471 bp, Homo sapiens
  misc_feature 16, 39, 49, 51, 61, 65, 67, 73, 78, 85, 86, 93, 98, 117,156, 200, 204, 216, 235, 306, 369, 432, 448: n = A,T,C or G
atgattactggccgtngttttacaacaggaaacacgctntgaccatgantnctggccggcntctncnagaganaactnctataannaatgatngcgtntctctgatgccctatctanacccgttcttccttttcctacatttgaactttttctganatagtttcagtttccataatctctgtgtgatgattttcatcaanaatnccgactaagganattttattcttttaagaanatttgttcaacatatacttacatgagattttgttctttttaaagactgtgtaaataaattatctgattaanaaaaatttttctactttgttttgactcttgaatagggaaatgcttgcctatatttaaatgcancctgctaaaaatacttgttctgacctattagtgaagtatatcacactatctaaagcaatctgnagatttaatgcactcnctatgaaaatctcgctgatgttt

SEQ ID NO: 18371 - DNA, 434 bp, Homo sapiens
  misc_feature 298: n = A,T,C or G
agtacttctagaattaattaaggcgggcaggccaggcgccagcggggggctgctgggctcctgcttgtaggggcgcacagcctgggagtccccaggcgccggcccctcagccccaggggcggtgcctgctaagggaatcatcccactgtcctcctttccacctgtggccccagggccctgcgtcacatcctgaggcaccctcgttgctgacgacccatcgggggaggctgctggcccctgaaatgagagcacagttttgaactcagaaacctgagcaagggcctctatttctcctctnccaatcaccgtcgaccagctgtgcaatcccatccctgctgggaggaagccacagtcatgctgggcgacactgaagctgccccacagagaggcccccaggtgaggaaccaaggcctcctgccaaccccctgccaggg

SEQ ID NO: 18372 - DNA, 501 bp, Homo sapiens
  misc_feature 31, 32, 33, 38, 39, 40, 41, 49, 50, 58, 60, 62, 64, 67, 69,72, 73, 75, 76, 77, 78, 88, 91, 92, 98, 99, 101, 108, 110,111, 114, 119, 120, 127, 130, 132, 138, 144, 148, 165, 182,202, 214, 228, 245, 263, 268, 318, 321, 336, 337, 340: n = A,T,C or G
  misc_feature 368, 377, 433, 454, 456: n = A,T,C or G
agtacttctagaattaattaaggcgggggcnnnggacnnnnttcgactnngcccttgngntngntcnanccnngnnnngcctggacgnggnngctcanntnaaggctncnnttnttctnnaaaactntancnacgaantgcaanaatnactttacagaaacatgncgctaggaatccattcncactgtgttcttctgcaacnaagactccggtnaggtgtagatgtgnctcagaaattcccttgnggcttccctactttacgntcgancattccgaaaccctcacactcccacgggatgatttactataggcctacanatntggcgtcgtataacnnatngaaaatcccttgtttgcggatttaatcnctggggatntgacaaactcctgtccctgcttgccctggttaagccagaagtctggactctcaaanagaaatgcattctggtgattncntggatccaacacctgatccccaagattgaaaatggaaatgatttt

SEQ ID NO: 18373 - DNA, 443 bp, Homo sapiens
  misc_feature 31, 32, 36, 38, 258, 368, 374, 382, 413: n = A,T,C or G
agtcttctagaattaattaaggcgggtcagnnagtngntcttatttatttttccataaaattatgacctgattcattatcttggcattgatctataactacagttctttggaaaatatataaggtctgaagtcaggaaaacatctcagaagcattcactctaccatgtaaccattaatttaccctgatttggaaaaatagcctgaaaactagtgaatgcttccatctcaggagaaacttcagtgtcactagatatggnaaactgtagtatgctattttaacaaaatccagagcaaaaaatggatgaatccaggggaactacctatagcaccatctgaggcttaggatgttaaaaaaaaaaaaaaaaancagaancaaaacanaacaaaactcttctggtaaaataaaatgatncttaaattgataaaaactaatatttaacat

SEQ ID NO: 18374 - DNA, 583 bp, Homo sapiens
  misc_feature 45, 53, 58, 59, 63, 64, 66, 67, 68, 72, 75, 82, 93, 107,108, 110, 117, 118, 127, 129, 130, 132, 134, 137, 138, 142,145, 146, 148, 160, 163, 166, 181, 189, 190, 191, 231, 233,235, 236, 237, 238, 239, 240, 245, 246, 248, 249, 254: n = A,T,C or G
  misc_feature 307, 402: n = A,T,C or G
agtacttctagaattaattaaggcggggcatcctgagccaaactntgtctccnaaaannaaannannncttntanaaaaacnatcttttcctnggaggaagatggtnnanttgggtnngcccttttnanngncnccnnttgntcnntnccaaacaaaggnagnacnttatttggaatcctntccgaaannntatttccaatttatcaaatgtgcctgtcccaaaatttgcngntnnnnnncctgnngnnattgntcatgactttaacaagaaacttacagcctccccccatcttaacctggataaangctatgtgatccctctgaacacttccattgttatgccacccagaaacctactggagttacttattaacatcaaggctggaacctatttgcctcantcctatctgattcatgagcacatggttattactgatcgcattgaaaacattgatcacctgggtttctttatttatcgactgtgtcatgacaaggaaacttacaaactgcaacgcagagaaactattaaaggtattcagaaaccgtgaagcccgcaattgttccaattcggcattttgaaaa

SEQ ID NO: 18375 - DNA, 739 bp, Homo sapiens
  misc_feature 576, 599, 607, 611, 617, 621, 643, 656, 679, 687, 700, 718,719: n = A,T,C or G
agtacttctagaattaattaaggcgggatgttagaaagaaaacagccgcccaccgcaacccctgctctgtgcagctgcatgcctgactaataccagcctgagcggggcagggcagagattagaacagagggagagtggagctgacaagcttactgggctacactgaggtttctgttaactaattgttattcaaggactttgtatttcttcacaaatgaccaaaaatgttgcacagcaaggttccctgtgaaatacatactttcctccattatatatacatatatatatatatataaaatccagaactcttcatgctaactctagaagcagcagtggaaaatcaagacagggactgaatatgctgtacccacagatgcccccaagcccacagcatccatatctcagcttgcgccagctattcaaaaactggaggccgggcgcggtggctcacgcctgtaatcccagcactttgggaggcagaggcgggcggatcatgaggtcaggagatcgagaccatcctggctaacacagccgaaaccccgcctctactaaaaatcaaaaaattacccaggcgtngtggtgggcgcctgtagtcccanctttctcnggangctgangcangaaaatggcgtgaacccgggangcgggacttgcantgagccgaaatcggacccactgnacttcaancctgggtggacanaaccgagacttccgtctnnaaaaaaaaaaaaaaaaaaaa

SEQ ID NO: 18376 - DNA, 696 bp, Homo sapiens
  misc_feature 31, 32, 33, 37, 41, 42, 50, 55, 61, 68, 70, 74, 77, 87, 93,94, 203, 204, 206, 222, 331, 403, 415, 418, 453, 455, 475,482, 490, 501, 514, 519, 521, 530, 532, 533, 545, 550, 551,554, 566, 569, 570, 575, 580, 583, 589, 600, 604, 613: n = A,T,C or G
  misc_feature 615, 628, 631, 635, 650, 655, 663, 668, 671, 694: n = A,T,C or G
agtacttctagaattaattaaggcggggagnnntagngatnnatatgttntcttnacttcnctttgcntntganatnctgctggaanccacgnnaacctgtatccactattacgaggtaaaaatcactcaaatggcccattcatttgtgttgtctctcaaatctaaaataaaaaataaaaaaatataaaaaagaaaaaagtgnnangagggagaggatcaangaacaataactatcaggtactgtgcttagtacctgggtgaagaaatggtctgtacacgagacctccgtgacatgagtttgcctttgttaacctgcacatgaagccccanacctaaaataaaaaaaaaattaaaaattttaactcaattaaatcataaacttaaatgtaaaatgtaaagtantaagacttttanganaaaaaggaggggaaaattttcagggggatatgaananaggttgattaatgggtccanattacantttgatanaaaaaaataanatctgtctgatanatcantnaggtgactntnntttacaatcatnaatcnngtntttcaaaaatanctnnaaaanaatanttnggaatntttcttccatnaaanaaatttttnanggtgatggatttnccnattnccctgatttttttcnaattnttttaatnttacnttnctgaatgtcccctgaaaattttnaa

SEQ ID NO: 18377 - DNA, 406 bp, Homo sapiens
  misc_feature 28: n = A,T,C or G
agtacttctagaattaattaaggcgggncagactgcaaggcagccaggtagttctccagagccatccgacggcggtcattcagcatagcttccactcgggccaggtgggtctccaccagctgctgcttctcactggctgcttccttctctaaagctttaaccatggcttggaagtgctgaatcagagtctgcctctctgctttggggaggttcttagcttgaagctctgcctcttcccattccttctttaccctgtccattcggttgcggtgccgaatctccagctgctcctagccactgtcttctcctttccaggcatgactgaaatctaatcactggaaaccatgtgattctaaatatattatgtaaatgttaatgtattatgttttttaaaacattgcattca

SEQ ID NO: 18378 - DNA, 401 bp, Homo sapiens
  misc_feature 150, 386, 387: n = A,T,C or G
agtacttctagaattaattaaggcgggaggtcaagaccagcctgggcaacacggtgaaaccccatgtctactaaaaatacaaaacttagctgggcgtggggccacatgcttttgtaatcccagctactaacacttgaatccaggaggcanaggttacagtaagctgagcttgcaccactgcactctagactctgcatctcaaacaaacaaaaaaacaattgtgggaaggttcctaggtttactgcactccagtttaatgcttgtatagtactcacacttatatctcaagacttttcaaaggctgacccacccgttttctgccacatgcagtcagccccaaggcctcatctgtacccaaaggcctgtggacaataactgcctcagcnnaaaaaaaaaaaaaa

SEQ ID NO: 18379 - DNA, 437 bp, Homo sapiens
  misc_feature 28, 34, 36, 40, 42, 43, 47, 49, 51, 59, 64, 65, 69, 71, 72,96, 101, 102, 104, 108, 119, 123, 125, 127, 139, 140, 142,145, 149, 155, 158, 163, 167, 170, 174, 179, 214, 218, 219,221, 224, 227, 229, 230, 232, 235, 236, 238, 239, 250: n = A,T,C or G
  misc_feature 251, 284, 291: n = A,T,C or G
agtacttctagaattaattaaggcgggntgactntnaacnannggcnantnttaaaccnaaganngganannggttatcactggtgttatctgccnaattnntncctncatctaaattncacncntnaaacaggacacnntntcngccntgttanacnttatnagangancaangtccncattctcacctaactcatgactggcaagagacttnactnnanccnaangnncngcnntnnccgaacattgnnccacgtgcttagagaaataagatactgttgatnttctaangtagcagcattatttattacacaaaaaaaacctgcaacataggtctccatcaaggaccacagaaggccaggatgcttggcctggcttgaggagtccagggaccataatggcagacctgaaagacaggcaaatacaccagctgaaaa

SEQ ID NO: 18380 - DNA, 416 bp, Homo sapiens
agtacttctagaattaattaaggcgggtggcaggggacagcttgcaagtatttgggcttatagtctcccagcccacagcctctctcccttgctagtgttagagagatgctgatcacgtttactcttctcttattttctctgcgtatccccttaccttaactttttgaccatgttcttgagcctagagttcagttagtctcatttctccaggagtcctggagacagtgtccttccacctaccatgtgtggagtttacctgccaccccaatgcaaagatagtaagcctgagcataattgattctcgatttcttttgaattaataactggtatatataaccattaattccaattataattcacatgaaaatgtcagagcttctattgagagcaaaagcaaactttagcattagcctggt

SEQ ID NO: 18381 - DNA, 354 bp, Homo sapiens
  misc_feature 13, 15, 16, 19, 21, 30, 36, 40, 44, 53, 65, 76, 79, 82, 84,85, 88, 89, 90, 92, 95, 103, 110, 117, 119, 121, 124, 125,130, 133, 135, 139, 144, 146, 149, 152, 155, 160, 162, 167,168, 173, 182, 189, 192, 193, 194, 195, 196, 204, 205: n = A,T,C or G
  misc_feature 206, 213, 218, 219, 220, 228, 229, 231, 234, 238, 245, 247,251, 253, 254, 255, 256, 258, 259, 262, 265, 266, 267, 268,269, 270, 272, 278, 280, 282, 283, 284, 287, 289, 291, 292,295, 298, 311, 327, 329, 344, 353: n = A,T,C or G
aaaataatttganannatnanggaatattnttaaanatanaatnattcttttnaaaagaaaaaanattaatttaancantgnanntannnangtntaaaaaanaaaaganattcccntnantanntaaanttntnaggnaaaantnttnaanacnttttnanaaaanntttgnattaatttnaaaaatnaannnnnaaatttgnnnacttttntttgnnnaaattttnnantanaatntggtaanantaanannnntnnaanaannnnnngnataaantntnnnaantntnnganatnttatatttaagcncaaaaaatttggggtntngataataagcccaanaaaaaaaana

SEQ ID NO: 18382 - DNA, 409 bp, Homo sapiens
  misc_feature 31, 39, 55, 63, 70, 72, 114, 116, 123, 129, 144, 162, 168,173, 177, 182, 185, 192, 217, 238, 247, 251, 272, 276, 277,278, 279, 281, 291, 292, 298, 300, 307, 308, 310, 311, 317,336, 339, 344, 351, 352, 353, 357, 358, 360, 371, 374: n = A,T,C or G
  misc_feature 375, 376, 382, 383, 384, 388: n = A,T,C or G
agtacttctagaattaattaaggcgggtccnccaccatnaactttgctcaccatntatccttnaggactnangcagtcaacatatgcccttaaattccctggtgggggacccgntnctttacnacactnttaatgaacaattgnaaattacaattttttaangttacntttanagtntctcnacnaaacatntaattcttaatctaaaaaaacatgnattaaagggtttctaaatctntaaaaatgntttntgcaataaaaaaaaaaggggnctcnnnncngggggggggnntttccncntttaaannanncatttnggggggcttgagggggggnggnttttnaaaggcnnngganntngaaacccgggnggnnnacatannnaaantttttttccaaaaaaaaaaaa

SEQ ID NO: 18383 - DNA, 375 bp, Homo sapiens
agtacttctagaattaattaaggcgggtgtcactccttgccaaagctttagaaagccttcctcttcaatgatccctagggctgtgcgcaccattcccctatagggggcagattctcttgcaccgtctcccaaccgagcaagagctgcttctccttgcatttggagtcgagtttttgtgagatccaggggaaaggttgctaacaaaaacacaaatgcagggaaaaacccacaacattcagagaaacaaacaaaaatctaaaatcataggagtaatattttcccaagactggttgttctcaaattttagaatatatcagaatcagctagggagattttaaaaattagaaatttcctagccccgtgcccatggattct

SEQ ID NO: 18384 - DNA, 238 bp, Homo sapiens
agtacttctagaattaattaaggcggggtctcactatgttgcccaggctggtcttgaacgcctgcctcagtctcctgagttgctgagattgtaggtgtgagctaccgtgcctggctctgatcagattaatgttttaaaatcccactctctttatgttatctgcctggtctgaaatgtacagcaagtacttggttcttacattaagtctaatctattagctttaaaaatcctcacaatt

SEQ ID NO: 18385 - DNA, 371 bp, Homo sapiens
  misc_feature 141, 142, 147, 148, 154, 156, 159, 160, 161, 162, 164, 165,167, 168, 173, 175, 179, 180, 182, 183, 189, 192, 193, 194,198, 201, 202, 203, 207, 210, 213, 214, 215, 216, 219, 221,222, 226, 227, 231, 236, 238, 242, 247, 253, 262, 280: n = A,T,C or G
  misc_feature 307, 308, 309, 311, 312, 313, 314, 315, 316, 317, 318, 319,320, 321, 324, 325, 326, 327, 330, 332, 335, 336, 337, 343,344, 346, 352, 357: n = A,T,C or G
agtacttctagaattaattaaggcgggggaagggagggaggggctggaagatactgaaggattcctttttgaaaggttttttttattgtaaaaaaaaaaaaaaaaaaaaaaaaaaaaaaaaaaaaaaaaaaaaaaaaaacnnaaaanncaaaangnggnnnntnncnncctantntaanntnntttttntannncttnccnnncctnttntannnnttntnnttannattntattntncatnctttntttaanaaaggctancaaccttacctttatgcnaactgaacttgccaactatttttttgnnnannnnnnnnnnnttnnnnacnanttnnnactganntnaaattnaaatnttaaaaggaacatt

SEQ ID NO: 18386 - DNA, 229 bp, Homo sapiens
  misc_feature 29, 33, 35, 41, 42, 59, 60, 85, 101, 117, 121, 149, 157,159, 160, 172, 175, 182, 184, 187, 194, 196: n = A,T,C or G
agtacttctagaattaattaaggcggggntgtnantattgnntatccgggaatttgaanntactatcattcttgtgtaagaaggntctatatgtttaaacntgacaaggttgcaagnacanataggcagtgtaaacgggaaaattaaanctctcccncnnagaagaatgctnaanattcccntnaanaaaaaantnaaccttccccccctgaggaatgcccttaatggg

SEQ ID NO: 18387 - DNA, 238 bp, Homo sapiens
  misc_feature 162, 165: n = A,T,C or G
agtacttctagaattaattaaggcgggaggattgcttgagccccggtgttcaaggctgcagtgagctacgatggtgcccctgccactccagcctgggcaacagaatgagaccctgtctgggtttgggggagaagttatttacaatgttttgaaaatatcctntanccactgagcccagcccccctgtctactttaaatcactactagattacttcttatgtctactagcatgtaaatg

SEQ ID NO: 18388 - DNA, 404 bp, Homo sapiens
  misc_feature 38, 58, 72, 142, 172, 174, 226, 276: n = A,T,C or G
agtacttctagaattaattaaggcggggtagccttctnattgtgacttcacatggtanaaggaataaagcanctccctggggcctcatttataagggcagtaatcccattcatgaggtttctaccctcatgacctaattatntcccaaaagaccccagcttttaacaccatnancttggcagttataatatcactatatgtattttgggagcataaaaacattcanacaatatcaagtggagtactgaaaatatcattttaataaaaaataaagcnggaaataagcaacagggaaataaaactaaaggtaaatggaaaatgaattcaaaagtaataaacaaatccaaacatagaaataatcacattaaatgtaaatggattaacattccaattaaaaagcagac

SEQ ID NO: 18389 - DNA, 123 bp, Homo sapiens
  misc_feature 33, 56, 57, 58, 59, 60, 67, 68, 72, 73, 76, 79, 87, 88, 89,95, 108: n = A,T,C or G
agtacttctagaattaattaaggggggaatttnaagtatatagaaaccgacctctnnnnncaacccnncctnngancancatattcnnntacttnaccactcaaagcnaactactatactcaa

SEQ ID NO: 18390 - DNA, 463 bp, Homo sapiens
  misc_feature 13, 21, 28, 30, 32, 36, 37, 39, 43, 44, 49, 50, 58, 60, 67,70, 73, 76, 77, 82, 86, 89, 91, 94, 96, 106, 111, 120, 121,123, 126, 131, 134, 137, 144, 145, 147, 149, 155, 170, 197,203, 217: n = A,T,C or G
ccagtacttctanaattaatnaaggcgngncnctgnntnccanncttcnnagaaagcntnggcacgncanggntgnnaaccntgcnggngnagntnacattgaccntaganatgtccacnncnctnactcncgnaanactgagnnanantacctnccacaaaagctaaangaccattttcttttcttgggagccacnggattnttccaccagtgaanggacattctctacactcagatgactctaccagtggccttttaaccaagaagtagtacttgattggtcatttgaaaacactgcaacagtgaacttttgcatctcaagaaaacattgaaaaattctatgaattgttgtagccggtgaattgagtcgtattctgtcacataatattttgaagaaaacttggctgtcgaaacatttttctctctgactgctgcttgaatgttcttggaggctgtttctta

SEQ ID NO: 18391 - DNA, 423 bp, Homo sapiens
  misc_feature 265, 298, 304, 308, 337, 338, 341, 342, 344, 348, 354, 370,375, 380, 389: n = A,T,C or G
ggtccccgggccccccctcgagagtacttctagaattaattaaggcgggcagataacaaggtcaggagatcgagaccatcctggctaatatggtgaaaccctgtctctactaaaaatacaaaaaattagccgggcacagtggcaggcgcctgtagtcccagctactcgggaggttgaggcaggagaatggcgtgaacccaggaggcagaacttgtaatgagcccagatccgccactgcctccacctgggtgacagaatgaaactntttctcaaaaaaaattattattaaattaaattnaattangttntaattaattaaaacctcttgagcttattnnaanntnattnatgccncaagaataacccccanggtanaatgntcttttatnttattggaataaaccaaataagaatttaattaaa

SEQ ID NO: 18392 - DNA, 468 bp, Homo sapiens
  misc_feature 85, 208, 380: n = A,T,C or G
aaagctgggtacccgggccccccctcgagagtacttctagaattaattaaggcggggtcgaagaagagtggacttttttgcactnctagttccttctccctgtagctgtagtcgtagcaagtaaaggggttgtactgatgctttttaaggcatattatcaacatacagccatgacttgtccagagaatctcacctggcaaaaactcanagaagaaagagaaagaagatgaaatggctggttttcagatgtgtattctcattttatggaagacatgttgccagagtaaagcacaatatattcatcttgaaatgtaatactgagaagatatggaagttatggaagttgtggccttcagaattgacacttacggagagactanaacagcgtgggtgagttgtgagggacaggaagcatgtcttaatggacttaaccaattttcgtcaactattcacagtaaaatctttcaa

SEQ ID NO: 18393 - DNA, 390 bp, Homo sapiens
agtacttctagaattaattaaggcgggaagatagtcaagaaaatagaatggtgagttttaaccaacactatacagtagtctccccttaaccacaatttactgtctacggtttcagttacctatggtcaaccatggtccaaaaatattaaagaaaaaactctagaaataaacagctcacaagctttaaccgcttatgaatgcctacacagtgcccatgtcattaacctcatttcgccattttatcatcattttccgtcatcacaagaaaggtgagtacaatattttgagagatgacattcacacaatttttattaaatatagttataaatttttttattagttattgctattaatgtcttactctgcccaatgtataaattaaactttata

SEQ ID NO: 18394 - DNA, 364 bp, Homo sapiens
  misc_feature 146, 148, 154, 160, 168, 171, 182, 188, 191, 193, 194, 195,206, 212, 214, 218, 227, 238, 240, 252, 260, 261, 271, 273,276, 277, 278, 298, 302, 307, 316, 321, 326, 334, 335, 340,341, 344, 362: n = A,T,C or G
agtacttctagaattaattaaggcgggagaatcacttgaactcgggaggcggaggttgcagtgagccgagatcatgccattgcactccagcctgggcaacagagcgataatccgtctgaaaaaaaaaaaaaaaaatccttcctccntnaggccnggcttncctacccnttnggaaaactgangggggnggntnnnttgaccccagnattttnanaccnccttaggcntggtctttccncnccccccccaaanaaaaaaannaaaataattnanacnnncccccccccgggggggacancctnccccncctggtgangatgnattancccccccnnccggnngtntttttaaaaaaataaaantt

SEQ ID NO: 18395 - DNA, 176 bp, Homo sapiens
  misc_feature 25, 39, 48, 59, 66, 67, 89, 95, 97, 99: n = A,T,C or G
ccgggccccccctcgagagtacttntagaattaattaangcggggggntcataccatantctcttnnttggcctaaaatgccacatcancatttncnanttccaccctactgacatacataaatatatatgtatatgtgtgtgtgtgtgtgtatatatacatacacactaacttaa

SEQ ID NO: 18396 - DNA, 332 bp, Homo sapiens
agtacttctagaattaattaaaggggaattataaaatatttattatgaaaagattctactgagtcactgggttgagaactgttccactagcttagctatgtttttatatatatgtataatttatataaataggaaacctggggctctgagaaattaagtgacttatttaatgtcacagggctagggccagggcagtgataagaggaataactaagtcttttagaagaagaagaggtggacacaagagagaagctccccgctggaagctagaactccagaactgagagattccagagtgggaattactggcagcactaatgtgtctttaggaa

SEQ ID NO: 18397 - DNA, 384 bp, Homo sapiens
agtacttctagaattaattaaggcggggacatgactgatcccctcagagcaggctcaggcctggagtcggcccccaaaagtttcacatagggccaggcagcctctgtgtttctttccctggtcctgaactgtggaaatgccattaaactctctctataatgtaactgaaactgctggctgggcgcagtggctcccacctgtaatctcagcctccaaaagtgctgggtttacaggtgtgagccaccatgccttgccaaagttggctgtttctttagattcagaggaattattatctggcttgatctgaagaatgttaaaagtactatgatctgataattgcctaatatgtatgttacaatcttcttaactagggacatttattaa

SEQ ID NO: 18398 - DNA, 238 bp, Homo sapiens
  misc_feature 225, 226, 227, 228: n = A,T,C or G
agtacttctagaattaattaaggcgggaatcaaatgagttaatgtttgtatcgtggtaatatttgcaagtgatactttgtcatggatttatcttaaactgcattagaaaatatttgtgatcagaactttttaaaaaattgaattagtgcctacataagtgatattcatagggcaaaaataaattaggatccaaaagcaaaaaaaaaaaaaaaaaaaaaaaaaaannnncccccccccg

SEQ ID NO: 18399 - DNA, 317 bp, Homo sapiens
agtacttctagaattaattaaggcggggggcagtcttgtgactgagcacttaaatggatctgacactatctgacataatttccaggtagatagtgttagaattgatttggaggacacctagctgatacctactgcagaattaattggtcgcttggtggtggggagaaatctccacacatttggtcactagaagtcttctgtggtgatgattgttgttgtagtggtgtgagagcagaggaaaaacatggttttagagtttttccaaaagagagtgagagagcaagagagaatacatcatgtggattccatttatatta

SEQ ID NO: 18400 - DNA, 440 bp, Homo sapiens
  misc_feature 26, 31, 38, 41, 44, 45, 50, 51, 53, 60, 70, 73, 76, 81, 89,91, 94, 110, 114, 115, 116, 117, 118, 121, 124, 125, 127,132, 142, 144, 148, 156, 167, 187, 192, 196, 197, 201, 206,213, 221, 232, 240, 311, 312: n = A,T,C or G
agtacttctagaattaattaaagacngagcntgggcanggntgnnacacnngnatgcctngatttgacantgnacnctaancctaaccntngtnagaaactacttatggncatnnnnntgnatnntnattgnaatactggtngnagcnccacatcntagacacaccnatcatgcttccatacatacnctggnctanntgcngctcnctgattnctaagagntaaattcaaantcattgcnctcaagctgatctacaaatcccttatattaacaggtagtttaaatgtggaaataaggcaaagcatacttgnnagtcacaattactttcagatataattgagactacactgctatacataattaggtacacagtatgtataacaatgcatactatggtgtggagttaattccaattaccatattttatatttattggtcac

SEQ ID NO: 18401 - DNA, 342 bp, Homo sapiens
  misc_feature 23, 24, 52, 56, 95, 123, 127, 131, 136, 140, 177, 228, 251,268, 288, 318: n = A,T,C or G
agtacttctagaattaattaaannggttgaactgatgcactaagattctttncaanttgatagtgtgacgttttcaggaatcttttggaccctangctgaagcccctccttcacctgaggtcntgtncatntgttnattngtatctatcttaagtctatgagagattcatacaatangaccagattttaaacaaacgaaatagatgagaaggaaaatctgtgtcctgnctataggggctgaagggcgtatntgtcaagcaggaatgcngcatttcagaggtatgcagntaattcctctaaatgagcaagacatgttcnttcattcaacaaatatttgttgaa

SEQ ID NO: 18402 - DNA, 352 bp, Homo sapiens
ggacataataataacaattgaatgtctgcacagccgctttccacacagacatcataacaaaaaatttccaccaaaccccccctccccccgccttaattaaggcgggggtgatatttaaacaaacataaatgattgtaactttgcagcttttttatttaggtagctttaatttatttatgaaagttaatccatttctgataccgtggtttttaaaaatatgaaatggatttatatatactatattcctcaaatccactgtatgtggacttatattcattttctcctttttttcggaattgaaacattttaatttcaaattcaaatagaacatttaaaatgatttcattattat

SEQ ID NO: 18403 - DNA, 408 bp, Homo sapiens
agtacttctagaattaattaaggcgggggagcggagccgtgcgccgcaggcgggctccgtgacgccgggtggggaacgccgggccggtggcgggacttccgccacgggactcggaaggggccgcgccgccgctgctgggagttgtagtccggccgtggttgggggagccgcggctcatgcgcggtgcacagaggcttgtttcacatctgtaacaacaggaggaggcccagcctcgtgatgaggaatagcaaggagagaattcagctccagttcaaaagcctacaaaatctgagactgtcattgcttttataaggattccagctttccctcctggccagaaatgttcagcctggactcattcagaaaagcatccctggatgtgaatgaggaccctccttaaacaggaat

SEQ ID NO: 18404 - DNA, 410 bp, Homo sapiens
  misc_feature 38, 86, 178, 238, 285: n = A,T,C or G
agtacttctagaattaattaaggcgggcggatcacgangtcaggagattgagaccatcctggcaaatatggtgaaaccccgtctgnactaaaaatacaaaaattagccgggcatggtggtgggcgcctgtagtcccagctactcgggaggctgaggcaggagaatccgcttgaacccnggaggcaataggttgcagtgagctgagatctccccactgcactgcagcctggcaacagantgagactctgtctcaaaaaaatatatatctatatctgtctgtctatntatagatatagacacaccagatttcaaagacttcatgtaaaaaaaatatgaaatatctcagtttctttacattgggtacatgagacatgacaatattttaggtatattgagttaaataaaatatt

SEQ ID NO: 18405 - DNA, 355 bp, Homo sapiens
  misc_feature 81, 98, 102, 103, 105, 110, 111, 115, 122, 124, 127, 129,139, 154, 157, 162, 168, 189, 222, 282: n = A,T,C or G
agtacttctagaattaattaaggcgggatttattggccaggcatgatggctcacgcctctaatcccagcactttgggaggncaaagacggaggatcantctnncntaggnntaanaaacatncnaantnaacattgtgntgaccaaatgactgntgngaaanacttcnaggtaagggagtacgttgatnacttagtttactatatgggtttgtggtcgcatnccagtcatcagctgctatcattttccttcttcatcccttatactgagatttgggttacanctttttattcttcgaaggatcacaaagcagtgtacagacacctgccttctttaaggatgaaaggaagataaag

SEQ ID NO: 18406 - DNA, 443 bp, Homo sapiens
agtacttctagaattaattaaggcgggcaaatgctcacaaagacctacgaagctgttatctctcatgtctgctttacctccaagcactgcacaagcaggaagaaaagaaaacagcaaagttgtaatctttctggctaagtaaacccaactgcaagaactagtagatttatatttgatgtgagcaggcatttgagaaaatctctgtcaaatagctagctcacatgaagctaataaagcagagatttttattgctaaacacgacaaaaggatgatattttaaaaataattttgaaaactcaccaaacaaacaagtaaaatttacaataagcaacaaaaaaacccaacgggatgagagagaatattatttcagggttgttgtaatagaaaaagtctagttttcagcaacagcaatgaaatacaaagtgtgcaaataaattaatgaa

SEQ ID NO: 18407 - DNA, 556 bp, Homo sapiens
  misc_feature 32, 37, 38, 41, 55, 65, 100, 141, 161, 176, 183, 201, 215,245, 269, 361, 363, 389, 395, 407, 413, 414, 456, 467, 490,494, 499, 515, 516, 523, 538, 543, 548: n = A,T,C or G
agtacttctagaattaattaaggcgggcaccnaacanncanaaaacagctagctntaaataggcntgttaaaaaatgtaactactgtacatagaaaactnccctagaaaaaaatcataaaagtagatatatcaaaatgttnttagtaattaccaatggatngaaaggtcaaatganttaaatntgtctcctttttttatcnttgtgagatggagnctctctctgtcacccaggctggtgtgcagnaggcacaatctcaccttattgcancctctgcctcctgggttcaaatgattgtcctggcctcagcctcccgagtaactgggattacaagcacccatcactgcctggctaatttttgnanttttagggtttcaccatgttggctangctggnctgaaactcctnacctcnngtgatccgcctgcctcggcctaccaaagtgctgagattacangcatgaccctntgcagctggccttatttgctctntcantaaanttttaaatttggattnnccggggncaagacttcctctgnccccntaaanattactgc

SEQ ID NO: 18408 - DNA, 448 bp, Homo sapiens
  misc_feature 30, 31, 35, 52, 58, 64, 76, 77, 80, 96, 115, 170, 186, 205,217, 218, 246, 252, 254, 261, 262, 268, 294, 301, 303, 311,312, 315, 316, 317, 318, 320, 323, 324, 327, 335, 336, 337,338, 355, 357, 361, 367, 381, 393, 396, 407, 412, 415: n = A,T,C or G
  misc_feature 416, 417, 422, 424: n = A,T,C or G
agtacttctagaattaattaaggcgggganngcanttgctttgtactttgangataanctcacngagatctactcnnacnggaccttcgcaccttngccagagtttgaccaggangaggatgatggggaggtaactgaggactctgatgaagactttatgcagccccgcnagaatacgcctaaagncagatgagagaccaggtcntataaagtaaanngacatggatttaaatcagttgtttagangaatananacactgnnttaagngcttgaccctagcaccccccaaatcntttccangntgtctggnnttnnnncnccnnagnggggcccnnnntataaaacaggctcctntncccnggcttnttaacactatttgnaggaacacactnttntgttatatacnggggngannnggttntntggcttactggaaaaaaaaaaaaa

SEQ ID NO: 18409 - DNA, 509 bp, Homo sapiens
  misc_feature 170, 175, 177, 179, 184, 188, 189, 191, 195, 199, 202, 204,210, 215, 221, 222, 224, 228, 230, 233, 237, 242, 246, 248,251, 252, 258, 264, 265, 274, 275, 279, 280, 281, 283, 286,288, 298, 299, 301, 306, 311, 313, 317, 320, 322, 323: n = A,T,C or G
  misc_feature 328, 333, 334, 338, 343, 346, 347, 359, 367, 376, 389, 396,398, 408, 416, 420, 432, 435, 441, 443, 447, 452, 454, 470,481, 499: n = A,T,C or G
agtacttctagaattaattaaggcgggagcctataatcccagctactcgggaggctgaggcagaagaactgcttgaacccatgatgtggaggttgcagtgagcagagatcataccactgcactccagcctgggggacagagcgagaccctgtctcaaaaaaaaaaaaaanttttntnanggcantttnncngggnaaanaantncttttnaaaancccttnntngccntnttngctnctttntgtncnctnnggattnaaaatnnggtgggttnnttcnnngnaancncaaaattttnngnaaaanttttngngganatnanntttanctttnntttnacctngtnnggaatttttagnggaaaaanaaaatcagncaaggggtaaatnaccccantngccttttttntcccagtntttnttatcctgcccnaantttttncntttntcaantngaaaaaaattgttcanaaagatggtcntttcctaatggggaaaanttttttaaaa

SEQ ID NO: 18410 - DNA, 257 bp, Homo sapiens
  misc_feature 64, 155, 195, 199: n = A,T,C or G
acaaagttacactgcagcagctgtctaccctgccccttgtcttttgagaagttcaaaccttcanaaaagttgcaagaacaccgaggctaaaggcagcagttcactatactgtgggttgtctttgcgaggaagttgcattggacaaagagatgcanttcagcaaacagaccattgcggccatttcggagctggctntccnacagtgtgaaaattttgccaaagaccttgaaatgtttgcaagacatgccgaaaagaac

SEQ ID NO: 18411 - DNA, 633 bp, Homo sapiens
  misc_feature 564, 626: n = A,T,C or G
agtacttctagaattaattaaggcgggtggagcacctgaggtcaggagttaaagaccatcctgaccagcctggtgaaacacagtctctaataaagatacaaaaattaggccgggtgtggtggctcatgcctgtaatcccagcactttggggaggccaaggtgggcggatcacctgagtcaggagtttgagaccagcctgcctaaatggtgaaaacctgtttctactaaaaatacaaaaaagtagctgggcgtggtggtgggcgcctgtaatcccagctactctgggggctgaggcaggagaatcacttaaacccaggaggcagaggttgcagtgagccgagatcacaccactgtactccagcctgggtgacagagcgagactgtccaaaaaaaaattgataattaaatgttaaaagtcagcgactccagtaatacgtggtgggctgagtattaaactactggcttacatcctctgatgtcattactttcttgttcgtttgtgaacttgaggttggattttaaagccaaatgtattttgtggctttttaccaagggtcatatggncagataacttttcaaaaaccatttatttaaaagaaattttttgatttaggtttggaatttanaaaaacc

SEQ ID NO: 18412 - DNA, 385 bp, Homo sapiens
  misc_feature 111, 213, 241, 268, 280, 303, 307, 314, 315, 328, 338, 345,347, 353, 368: n = A,T,C or G
agtacttctagaattaattaaggcgggtggatcatgaggtcaggagatcgagaccatcctggctaacatggtgaaaccccatctctgctaaaaaaaaaaaaaaaaaaaaantgagccgggcgtggtggcaggtgcctgtagtcccagctattcaggaggctgaggcaggaggcggagcttgcagtgagccgatattgcgccactgcactctancctgggcaacagagcaagactccatctnaaaaaaaaaaaaaaaaaataatggcancttttattaaantttaaaaccagtcgtgtatcttntgcnacattgnngaatatggacaantaaaacagtncatagancnaaagangggaaaacaaagcanctgtcaaggaagcttta

SEQ ID NO: 18413 - DNA, 693 bp, Homo sapiens
  misc_feature 28, 29, 30, 32, 33, 35, 49, 54, 64, 67, 68, 69, 72, 76, 82,83, 84, 88, 89, 90, 91, 95, 102, 109, 110, 112, 114, 123,124, 128, 134, 136, 137, 138, 140, 147, 148, 149, 154, 155,162, 163, 165, 241, 249, 294, 296, 301, 309, 311, 316: n = A,T,C or G
  misc_feature 358, 363, 474, 597, 610, 612, 618, 622, 625, 638, 650, 658,668, 673, 675, 685: n = A,T,C or G
agtacttctagaattaattaaggcgggnnntnnanattgccttgatatnaaaancctcctaccnaannntgnaaanaccctnnnttcnnnncaangcattgnatatganngncncggaggcannctcntgaaancnnncntactcannntactnnggcatgnnantggcattgacctcctaggctacagcttaggttattcccttataagggctacctgcagaacggcctgggtgaaatantcttactngttgttattgtaaaaggaggaacagcttaaggttcatgggttctnanatgancctaaatncntgganaatttcttgaatagttttgttctctaaacccggtttggctgncttgngaaatgattccctgcagtaaacggacttttcatttatttaatcattcaaacttccattcacatctgcatgattacagaaaacatggggtatgtagactagtaacacataanaaaattgcagtaagatggtaacaaaacctcatattggctttacatgtttccaatgggaaaatgttttgagtgtttattgtcagtttattacctttcactttgattaaaatttttttgtggtgnattaaaccatgtncnttgcancttnacnataaaaaaaaatntttgaatttttntgaaccanttttctcccnatttnancagtaaaatnaaaaaaaa

SEQ ID NO: 18414 - DNA, 419 bp, Homo sapiens
  misc_feature 342, 344, 345, 358, 367, 371, 372, 373, 374, 375, 376, 399,400, 401, 402, 403, 404, 405, 406, 409, 419: n = A,T,C or G
agtacttctagaattaattaaggcggggcggtgatgtagagggtgatggtggtggcagaaggagttgactaccaagggtcacatggaattctcagggtaatagaacagttatttaatttttatggcagttacacaactctgcttttgtgaaaatgcataaaattgtatatgtggggaattttactatgtaaattatatatcaataaacgtgactcgtctaaataaaaaatttgtaccaacaaaataaaggagaaaacaatcatctcaatagattcagaaaaatgcatttgaaaaacttgttaaaaatcataacaaaaataaataaaaataaaaataatatcncnnaaaaaaaaaaaanaaaaaaaanaaannnnnnaaaaaaaaaaaaaaaaaaaaaannnnnnnnggncccccccccn

SEQ ID NO: 18415 - DNA, 520 bp, Homo sapiens
  misc_feature 365, 376, 403, 430, 434, 443, 446, 449, 469, 474, 477, 501: n = A,T,C or G
agtacttctagaattaattaaggcggggatgcgggaccacaaggcctgtctgcctgatgccaagacccaacgcctgttttttaagtggcagcagggacatcagctggcaattgtaaataggtttccaggatcaaaactaacctttcagcgtattctcagctatgacacagtggtgcaaacaactggagactcgtggcacataccatatgatgaagacttggtagcaaagatgttcctgtgaagtaccaaccaaatggcttttgccttccaccaaaagacataggagattcttacctctatgctaagtttttgtgttttggggtaccctctaggtttgggccatcaggaggctcttggagcttggntgttttgtttnagggccatttgccttttgtccttgaanataaaaaaggatttcttattaaaccangcantttgaccanttngantttttttttaaattggaaantgaanatnttattctttttttcattaacccancttggcggttttttttttt

SEQ ID NO: 18416 - DNA, 613 bp, Homo sapiens
  misc_feature 270, 277, 282, 284, 286, 290, 293, 301, 302, 303, 306, 308,309, 310, 319, 324, 327, 333, 335, 342, 344, 348, 349, 359,364, 367, 373, 375, 377, 378, 381, 382, 393, 407, 408, 414,432, 433, 435, 445, 449, 450, 456, 457, 463, 464, 470: n = A,T,C or G
  misc_feature 488, 489, 506, 507, 508, 517, 525, 529, 532, 537, 551, 557,559, 572, 573, 574, 575, 576, 577, 578, 579, 580, 581, 582,583, 584, 585, 586, 587, 588, 589, 590, 591, 592, 593, 594,595, 596, 597, 598, 601, 604: n = A,T,C or G
agtacttctagaattaattaaggcgggtggatcacaaggtcaggagttcgagaccagcctggccaatatggtgaaaccccttctctactaaaaattcaaaaattagcctggcatgatggcaggtgcctgtagtcccagctacttgggaggatgaggcaggagaatcgcttaaacccgggaggcggaggttgcagtgagctgagatcacgccactgcactccggccttggcgacagagcaagactctgtctccaaaaaaaaaaaaaaaaanaaacccnttttngncntggnccngggggttnnnccntnnntcccccccnttttnggnggaaangncgggggntncccnngggggggggntttanaancccccntntnnaanngggaaaacccngttttttaaaaaannccaaantttccccggggggggggnntnccccctgaancccnncctccnngggggnntggggnaaaaaaatcctttaaccnnggaaagggggggttccnnngccccaaantccccccnttgnacnttccncctgggctttgggnaaaaangnggaactttttttnnnnnnnnnnnnnnnnnnnnnnnnnnnaanggnccccccccg

SEQ ID NO: 18417 - DNA, 369 bp, Homo sapiens
  misc_feature 354: n = A,T,C or G
agtacttctagaattaattaaggcggggatagacaaatacaacagtggagggagtagagagcctagaaacagaatcaccaatttgtgtttgacaagggcacctgaaaaattcaataggaaaaattcaatgagaaatagtgctggaggctgctctgcctatggagtagccattcttttatttctttactttctcaataaacatgctttcagttaaaaaaaaaagaaagaaatagtgttagaataagtagatattacatgaaaaatattgaataaaccttgaaaaacctaccttagaccatacacaaacattattttgtgatgttttatagacctaaatattacatcttaacctanaaaattttggaagaa

SEQ ID NO: 18418 - DNA, 442 bp, Homo sapiens
  misc_feature 28, 32, 37, 43, 48, 79, 91, 93, 116, 119, 121, 129, 136,167, 174, 183, 192, 203, 209, 210, 212, 214, 218, 233, 236,237, 239, 240, 241, 246, 250, 252, 272, 273, 276, 331: n = A,T,C or G
agtacttctagaattaattaaggcgggngatnttganaatgcnatctnatcgacattcaaggagaggacgccggacatntctgtgtcatanangtactatggaaaataaaaatganaanantggaaatnggatacntgaaaaggctatgataaatttcatatcattntaccacnataaaacanttttaatanattaaaaaaanaaaaanngngnaaancaaaaaaaaatttgnatnnannnaaaanaaananagtaaaattattaaccgcannggngctcattccagggccctgccgggtattttgtgctatggatgtgagtacggcaaanagactgaattaagctgttttgtatttggaatcggattgttcacgttgcaacgttgctgcaatgataaatggatggatactctttacactttgaagtggatttaatcttcac

SEQ ID NO: 18419 - DNA, 784 bp, Homo sapiens
  misc_feature 481, 551, 561, 568, 587, 648, 670, 672, 677, 730, 733, 746,749, 759, 776: n = A,T,C or G
agtacttctagaattaattaaggcggggggagggcaacatcctcccactaagcgatttttatttatttatttattttgagatggagtcccactctgtcacccaggctggagtacagtggcacgatcttggctcacttcaacctctgcctcccgggttcaagtgattctcctgcctcagcctcctaagtagctgggattacaggcgtgcgccaacatgcctggctaatttttgtatatttagtagagacggggtttcaccctgttgattagtcaggtctcgaactcccagcctcaagtgatccgcccacctctgcctcccaaagtactgggattacaggcctgagccaccacaccaggcccccactaaacattttaattgtactattgcaagtagtcctcacaactctgtaaggcagatactgtttttttgtttgtttgttttgttttggttttgagacagaatttcactctgtcacccaanactggagtgcagtggcacaatctcagctgactggcaaacctttgccttccggattcaaagtggatttttncttgcctcanccttccnaagtagctggggattacanggtgcaagccacccattgcccagctaaatttttgtatttttgggtagaaaccgggggtttnactattgtttggcccaagcttngntctcnaaacttccttgaacctcacttgaaatccacccacccctggcctccccaaaagngcntggggattacaanggngtgaaaccanctggggccccagccaanttttttaa

SEQ ID NO: 18420 - DNA, 371 bp, Homo sapiens
  misc_feature 28, 40, 41, 57, 59, 66, 74, 106, 116, 120, 141, 192, 195,224, 295, 314, 318, 322, 323, 328, 335, 337, 341, 342, 345,353: n = A,T,C or G
agtacttctagaattaattaaggcgggnccctccaacatnntaaaaattatagaatntntattagngatttgtntattaaagttccacgagctgctttgtggtcanttgggctgantagnagatatcttaaagacatgcantgaaagtgaaccctgtcatatcatggtgcctctttcaaggttcctctgtangtncctcatcttgcagaattatttcaataccnaggtatggttgaaccagctgtccagccttaactctatttagtgccccattactaatgttcttttaactggnttgtatgtgttttaactgnccantgtnnggatnctacctntngatnnctncatttgtncctggtgctgcttttaag

SEQ ID NO: 18421 - DNA, 447 bp, Homo sapiens
  misc_feature 377, 439: n = A,T,C or G
agtacttctagaattaattaaggcgggtggatcacttgaggtcatgacttcgtgaccagcctggccaacatggtgaaaccccatctctactaaaagtacaaaaatcagccatgcatggtggtgggcgcctgtaatcccagctactcaggaggctgaggcaggagaatttcttgaacctggaagacagaggtttcagtgagctgagattgtgccactggactccagcctgggtgacagagcgagactccatctcaaaaataaataaataaataaataaataaataaatgaaattatttatctctaggttgctgaaacttgcacaaaatataataacaggtttcatataaatgtcacagggaaagggcaaatgttttanaagcttagccataatgttgtgaattttataggcctgaagctctatcaattgaacatacgaanaaaaaaaa

SEQ ID NO: 18422 - DNA, 435 bp, Homo sapiens
agtacttctagaattaattaagatcatatacaaaaaaaaatcctaatggaactgcaaaacatggtagtagaactagtgaatgaatttagcaaggtctagatatgaaaatcaattgtattccataaactagcagcaaaataacagaaaattaaaaataatacatttataataagtcaagaatatgaaatgctaagggacaaactaacaaaatatgaagaaaaattagaatgactagacttctcaacaacaaaatcaagcctgtaagaaaattagtaactcttaacctatacctcaggaatgagggcaaaattgaattcattttaaggaaaacacagaatttgacccttatcaaaatgacataaagaaaaagcagagtagtttcttagttcatttgtgttgctataaaggaatacccgaagctggataatttataaa

SEQ ID NO: 18423 - DNA, 169 bp, Homo sapiens
  misc_feature 149, 150: n = A,T,C or G
agtacttctagaattaattaaggcgggtggcccggcccacagctcagggccacgtcccccattctcctcctatccctcaaccccgacatcattaccgggttttcctcttaaaaaaaaaaaaaaaaaaaaaaaaaaaaaaaaaaaaaaannaaaaaaaaaaaaaaaaaaa

SEQ ID NO: 18424 - DNA, 335 bp, Homo sapiens
  misc_feature 3, 48, 51, 53, 57, 58, 61, 66, 67, 69, 72, 73, 75, 77, 78,83, 88, 92, 97, 101, 102, 104, 105, 112, 118, 129, 134,135, 137, 147, 151, 157, 158, 159, 172, 175, 184, 188, 197,205, 206, 208, 214, 215: n = A,T,C or G
gtnccgggccccccctcgagagtacttctagaattaattaaggcgggnaangnaggnnggnggagnnanacnnancnntaccntgctngttncactnatgnnannaaaaccnaagatnccaaactaacntgttnncntgctgatctnaacntcgttnnnatcacataatagnctntatgcaaancganggagcagangattcctnntnttttannttagagataatgccaaatgtttgagggggtagatatgcaaataacccttatttcatcattacgtgttgtatgcatgtattaaaatatcactccattgcccataaatatggacaattatta

SEQ ID NO: 18425 - DNA, 296 bp, Homo sapiens
  misc_feature 32, 33, 38, 40, 42, 44, 46, 53, 56, 63, 70, 75, 77, 91, 106,114, 115, 121, 124, 126, 128, 130, 138, 143, 159, 160, 169,170, 172, 173, 177, 209, 223, 234, 235, 239: n = A,T,C or G
agtacttctagaattaattaaggcggggaatnnagctncnancnanactgagnganataaaangcacatnctatncnaatatcagcacaanccaaaagctggttangccgaaannatgatnaantntntnaagctttntctanactgatcaagaaaaannataacacanntnnccancaacaggaatgagaaaagggttattgtaaatnctacacacatttanagaataattanngctnttataaacggctttatggcaatgaatttgacaacttatatgaaaaggacaatttctt

SEQ ID NO: 18426 - DNA, 600 bp, Homo sapiens
  misc_feature 165, 190, 193, 194, 195, 196, 212, 218, 219, 221, 226, 230,234, 236, 242, 252, 253, 255, 258, 259, 261, 267, 274, 279,292, 297, 323, 339, 357, 358, 365, 366, 371, 401, 412, 419,421, 423, 424, 426, 435, 436, 452, 454, 457, 459, 463: n = A,T,C or G
  misc_feature 467, 468, 472, 474, 486, 487, 503, 506, 507, 511, 523, 535,540, 543, 545, 551, 553, 558, 560, 566, 568, 569, 571, 578,580, 586, 588: n = A,T,C or G
agtacttctagaattaattaaggcgggacgagaagaagaaactggaggataagaagaaatccctggatgatgaagtgaatgctttcaagcaaagaaagacggcggctgaactgctccagtcccagggctcccaggctggaggctcacagactctgaagagagacnaaaaaaaaaaaaaaaaaaaaaaaanggnnnnccccccccgggggggncccccnntnccccntttngggngntttttncccccccccnntnggnncntttttnaaaattnactancttctggccctcnacccnaaatgctaacactttgtgtgtgtganaaatttttattgaacncggggtttaataaatgcnnataccannatcangaatttcctatttttgaggagctcattatntaatgccttanacggctncntnnanaaaccattnngatcctttttgacaantnttntnaatnggcnngtananaatgtttgcttnnaaggagtttttacccntcnnaacnaaaagcttcccntgggggtgaacntggtngtnanaaaaantnttgancntttttntnnantgaaaanantccctntntttcttatggaa

SEQ ID NO: 18427 - DNA, 408 bp, Homo sapiens
  misc_feature 270, 273, 281, 282, 284, 299, 304, 305, 309, 312, 314, 320,323, 325, 326, 328, 333, 347, 350: n = A,T,C or G
agtacttctagaattaattaaggcgggtggatcacaaggtcaggagttcaagaccagcctgaccaacatggtgaaacaccatctctactaaaattacaaaagttagctgggcgtggtggtgcacacctgtaatcccagctactcaggaggctgaggcaggaaaactgcttgaacccaggtggcagaggttgcggtgagccgagatcgcaccactgcactccagcctgagcgacagagcgagactccatcccaggaaaaaaaaaaaaaaanaanaaacctgnncnccccccccggggggnccccnncacnccncnttttgngtnanntntcacnccccccacatgggnccnttattaacacgagaaaacaccctcatgttcatacacctatcccccattctcctcctat

SEQ ID NO: 18428 - DNA, 377 bp, Homo sapiens
  misc_feature 226, 230, 236, 237, 245, 249, 254, 263, 269, 270, 271, 287,296, 302, 321, 324, 328, 329, 339, 343, 364, 366: n = A,T,C or G
agtacttctagaattaattaaggcgggagcgactgtcatgggtgcagggcgttttggtgcagtgatgaaatgttctggagttagataacggtgatggttgcacaactctgtgaacatgcttaaaaaaccgaattgtacactttaaagggtgaatatttggggatgtgacttatatctcagtaaagctattattaaatacatccatccatgcattcaaaaaaaaaanaagnaacccnntgcacatnaaanaaaantaataaaanaaaaannngcggccgccaccccgntggagcctncaattntccctatagttgagtcttnttncgcnncgctcactgnccgnctttttacaacgacttgactngnaaaaaccctgg

SEQ ID NO: 18429 - DNA, 441 bp, Homo sapiens
  misc_feature 24, 28, 34, 53, 58, 59, 64, 65, 66, 70, 72, 76, 77, 82, 88,89, 96, 97, 98, 102, 108, 109, 112, 113, 115, 118, 122,126, 127, 131, 135, 141, 143, 146, 148, 152, 154, 155, 156,162, 163, 187, 191, 284, 287, 441: n = A,T,C or G
agtacttctagaattaattaaggngggnactgtnaagggctctaagggaatgnacacnnagtcnnnctgntnttcnnaattnctgctnnatgagcnnncagntcctgnnttnncnatngatncctnnattngacntacatntnacntnggtntnnngacgtnnaggcttttcaaaagaagggtctantganctaagtttcatcttctggtactcattgatcaaactgacctttctattctcataagcgtccctacccaaagttgtgtgtggaaggagtgtatancanagaggaaatccctttcaacagagtcagctgctaactgatttcctataagcacactggattaagggcagccacagtggtttctactgtatgtatgaaccgaatggaggaatgttttcaaagattgatttggtgtggattgcaattgtaatggaan

SEQ ID NO: 18430 - DNA, 419 bp, Homo sapiens
  misc_feature 53, 70, 87, 109, 113, 129, 132, 183, 216, 219, 235, 282, 283: n = A,T,C or G
agtacttctagaattaattaaggcggggagtgggcttttccacctgacctcancctcctgtcatatcagntgggacattagattctnataggagcactacccctattgngaantgcacatgcaaggatntangttgcatattccttatgagactctcatgcctgatgatctaaggtggaacantttcatcccgaaaccattccccccaacacccgnccntggaaaaactgtcttncacaaaaccggtcccttggtgccaaaaaggctggagactgtcattgnngcccatttattttactctcctgactcccaccaggattaagactattgcaatactttaagtgttgagcagttgggtaccatacaagaaaaagatcagatgttagtaattaataccacatgtaaaatagctgattata

SEQ ID NO: 18431 - DNA, 443 bp, Homo sapiens
agtacttctagaattaattaaggcggggggcccgctgcactgtgggtaggcggcggcggcggctacgcggagcggcaggcggtggagcgaggccgcgcgcgccgaagatggctgagaagcagaagcacgacgggcgggtgaagatcggacactacgtgctgggcgacacgctgggcgtcggcaccttcggcaaagtgaagattggagaacatcaattaacaggccataaagtggcagttaaaatcttaaatagacagaagattcgcagtttagatgttgttggaaaaataaaacgagaaattcaaaatctaaaactctttcgtcatcctcatattatcaaactgtaagtatttttgtatctaataataccaaagagacacctatcttaaaatgtttttttaggaattttataataattgttaattgttaaccttttacaaaag

SEQ ID NO: 18432 - DNA, 462 bp, Homo sapiens
  misc_feature 28, 29, 31, 34, 37, 46, 48, 56, 62, 63, 64, 66, 82, 100,126, 149, 158, 166, 171, 176, 180, 182, 189, 191, 196, 201,205, 206, 355, 361, 372, 379, 391, 406, 408, 414, 418, 436,446: n = A,T,C or G
agtacttctagaattaattaaggcgggnntntcnctnttggacganangaccctanggagcnnnanttgtattaatgcatancagcccctaacagtcccnccggtgctaaactaccagccctgcanaaataaatttcggttggggcganctcggagcnctaacctnccctngatancacncntgctatnanttctncagtnccannaaactactatgcttatttgatccactttcttgaccaacggaacaagttaccctagggataacagcgcaatcctattctagagtccatatcaacaatagggtttacgacctcgatgttggatcaggacatcccgataaaaaaaaaaattnaaaaangaaaaaaagantaaattngattaaggaccnggaaaaaaaaaaaangnaaaaanaaanttttggggaaaaattttnaaaaattttntaaaaaaaaaaaaaaa

SEQ ID NO: 18433 - DNA, 402 bp, Homo sapiens
  misc_feature 24, 36, 38, 56, 57, 63, 67, 74, 77, 82, 89, 91, 101, 109,122, 126, 137, 175, 181, 194, 199, 202, 218, 225, 232, 238,239, 251, 270, 287, 288, 292, 294, 297, 301, 305, 306, 335,340, 379, 380, 381, 398: n = A,T,C or G
agtacttctagaattaattaaggngggtgggatccncnctgacagagtggagagtnncatgtnctgnacactgnccntgaancactgancnaaagctgggngcacaacncaccagacactancagnaaggatggagntgaaaacataccccactctgacctggaagcactgggangcctanagaaggctgcganccaanganggacggtcttcctttngcatggnatggggntgaatnnacagaaatggantggaccccctggatctgantcactatggggggaggnntttngnaanactntcanntaccctatgatttcatgcttccacaattnttctnacaagtattaaagagctgttatactgtgaaaaaaaaaannnccccccccccggggggncccc

SEQ ID NO: 18434 - DNA, 381 bp, Homo sapiens
  misc_feature 258, 260, 264, 267, 268, 269, 271, 272, 280, 282, 290, 291,295, 296, 302, 305, 306, 317, 324, 328, 329, 332, 333, 338,339, 341, 343, 351, 354, 358, 364: n = A,T,C or G
agtacttctagaattaattaaggcggggggatcacgaggtcaggagttcgaaaccagcctgaaaccccgtctctactaaaaatacaaaaaattagccgggcatggtggcgtgcctgtaatcccagctacttaggaggctgaggcaggagaatcgcttaaacccaggaggcggaggttgcagtgagcagagatcatgccattgcactctagcctgggcgacagagcaagactccatctcaaaaaaaaaaaaaaagggtntnttgnttnnntnnaacctacntntgaccttnngggnncttaanctnntttttaaatancttatantccnnaanncaatnnancngttggggnaanagtngctatntggggttgtttgggaat

SEQ ID NO: 18435 - DNA, 453 bp, Homo sapiens
agtacttctagaattaattaaggcgggaggaatagatttatacaccattattgttttatttttaaattttcattcactcttctgtttggatacttttgctaattaacgtcctatgttaatttccaccaagctataagtccatagtcagtaaaacattccccttgggctgtcatgagctaaaagcagtgtcatctccgcatgttggagcagccaagaaatagtttggtactaccgacattgtctaatccatgtcacatcctcatacaatttaattgctcaaccatgcatttaaaactcctcaagaaaggattggtactgcaactgtaggtaaactgaaaaaaaataagaaagaaagagttggatgaaaatgtgaaagcccaagtttagatgtgcattaagtattaaatagcacagtatcttcttcatggagccttttttcctcccccatcccct

SEQ ID NO: 18436 - DNA, 262 bp, Homo sapiens
  misc_feature 85, 127, 129, 130, 131, 132, 147, 148, 152, 154, 155, 156,161, 162, 163, 164, 165, 166, 167, 175, 176, 177, 178, 186,187, 188, 189, 192, 193, 202, 203, 204, 207, 217, 256, 258: n = A,T,C or G
agtacttctagaattaattaaggcgggcagatcacgaggtcaggagatcgagaccatcctggctaacacggtgaaaccccgtctntactaaaaatacaaaaaaaaaaaaaaaaaaaaaaaaaaaagngnnnncccccccgggggggnnccanannnccccnnnnnnngggttttnnnncccccccnnnnggnncgttttttnnnaanatcgcgccantgcactccagactgggccgactgagcgagacaccgtctnanaaaa

SEQ ID NO: 18437 - DNA, 622 bp, Homo sapiens
  misc_feature 287, 288, 289, 290, 291, 292, 293, 294, 295, 296, 297, 298,299, 300, 301, 302, 303, 304, 305, 306, 307, 308, 309, 310,311, 312, 313, 314, 315, 316, 317, 318, 319, 320, 321, 322,323, 324, 325, 326, 327, 328, 329, 330, 331, 332, 333: n = A,T,C or G
  misc_feature 334, 335, 336, 337, 338, 339, 340, 341, 342, 343, 344, 345,346, 347, 348, 349, 350, 351, 352, 353, 354, 359, 360, 361,362, 363, 364, 365, 366, 367, 368, 369, 370, 371, 372, 373,374, 375, 376, 377, 378, 379, 380, 381, 382, 383, 384: n = A,T,C or G
  misc_feature 385, 386, 387, 388, 389, 390, 391, 392, 393, 394, 395, 396,397, 398, 399, 400, 401, 402, 403, 404, 405, 406, 407, 408,409, 410, 411, 412, 413, 414, 415, 416, 417, 418, 419, 420,421, 422, 423, 424, 425, 426, 427, 428, 429, 430, 431: n = A,T,C or G
  misc_feature 432, 433, 434, 435, 436, 437, 438, 439, 440, 441, 442, 443,444, 445, 446, 447, 448, 449, 450, 451, 452, 453, 454, 455,456, 457, 458, 459, 460, 461, 462, 463, 464, 465, 487, 488,489, 490, 491, 492, 493, 494, 495, 496, 497, 498, 499: n = A,T,C or G
  misc_feature 500, 501, 502, 503, 504, 505, 506, 507, 508, 509, 510, 511,512, 513, 514, 515, 516, 517, 518, 519, 520, 521, 522, 523,524, 525, 559, 560, 605: n = A,T,C or G
agtacttctagaattaattaaggcgggtggaccacgaggtccatcaggagatcgagaccagccttgccaacatggcgaaaccctgtctctactaaaaatacaaaaattagccagccatggtggcaggtgcctgtagtcccagctactcaggaggctgaggcagaagaatcgcttgaaccagggcagcagaggttgcagtgagccgagatcatgccattgcactccagcctggcaacaagagcaagactctgtctcacaaaaaaaaaaaaaaaaaaaaaaaaaaaaannnnnnnnnnnnnnnnnnnnnnnnnnnnnnnnnnnnnnnnnnnnnnnnnnnnnnnnnnnnnnnnnnnncgtcnnnnnnnnnnnnnnnnnnnnnnnnnnnnnnnnnnnnnnnnnnnnnnnnnnnnnnnnnnnnnnnnnnnnnnnnnnnnnnnnnnnnnnnnnnnnnnnnnnnnnnnnnnncgatcgcccttcccaacaagtnnnnnnnnnnnnnnnnnnnnnnnnnnnnnnnnnnnnnnntaatattttgttaaaaattcgcgttaaaattttnnttaaattcagctcatttttttaaccaaataggcccgaaatcggcnaaaatccctttttaaat

SEQ ID NO: 18438 - DNA, 341 bp, Homo sapiens
  misc_feature 24, 30, 31, 32, 35, 41, 42, 44, 46, 47, 48, 49, 50, 53, 54,58, 59, 68, 70, 73, 76, 77, 78, 80, 86, 88, 92, 93, 95,97, 98, 100, 101, 103, 104, 105, 107, 111, 112, 113, 115,120, 122, 124, 125, 127, 130, 133, 142, 159, 162, 165, 171: n = A,T,C or G
  misc_feature 172, 173, 181, 183, 188, 190, 193, 194, 195, 196, 197, 199,200, 203, 209, 213, 214, 218, 222, 223, 225, 234, 236, 239,241, 284, 297, 303, 321, 322, 328: n = A,T,C or G
agtacttctagaattaattaaggngggatnnnggngtaaanntntnnnnnatnncttnnattaagccnanatngtnnnantgctcnanaganngntnncnntnnnangacnnnangttananannancanccnaactgtganacatattcttccttgtntgnacnaaatannntataaaanangctgnanatnnnnntnnatncctatntatnnaaanactnntnaagtatatntnccntngataacagattttgaagaaatcctgttagatgataaagcattngaatggtcagttnatgtanaaaaaattcagtttaaannaacatntggttttacatta

SEQ ID NO: 18439 - DNA, 522 bp, Homo sapiens
  misc_feature 28, 30, 35, 38, 39, 46, 51, 53, 54, 55, 57, 62, 65, 67, 74,78, 79, 84, 86, 91, 92, 93, 98, 103, 111, 115, 116, 119,120, 125, 129, 130, 132, 134, 137, 143, 145, 147, 148, 149,160, 163, 166, 168, 169, 175, 179, 182, 193, 195, 198: n = A,T,C or G
  misc_feature 199, 200, 201, 203, 204, 206, 207, 209, 212, 214, 215, 220,223, 224, 235, 236, 237, 238, 239, 245, 246, 247, 250, 260,263, 264, 265, 266, 269, 272, 273, 297, 304, 361, 362, 366,379, 397, 416, 456, 458, 464, 466, 468, 498, 504, 510: n = A,T,C or G
agtacttctagaattaattaaggcgggnancctcnacnnctgacanggatngnnngngcacnacntnggtcccnttcnnaaggnangcctnnntgtgngaccnttgaggtnaganngcnnttttnctgnngncnctnatcatntncnnngggacttctgnaantcntnntctctnactnatnataacacatantnctnnnntnncnntnacntnncctgngannggggatttatnnnnntgctannnctntattaacatnttnnnnggntcnnatatctttacctgctggtcctganccttacnctatatcactgttgaacttccgagtctcttggaaccccgccacccacagctactcgnnttgngcacaatttaccngtgttgaatggaacaaanagccactggtgtggatatngaacccttgcattccaccttgggtcccgatccctacccgncngctgcnananaaggaccccaagtacagtgctctccgccanaatttntttcgnttccatgggctg

SEQ ID NO: 18440 - DNA, 285 bp, Homo sapiens
  misc_feature 98, 154, 209, 221: n = A,T,C or G
agtacttctagaattaattaaggcgggggggtggggagagtaaaagtcagtttgttgagaattggaagtttgatttaaggcaagtctttcaaacaganaaaatttgattagagttgggtaaggataaggatacaactaagaccatttgaagcancaagataaggattttgtggtgagtgagtcaatgcctgttgatgtttgtcattgangagatctttaangaagttcctatagtgaacaatcaaaccattttgcttgggcaggagactcctgcaaaaaaaaaaa

SEQ ID NO: 18441 - DNA, 347 bp, Homo sapiens
  misc_feature 11, 34, 107, 113, 148, 257, 264, 275, 297: n = A,T,C or G
agtacttctanaattaattaaggcggggtaaganggccaatctcaaaaggttacatactatatgatttcattaatataacattcttgaagaaacagaatatgtgganatgaanactatattattggttgccagttggtgagagatganggaaaacggtgactggctatcaaagggtaaggatcctcatgatggaactgttctgtatcttgactgaggtggtggtcacatgagtctgattaaattgcatagaactaancaaacangtacatgtaanggtggtgaaatcctaataaagncaattgttaattttttttccatgaaaccttgtcaacaaattttcttattt

SEQ ID NO: 18442 - DNA, 287 bp, Homo sapiens
  misc_feature 127, 129, 130, 142, 150, 151, 154, 156, 157, 159, 160, 169,170, 190, 192, 201, 213, 223, 225, 228, 231, 235, 238, 239,242, 243, 251, 265, 266, 271, 278, 285: n = A,T,C or G
agtacttctagaattaattaaggcggggcagttgtatttttttaaataaatatttttaacaaaatgaaaaaaaaaaaaaaaaaaaaaaaaaaaaaaaaaaaaaaaaaaaaaaaaaaaaaaaaaaaanannaaaaaaaaaaanaaaaaatnnacncnnannaaaaaatannaaccaaaaattggtatcccngnctggacttntatgtggtgctnggtaagccangnttnaanatcncanncannaatcgctngacaagctaaattnnggccnaacacanaatcaanaa

SEQ ID NO: 18443 - DNA, 347 bp, Homo sapiens
  misc_feature 102, 103, 192, 199, 205, 208, 215, 223, 242, 245, 247, 256,263, 265, 267, 283, 291, 292, 294, 296, 300, 307, 308, 312: n = A,T,C or G
agtacttctagaattaattaaggcggggggatcaaaacataattgttttaattctacagctgtaggagctttgtattgctgaactttcatctggaaaagttnnacagtgacatttttaaaagagaatttttttatctgccgaattctaccagtgtaaccttttttctaaataaacaatagttttctcaaaanaaaaaanaaaaanaanaaaaaanaaaaaaanaaaaaaaaaaaaaaaatanaangncaaggccgngcccaananantagtcacgagactgtnatcatctnngncnatcntaccccnncccncatggggcttaataacccaccacattaacaacata

SEQ ID NO: 18444 - DNA, 357 bp, Homo sapiens
  misc_feature 265, 274, 288, 326, 343: n = A,T,C or G
cccccctcgagagtacttctagaattaattaaggcgggtaggcctaagattgtgggggcaatgaatgaagcaaacagattttcgttcattttggttctcagggtttgttataattttttatttttatgggctttaaaccgtcagagctgggtgggtcctcctacaacaaaatcgtttgctctctctttcctagttaacaggctttcaaatattagaagatcaatgttctgaccccattgaaatttctcttttgcggaatgaaaanctctgattnaacccatcttcaancctggtttgcatattcctctctcttcggccatcttgtntagaccactacactgangccgtgcccatcgt

SEQ ID NO: 18445 - DNA, 592 bp, Homo sapiens
agtacttctagaattaattaaggcggggataagagactgtgaacctgtatctacctcacagggttagtacgaagattaaatgagatgattgaattaaaacacatagtgtagttcctggcagatgataaacattgtgctcttgttaccattatctttttaaaaaataaatatcatcatcaacatactgattaaggagtttataaaaagtaattcaagtatagggggaaatatttgcaatttaatgggaagaatttcataattatagagaagaaaggatttgtctacattatagcatgctgtagaactttccgcagtgatagaaattttagttcctttttatccggtgtgatagccactagccatgtgtacctattgagtatattaaataagccaggcagctgagcaactgaattgtagattttatttaagtttagccataaacttagcaaacagctaccatattgggcagcacagaagaaatatagtaaatacaaattatttatagaatgcttcttttctgggttgcatctgttacatttttattgagatgggaaaaatacattttacatgttataacccggttttatatttg

SEQ ID NO: 18446 - DNA, 145 bp, Homo sapiens
  misc_feature 58, 70, 127: n = A,T,C or G
agtacttctagaattaattaaggggggtgaatttgtcaatatctggattttaatccanacatctctgctnacaagcctttggtaagtcctttcaaatccttttcctcctttttacaaagaagagggntgggcttatttatttgcc

SEQ ID NO: 18447 - DNA, 343 bp, Homo sapiens
  misc_feature 28, 30, 32, 34, 37, 41, 46, 47, 61, 62, 76, 78, 80, 81, 82,85, 88, 91, 100, 103, 112, 128, 136, 150, 151, 161, 163,168, 170, 171, 174, 181, 182, 184, 185, 186, 187, 199, 209,210, 219, 225, 236, 237, 249, 251, 254: n = A,T,C or G
agtacttctagaattaattaaggcgggntnangnctncagngcagnnattgaggagatggnnattccatgtgccancntnnnatnganctnatggggcangcnctttgccanggcagacccgctccanactgactntttgcccataactnngcctgtacantncaggnannacnatatctnntnnnnagacccacaaancaaaagcttnntccaaacanggtggntcacacctgtnntcccaaaacttngngangtggaggtgggaggatcgcttgaacccaggagttcaagaccagcctggacaacatggcgaaaccccatctctacaaaaaatacaaaaat

SEQ ID NO: 18448 - DNA, 232 bp, Homo sapiens
  misc_feature 11, 24, 182: n = A,T,C or G
gccccccctcnagagtacttttanaattaattaaggcgggccgtggtagctcatgcctgtgatatggtttggctgtgtctccacacaagtgtcaccttgaattgtaataacccccatgtgacaagggcagggccaggtggagatacttgagtcatgggaacgatttcccccatactattctnatggtagtgaataagtttcatgagctctggtggttttataaatgggagtt

SEQ ID NO: 18449 - DNA, 405 bp, Homo sapiens
  misc_feature 28, 32, 34, 35, 36, 39, 40, 43, 53, 62, 63, 74, 77, 94, 99,111, 112, 113, 128, 133, 134, 135, 141, 151, 162, 164, 172,174, 177, 184, 186, 193, 197, 201, 202, 203, 207, 210, 212,216, 218, 225, 226, 227, 228, 238, 241, 243, 246, 259: n = A,T,C or G
  misc_feature 262, 265, 303, 306, 352, 356, 359: n = A,T,C or G
agtacttctagaattaattaaggcgggngccngnnnacnnagntattctggangctcaggcnngaaaatggggngantcctggaggcggatctngcgangagccgatatcnnnccagtgcacaccagncttgnnnacatanggagactccntctgaaaaaananaatatgcnanatnaaatgtnanaggaacngtgncccnnnaatnggngnaaanantaggccnnnnagatatgacntananccnccccccaaacggnganagnaaacaatagttaacagtgttcattcttctacacaatcnctntgtatctggtacctagtgcctagttaagtaactgaatactgatatnactnganctattctttaaaatagtgcagtgttagaaagccttccataccaaaa

SEQ ID NO: 18450 - DNA, 443 bp, Homo sapiens
  misc_feature 262, 275, 276, 281, 282, 289, 290, 303, 314, 315, 337, 339,345, 346, 356, 357, 358, 360, 361, 367, 368, 369, 379, 382,389, 391, 392, 415, 417, 429, 435: n = A,T,C or G
agtacttctagaattaattaaggcgggcagatcacgaggtcaagagatcaagaccaccctggccaacatggtgaaacccagtctctactaaaaatacaaaaattggctgggcatggtcacgtgggcctgtagtcccagctacttgggaggctgagataggagaatctcttgaacccaggaggtggaggttgcagtgagccgagattgcaccactgcactcagcctggtgacagaatgagactctgtctgaaaaaaaaaaaanaaaaaaaaaaaannagggnnccccccnngggggggcccccnattcccccttnnggggggttttttcccccccccncntggccnngtttttaaannntnnaatgcnnngagtgtggcnaanctttctntnngaagtcacaccttataccacatnanaggacacatacnggtganaaacccta

SEQ ID NO: 18451 - DNA, 313 bp, Homo sapiens
  misc_feature 8, 28, 79, 129, 137, 275, 277: n = A,T,C or G
agtacttntagaattaattaaggcgggnggattgaagaagaaagaaagaaagacagacagacagaaagaaagaaagaangaaagaaagaaagaaagaaagaaagaaagaaagaaagagagaaaaagaangaaagaangggagaaaaagaaagaaagaattgcctctaagaagcaggactggcaaatggataggagtgaggcatgcattataaacaatattattttcagtattattaatcaatgtaatcacttgacttttaaactacatatatagntnttatatacatgtatagtttatacacacatatataca

SEQ ID NO: 18452 - DNA, 297 bp, Homo sapiens
  misc_feature 53, 108, 125, 135, 225: n = A,T,C or G
agtacttctagaattaattaaggcgggaggagtgtatcaatctacttattgtnccaagaagcctgcctattactaagttgaaaaagaaaatatgatcttatacttgtntgaaacaaaaagcaatntgcaaaaggntcatcccaaacctctatgtgggtgactttcctgtcattcattttattatccagatagagaaggactagaaaaagaaacaacagaaatgtnagaaaggaattttaaaagaaaaaaaagaggtagaaaagtaatcttccaacaaatatgagatgaggaaacaga

SEQ ID NO: 18453 - DNA, 414 bp, Homo sapiens
  misc_feature 238, 281, 283, 284, 288, 289, 297, 305, 307, 309, 310, 318,319, 322, 325, 334, 344, 346, 347, 350, 352, 353, 359, 363,365, 366, 367, 368, 369, 371, 376, 378, 379, 381, 385, 388,395, 396, 398, 402, 405, 409: n = A,T,C or G
agtacttctagaattaattaaggcgggcggattgcctgagctcaggagttcgagaccagcattgacaacacggtgaaaccccatttctactaaaaatacaaaaaattagcccggcgtggcggcgtgtacctgtagtcccagctactcgggaggctgaggcaggagaattgcttgatcccaggaggcggagcttgcagtgagccgagatcacaacactgcaccccagcctgggtgacanagccagactctgtctccgaaaaaaaaaaaaaaaaaaaaaaaananngggnncccccccngggggggncncnnattccccnnttnggnggttttttncccccccccncnnggncnntttttnaaanannnnncntttgntnnantggngtnacctgtnntntcanganggtntgtat

SEQ ID NO: 18454 - DNA, 463 bp, Homo sapiens
  misc_feature 54, 83, 315: n = A,T,C or G
agtacttctagaattaattaaggcggggtgaaccggcccaggtcggaaacggancaggtcaaaactcccgtgctgatcagtantaggatcgcttgagcccaggagttctgggctgtagtgcgctatgccgatcgggtgtccgcactaagttcggcatcaatatggtgacctcccgggagcgggggaccaccaggttgcctaaggaggggtgaaccggcccaggtcggaaacggagcaggtcaaaactcccatgctccaccacgccctgctaattttgtatttttagtagaaacagggtttctccatgttggtcangctggtcttgaacctcctgacctcaggtgatctgcctgcctcggtctcccaaaatgctgggattacaggcgtgagccactgtgcctggcctttctaacttctaataaatacaatttaagttaaaatattgaaccatttaacataacca

SEQ ID NO: 18455 - DNA, 439 bp, Homo sapiens
agtacttctagaattaattaaggcggggcctgatattcaccccttatgtgcctaaccctgttctcaaagtattaaacccttgaaaaggtcactattgctagaaagtcgtccctcggtgtccacggaggagataggttctgggaccactgcagaaagcaaagagcgaggatgctcaagtccctgatataaaatggcatcatacgagcacatcacctatgcacttcctctctcatgttttaaataatttctggattacttgtaatacctaacacaatgtaaatgctgtgtgaatagttgtactatgttgtttagtcactaatgataagaaaatctacaagttaggtatagatgcagattttttcatgaatatctttgattcatggttgaagccaggggtgaggaacccacagacacagagggctgtgtgtccttttgaaaa

SEQ ID NO: 18456 - DNA, 177 bp, Homo sapiens
  misc_feature 23, 36, 44, 99: n = A,T,C or G
agtacttctagaattaattaaantataattgctaanagtagcanaattttgatttattttatttgaatggaagtttattaacactcatccacagatacncttatgtaattaagtttctgatgatgaaccagcacaatagacagccactactgctcattctcgcttcatttccttttt

SEQ ID NO: 18457 - DNA, 683 bp, Homo sapiens
  misc_feature 65, 85, 109, 125, 145, 194, 229, 232, 274, 488, 490, 508,574, 603, 638, 648, 653, 655, 659, 660, 662, 665, 667: n = A,T,C or G
agtacttctagaattaattaaggtggggggtttgggaaggaaagaatgtaatattatggatttanccttaggctttaagttttangctggcaaaagaaatgttattcantgggtttgaggtttgnactactttcttcaaacttanagaattataacaggatggtgtttactttgttcacctggatgtccccaanactctagcttcttctatcagtggttggtctgatanaanaggtaaaaattgctcttgaaaatgtcctacaatttatgcagnttctttgataatatttttctgttcaaatccctgcttctgtttttggtctgttacctaaatatagttcaagtttaattctgtaagagcaaagaaatgaatttgatgaggaaattaagcatccaatggaggattggtcttgaagaccttaaaggtgctttccaacctgcactgctccagtgaaatgtggtacttttttcttttaaaagcaaccaananagctggggaatatctgtntaccccaaagtaattgcattttggcccttcatttttgactttcttaaattcataatttgatccagngctttaaaacttcccaagggaaatttttnaaccattactacctttaccctggttcaaaaataanggctttgttngaaantncctnntnccntnaacctaatttcaaaaa

SEQ ID NO: 18458 - DNA, 340 bp, Homo sapiens
agtacttctagaattaattaaggcggggggcaggcaacgtctctacacagagctgctgccacatggctgggaaggactcagatccggtacatccactgatctgccgccaagtgtgaaccctgaggtcagaacaactgaacttggatgaggagggggatacctgtgtactgtagtatcaggtttatgagtacctacaaattcaaatcattttgcatccttcaatacatttaatttcctcaataaacctgtgagaatcattggtagctcaattttacaggtgagaaaactgaggctcagagaaatagcttgccccataaaaaaaaaaaaaaaaaaaaaaaaa

SEQ ID NO: 18459 - DNA, 222 bp, Homo sapiens
  misc_feature 33, 35, 38, 41, 47, 48, 106, 139, 142: n = A,T,C or G
agtacttctagaattaattaaggcgggggaaantnttnacnaactgnncatatgacataggaatgatatgatagaatatacagataaactcagtactaaatagtanaaaaatccttgtaataaagactaaaaataaatnccnttagaaaatgggtaggcacgggtgcagtggctcacgcttgtaatccaagcactttgggaatatgaggcgggaggatcact

SEQ ID NO: 18460 - DNA, 272 bp, Homo sapiens
acaaaagctgggtccgggccccccctcgagagtacttctagaattaattaaggcggggagaggctgcctgctctctaacggttgattctcatttgtcccttaaacagctgcatttcttggttgttcttaaacagacttgtatattttgatacagttctttgtaataaaattgaccattgtaggtaaaaaaaaaaaaaaaaaaaaaaaaaaaaaaaaaaaaaaaaaaaaaaaaaaaaaaaggaaaaaaaaaaaaaaaaaaaaaaaaaaaaagg

SEQ ID NO: 18461 - DNA, 573 bp, Homo sapiens
  misc_feature 24, 25, 31, 33, 39, 41, 49, 50, 55, 62, 66, 67, 69, 72, 73,74, 100, 103, 106, 111, 115, 129, 136, 137, 151, 163, 164,178, 179, 182, 183, 191, 201, 204, 205, 211, 213, 215, 230,234, 239, 242, 249, 250, 252, 254, 255, 316, 383, 389: n = A,T,C or G
  misc_feature 390, 392, 443, 508, 513: n = A,T,C or G
agtacttctagaattaattaaggnnggggcncntagatntncttacacnnaaacntggtcantgcnncncannntaggggcgatggactaatgtaccaanttnatncctgntgcngttctaacctatcntaatgannggatggatctctcnggacctataccnncacattccatcgcnnatnnacaggcangagactgatnccnngctttngngncaactgcatgaggcnttantttcnatnttactanngntnntaagcacagaccctttacggtgtgtccggctgggggacggtcaaggcctttcccttcccanttatgccatatttaactactatctacatggaggaaaaacattgcccaattcctgggctttcattacncacganntntccttgacggccttccaacaagtttttgtgtccctgggtacttgagattanggagtggtgatgactcttaaggagcatgctgccctcaagcatctgtttaacaaagcacatcttgnaccgncctttaatcctttcactctgaattgacacagcacatgtttcaaaaaacacggggtttggg

SEQ ID NO: 18462 - DNA, 376 bp, Homo sapiens
  misc_feature 112, 126, 138, 152, 155, 159, 166, 172, 176, 188, 191, 200,239, 243, 265, 275, 300, 311, 324, 327, 330, 337, 358: n = A,T,C or G
agtacttctagaattaattaaggcgggggttgcagtgagctgagatcacaccactgcactccagcctaggcgacagagtgagactccgtctcaaaaaaaaaaaaatttaggntggaatacttattngggatctttgtngttcaatacagtanccnctantcatacnctagtntgtnttaaataaactnctnttaaataanctagttttaaatttcatagtaatgaaatttaaatttatntttnttaggccgggcggcgggggctnaaacctgtantcctacccctttgggaggccgaggngggaggattgnttgaggccagganttnaanaccagcntgggcaacaaagtgagacccntgtttttacccccccaaa

SEQ ID NO: 18463 - DNA, 418 bp, Homo sapiens
agtacttctagaattaattaaggcggggatgttctgtagttgaaaatgttagttgtctgctggcacagaatttatctcgttcctttctctcccttctctcctccaaatcagtctcttcccttctccactagataactgtaaaaccttttcctggggtacatacattcgttaactcttgggcagtggtgagcacgagatgactttctgcagcgtttatcactgttgggtggagtcacgtcccttccctccaccgaagtcatcaaccagatagggaagggaaagatgaggcccagaaaacgagttcaaactctaggtcttgtacacgtatgtaagtaaatgtcaataacccaagcctttgtcatagcagtcacttggttgacttaggatctgggtctgttgaattttgtgcttgggaatg

SEQ ID NO: 18464 - DNA, 373 bp, Homo sapiens
  misc_feature 132, 143, 146, 154, 172, 176, 178, 183, 188, 192, 215, 217,226, 230, 232, 234, 236, 239, 244, 247, 250, 256, 262, 279,285, 293, 298, 309, 316, 318, 327, 329, 333, 341: n = A,T,C or G
agtacttctagaattaattaaggcggggggtggggctggcagggaattagaatttctctctctcttttaatagttttattttgtctgtcctgtttgttcatttggatgttttaatttttaaaaaaaaaaaanctttgctgatnttnataatttngtatcataaaaatgtttncctntncagtntttgncatnccagtttataacaaaaaaaaatncngggattttntttntntngnaancattncanctntgtttnactttnggacaaaatttttattngtatanagggcttnctaangttaaatagtncaaagtntntaacatttncnttanggactcanggtaggttttagggtaaggagtttaaaggaaa

SEQ ID NO: 18465 - DNA, 399 bp, Homo sapiens
  misc_feature 188, 189, 191, 194, 197, 198, 202, 204, 215, 219, 220, 234,239, 243, 249, 256, 274, 278, 289, 296, 326, 328, 333, 336,342, 348, 360, 362, 373, 375: n = A,T,C or G
agtacttctagaattaattaagcgggagggccgcaggaactgagactgccattcagtaagcgctcaatttattcttaccaaagtgtttgcttaatgagtaaatctcccaaaccatgtatacatttaatttagaaataaactgtacttttcctaagccaaaaaaaaaaaaaaaaaaaaaaaaaaagaanncntanaannaaananaaaaaaatcancttnngcaaacatatgganacccngccnctcccnaaaaaantttttaagccgggcgcantggnttacgcctgtnatcccancactttgggaggccaggcgggtggatcacnangtcanganatcaanaccatnctggttaacacngngaaaccccgtntntactaaaaatcaaaaaaaattacc

SEQ ID NO: 18466 - DNA, 108 bp, Homo sapiens
  misc_feature 51: n = A,T,C or G
agtacttctagaattaattaaggcgggctataaaagaattgcacgtatganaaacctatatttcaatactgctgaaacagacatgaaataaagaatttaaagaatgaa

SEQ ID NO: 18467 - DNA, 320 bp, Homo sapiens
  misc_feature 147, 149, 153, 154, 159, 164, 168, 170, 171, 173, 175, 178,182, 183, 185, 186, 187, 190, 193, 194, 195, 196, 202, 205,206, 207, 209, 211, 212, 214, 215, 222, 223, 227, 230, 234,248, 249, 257, 258, 261, 276, 277, 280, 281, 284, 285: n = A,T,C or G
  misc_feature 286, 298, 306, 307, 308, 309, 310, 312, 314: n = A,T,C or G
agtacttctagaattaattaaggcgggagaatcacttgaacccgggaggtggagcttgcggtgagccgagatcgcgccattgcactccagcctgggcaacaagagtgaaactccatctcaaaaaaaaaaagaaaaaaaaaaaaattngnccannggggnaaaanaaantnntntnttnaaanntnnngcnaannnnaggggntannncntnnanncccaccnntttnggnggcnagggcgggcaaatnntttgaccnnagnatttcaaaaccaccnnggnnaannnggaaaaaccccntttttccnnnnnananaaaaaa

SEQ ID NO: 18468 - DNA, 491 bp, Homo sapiens
  misc_feature 485: n = A,T,C or G
agtacttctagaattaattaaggcgggtggatcataaagtcaggagattgagaccatcctggctaacacggtgaaaccccgtctctactaaaaaatacaaaaaattagccgggcgtggtgatgagtgcctgcagtcccagctaatcgggaggctgaggcaagagaatggtgtgaaccagggaggtggagcttgcagtgagccgagatcgcaccattgcactccagcctggggacagagcgagactccatttcaaaaaaaataaataaataaaataaaataaaataaaaactgctacttatctacaagccagaacagaaacataattttaaaatggttacaatctagcaccagaggcctcaagacaattctggaaactaaataaaaagggctaatggaactgcaacctacagctttccccattacggtctttgcattcctgagactgaaaaaaaaaagttacatcactatatgcgatttgtctgantgaagg

SEQ ID NO: 18469 - DNA, 423 bp, Homo sapiens
  misc_feature 35, 90, 123, 150, 207, 214, 277, 307, 308, 357, 381: n = A,T,C or G
agtacttctagaattaattaaggcgggcacctgtnatcacagctatttgcgaggctgaggataaaaattgcttgaacctgggaggcggangttgcattgggctgatatcacaccaatccacangaatccgtctcaaaaagaaagaaaganagaaaaagaggtcacaatgcctactcttttaagtttttacaatgttgttcacaggcnagacgtnctcatgcaaccttcatccaagctcctggaacactgcttacgccttcatccatgcactggctanactctaccttataacataattgtagctgtnngccctgttacctgtgagttccttccttcctacacatgcatgaaaaccanaaaccctccaatctaaaagagganacccaccaaccaaccaggtggacaacctcaaaatgaagccgt

SEQ ID NO: 18470 - DNA, 430 bp, Homo sapiens
  misc_feature 34, 39, 43, 53, 54, 55, 56, 59, 61, 63, 65, 74, 84, 87, 88,92, 97, 98, 99, 103, 104, 105, 106, 107, 116, 118, 120,122, 123, 124, 125, 127, 129, 130, 131, 133, 135, 141, 142,145, 154, 156, 157, 158, 163, 164, 174, 176, 182, 184: n = A,T,C or G
  misc_feature 189, 190, 192: n = A,T,C or G
agtacttctagaattaattaaggcgggggaggtngtatntggntggggacagnnnnacntngnanctctttgtnctttccactnagnntggntgcannnctannnnngctctaaanantnannnntntnnntntnaaacannccnccccaaaangnnnaatgnngggaagtggnanaggatntnaaccnntntacaaagcttcaatgtgagaggatcgagccattgaaagctcattaccagtaggacataatttttggctctccctattcacaaccagtgcacagtttgacacagtggcctcaaggttcacagtgcaccatgtcactgtgctatcctacgaaatcatttgtttctaagttgtgtttattcctggagtgacatgccaccccgaatggctcactttcactgaggatgctgtcctctgattta

SEQ ID NO: 18471 - DNA, 434 bp, Homo sapiens
  misc_feature 30, 32, 46, 56, 68, 74, 106, 111, 115, 118, 122, 138, 152,167, 170, 183, 196, 222, 233, 241, 242, 254, 280, 282, 334,336, 338, 347, 351, 353, 355, 356, 360, 375, 376, 377, 378,383, 384, 385, 387, 400, 418: n = A,T,C or G
agtacttctagaattaattaaggcgggggngncattcccaggaatntatgatgctntgtttgatattnaaagcnaagtggacccttccaaggcctggggagaagtnaaaanacanatntatnttgcagccttcacagngcaggcagctgcanagactttgagtgaantancctaagaggattntttaaagaatccntattgaatttgtgtggtatgtcactnataaagaatcntaatgggnntattgataaatnttaaaattggcatatttgaaataaantngaatattatatttaacattacaccccacccttttaaatgggccccccccctngngnatggccatntaancngnncgtntaatattttatcccnnnnatgtnnncngttttttatgaancttgatatggacatttanattgcttctaattttt

SEQ ID NO: 18472 - DNA, 232 bp, Homo sapiens
agtacttctagaattaattaaggcgggaggagataaatggaagtatactgatgtaagactcttatactatacatgaagtggtataatatcactgtgataagtgataagactgtgagaaattgaagtgtatactttgaacctcaaagcaatgaagaaaatagcaaaacaaagaatttacagctgataagccaacaaaggcaataaaaattaatcattaaaaaatacgcaatcc

SEQ ID NO: 18473 - DNA, 392 bp, Homo sapiens
  misc_feature 116, 124, 128, 144, 154, 159, 161, 163, 175, 182, 183, 184,187, 188, 204, 274, 278, 282, 285, 286, 292, 300, 312, 314,317, 331, 335, 341, 345, 348, 351, 352, 362, 369, 384: n = A,T,C or G
agtacttctagaattaattaaggcggggggcaggcctgcggatgcatgaaataatgttggcattattttttaatttttttaaaaaataaatggtatcttattaaaaaaaaaaaaanaaaaaaanaaanaaaaaaaaaaaaaaanaaaaaaaaanaaaanangnaaaatatgcatngaacctnnnaannaaaggctgcaagtganctgagatcatgccatggcagtctagcctgggcaacagagcgagactctgtttcaaaaaaaaaaaaaaaanaaanctanttnntcagtnttctgctnctcaaacaaatnanctntttggataacaaancatncccagnggtntgntannaaaccacctntttgtgngggaagggacaaatnaaaaaatt

SEQ ID NO: 18474 - DNA, 402 bp, Homo sapiens
  misc_feature 25, 28, 34, 35, 41, 44, 47, 58, 63, 66, 73, 75, 88, 95, 108,118, 126, 145, 151, 163, 165, 168, 173, 181, 185, 203, 236,237, 244, 252, 253, 267, 290, 333, 361, 370: n = A,T,C or G
agtacttctagaattaattaaggcnggncatggnngtgcgngcntgnagtcccagctnctctngangctgacngnatgataaattctnggacctnaaaggcacacgtngccttcaacnctatatcngtgcgcctggcgcttgagncttggnctggactcaggntnatnaaaanagtcttgntaanatcttgagaccccttttntactacttcttaaaaagaaaaacatgacaatcnnctctgtnttacaatnnggtctctatatttnaaattcaaagttttcaatttctngcttatttttcaacatttattatttattaaatgacacttagtncaaaggattttccagtgcaggaataatntaaacaacnaccaaaattattgagaccaataaccatgggaa

SEQ ID NO: 18475 - DNA, 639 bp, Homo sapiens
  misc_feature 3, 524, 530, 537, 556, 560, 562, 567, 576, 611, 623: n = A,T,C or G
tcnagagtacttctagaattaattaaggcggggtcgatatcttggagtgaactggctgagttatattgtgggtatgtgtctaacttttaagaaactgacaaagtttttcccaccagcagtgtatatgagttttagttttttcatatgcttgccaacacttttatgatcactctagaattttagttattctagtaagcgtgcagtcgtatctcattgtggatttaatttacatttctctaataactgatgatcttgatcatgttttcctgttctcttttgtcatccatgtatcttgtttattaaagtctatgttcaaatcttttgcccattaaaaatgtttattattgccgggcgcagtggcttacgcctgtaatcccagcactttgggaggctaaggcgggctgattgcctgagctcaggagtttgagaccagcctgggcaacaaggtgaaaccccgtctctactaaaatacaaaaaattagcctggcatggcggctgcgcctgtaatcccagctacttgggangctgangcagganaatccttgaacccaaaagnggangntgcantgaacccanatcaccccctgcacttcaacctgggcgaacagaancacacctgtctnaaaaaaaaaaaaaaaa

SEQ ID NO: 18476 - DNA, 359 bp, Homo sapiens
  misc_feature 166: n = A,T,C or G
agtacttctagaattaattaaggcggggtatagataaaatagtgctagctatgacttcataattttgaaagctgagtgaagagtccatggggattattataccattctctgtattttagtatatacatgaaaatttccatgggaaaaggttttttttaaaacgtantttgaaattggcagaatttctgggttactggtagatgcagaaacaaatcctctttggaggaactcacatccaggcctcagagcatccccacaaacaaaaatcttcctatgatcatgagctcacaaccaaaacatcacaaagcacataaaaaataaggcactatgagtgaaagacagcaaaaaaaaaaaaaaaa

SEQ ID NO: 18477 - DNA, 354 bp, Homo sapiens
  misc_feature 54, 59, 65, 68, 91, 93, 105, 115, 127, 140, 163, 169, 174,184, 186, 188, 205, 222, 224, 306, 319, 326, 332, 339: n = A,T,C or G
agtacttctagaattaattaaggcgggctttcggccaatcagggattagtttantcatngaagtntgnattttaatggttttgaaaagctnantactgggcactngcttttttgntcttcgggactntagaagtttgganaacaatattcagcagttgcctantagctntgtgncctgatgcanangncctctgagaacccattnctcccttactgcactantntttggtcccctttctccagcactgagtgatgtggaagttactcaaaggtctttccaggtattcttttaaacttttgaagtangaacaaaattcanagtgcangttatnctaacangctattcattttatt

SEQ ID NO: 18478 - DNA, 636 bp, Homo sapiens
  misc_feature 81, 253, 256, 257, 258, 260, 261, 262, 263, 266, 270, 276,278, 299, 304, 308, 312, 317, 319, 320, 322, 331, 338, 346,347, 351, 352, 353, 360, 362, 363, 364, 367, 368, 370, 381,403, 404, 405, 407, 409, 410, 411, 412, 415, 416, 417: n = A,T,C or G
  misc_feature 420, 422, 423, 424, 425, 426, 427, 428, 430, 432, 436, 437,438, 439, 441, 442, 443, 445, 447, 449, 450, 454, 455, 456,457, 458, 459, 461, 464, 465, 467, 476, 477, 480, 485, 491,494, 501, 506, 513, 518, 520, 523, 542, 566, 567, 569: n = A,T,C or G
  misc_feature 599, 600, 607, 634: n = A,T,C or G
agtacttctagaattaattaaggcggggattataagtcaaggaccaagttcagatacttgagacaaagtggaaagtctcancatatggaaacaaggccttggaggagaccatggacatcaccaagttcatgtgctgggctggaaagaaaagcctgttgattttcacttgctgtgcatttattcatccattccattgcctcaatgctgagaacagtgcctgacacataaaagatgctcaataaatatgttaaangtnnnannnnaanaaanaaaaananttttttttaaaaaaaaaaaanttaanatanaaanaaaantnntngggggcccnccccccngggggggnnggannngtccctncnnnctnnanaagggtttttngtcccttcccccccccccgcgnnncngnnnnttnnnaanannnnnnntngnatgnnnngnnntngnannttgnnnnnngnggnnangaggggaannganccttntttggnctncacttgnggggnacgtganaaggngngtntttaagggaagtggggttncaaaacctgaagcttttttaaatnnanccatttttaaacccgtattgttaaaaactnnggggttncttaatttaaaaaaaaaaaaaattttntt

SEQ ID NO: 18479 - DNA, 628 bp, Homo sapiens
  misc_feature 271, 273, 274, 278, 283, 291, 302, 303, 309, 311, 312, 317,320, 326, 327, 330, 334, 337, 338, 340, 343, 344, 348, 350,351, 352, 356, 360, 361, 365, 366, 375, 377, 380, 385, 389,393, 397, 401, 405, 406, 420, 425, 428, 430, 432, 433: n = A,T,C or G
  misc_feature 436, 440, 443, 450, 451, 463, 466, 475, 492, 500, 501, 503,505, 506, 513, 515, 516, 521, 522, 525, 545, 546, 547, 548,557, 577, 579, 594: n = A,T,C or G
agtacttctagaattaattaaggcgggcagatcacttgaggtcaggagttcaagaccagcctggccaatatggtgaaaccccatctctactaaaatacaaaaattagctgggcatggtggtgtacacctgtaatcccagctacttgggaggctgaggcaagagaatcgcttgaacctgggaggtggaggttgcagtgagctgagatcgcgccactgcatgctagcctgggcgacggagagagactctgtctcaaaaaaaaaaaaaaaaaangnntttngaaanaaaattcnttggaattttnntttttnannatttnggncccccnnaangggnccnnanggnncctngnnnaaantttnnaaanncccgggggnanttnaaaangggncccnaaancccnaaannccttttgggggccntgggnttncntnnggncccntangggtttnngggaaattcccnttnggggggccncttttttttggggtttngaatttannantnnttttttntnngaaannagncaaaacctttttgggttttnnnnggggctaanaatttttgggaaaaaactgnantttttttttttgggnggggggggggggggcccttcccttttcccccccc

SEQ ID NO: 18480 - DNA, 375 bp, Homo sapiens
agtacttctagaattaattaatagtttagagcaagaataatgccattgccttggtaagttatttagggaagtattttatacccaggccctataatctccaagtctgagaatcacaattttgagcccttttccttcaaaggaattaacaaataggtaattgtcttttttagtactcattattcaggtttattggtcttatggttttataaattgagagtattctctccacttgagaaatgattttgtaaagtctgtttttaatttcattaggttacacttgagacttctttgtgaagagcttaacatttagctgttaaaacttgaggaggtggccgggcgcggtggctcacgccttgtaatcccagcactttggga

SEQ ID NO: 18481 - DNA, 105 bp, Homo sapiens
  misc_feature 28: n = A,T,C or G
agtacttctagaattaattaaggcgggnaagtagaccagacactcgtaatccccgatctctgtcattcaactgctattgcaatgatttaaatcaggactcttgtc

SEQ ID NO: 18482 - DNA, 180 bp, Homo sapiens
  misc_feature 22, 25, 45, 53, 55, 154: n = A,T,C or G
ggattccaagcgggattccctngangagggggagctggtagatcnccgcgtgnanatcacattatcggaactccctgtataggaacgaagaatgactctatggaagacagaggagaatgaagatgattctttggccatcaaaccaccccatcanatgttctcgatcaaaaacaaaattaa

SEQ ID NO: 18483 - DNA, 569 bp, Homo sapiens
  misc_feature 29, 32, 35, 36, 39, 41, 43, 44, 59, 63, 64, 65, 67, 69, 71,76, 79, 95, 97, 138, 151, 158, 164, 167, 172, 182, 183,184, 198, 204, 212, 213, 216, 228, 229, 235, 250, 255, 260,261, 264, 267, 269, 276, 279, 280, 282, 285, 287, 288: n = A,T,C or G
  misc_feature 289, 291, 295, 299, 300, 301, 302, 308, 309, 313, 314, 315,319, 320, 323, 325, 330, 333, 337, 338, 341, 342, 345, 349,351, 357, 361, 362, 365, 372, 373, 375, 377, 378, 380, 383,385, 420, 440, 479, 491, 535, 553: n = A,T,C or G
agtacttctagaattaattaaggcggggnagnccnntantnannatggtaccccatatnaagnnnantnangtctnctnactctacatagcaccngnatatgtgaggtctgggctgcactaagaattgttattatgtntctctcactgggnaaaaacnataaanctncctgntgcctgtggnnntgttgactagactntcacantgtctaannggncctgcatattgnntatacngagctcgcacttatnactcnctatnnccnaantnaaggccnccnngnatngnnnantatnactnnnnggagtnntctnnnaacnnggnanttctngtnttgnncgnncanaacngnttatgnaccnnctnggaaaanncntnncnttncncttccttgtactatccctatgaggcataattggtnacaagctccatgtgcctacnacaaacagacctaaaatcgctcattgcatactcttcaangagccacatagncctcgtagtaacagccattcttcatccaaaccccctgaagcttnaccggcgcagtcattctnataatcgcccacgggc

SEQ ID NO: 18484 - DNA, 469 bp, Homo sapiens
  misc_feature 181, 187, 191, 197, 202, 205, 207, 217, 238, 258, 266, 283,309, 323, 324, 329, 352, 366, 370, 372, 376, 380, 382, 395: n = A,T,C or G
agtacttctagaattaattaaggcgggtgcctgtagtccgtagtgcccagctactcaggaggctgaggcaggagaatcgcttgaacctaggaggcagaggttgcactgagccgagatcgcaccactgcattccagcctgggcgacatagtgagaccccatctcaaaaaacaaaaaaaaaanaaactngaanctgatngtttngancnaataaaactngtaaaacttaaaacaaaaatngagaagaaagtattttcccntgtcagcngtaaaatagaataaaangactgtcactccagaccctataggcnttaaaaagataatnngagantttctttaacacctttttgtcangaaagccaacaaantttntntgantatntngattccataaatntcacagctgactcaaaaagaaattaaaaacctaaatagccctgttcaactagaaaaatttaattcataataaaa

SEQ ID NO: 18485 - DNA, 407 bp, Homo sapiens
  misc_feature 70, 79, 81, 82, 86, 91, 95, 96, 311: n = A,T,C or G
agtacttctagaattaattaaggcgggggaggtggaggtagggcctggagtttcaagcttcagccatgcntagactagncnncttntggtntgtnnctagaacagggcttgttccctcaagcttcagctgtgcatagactggtcagactccgtagtgactagagcaggcagtcttctttagcagcagcttgatctcatctcaggatgagttggatgatctgggtcctgctggcttgtctacttgtcttgagctgccagtttcagctgactgtggtggatctaaggcacaacacctgcaactttaacagcancgggactgaacaagattacaggtatagggcttatattgtatgagtcttaaagaagttggattctacatactggtggccttgtactgtgtcaaaaaa

SEQ ID NO: 18486 - DNA, 392 bp, Homo sapiens
ctcgagagtacttctagaattaattaagttgacaaacctaagactcacagacatgaaaacacaaatcatcgtgtcaggaatgaaaacaaagagaacactacagattttgctaacattaaaagaataacatgggaataatactatgaacaattctgagttcataaattcaacttaaaagaaacagatcaactcctcaaaactacaaactaccaaaactcagtcaaaaagacaatctgaagagtcctataactactaccaaaattgattttctaatcaaaagctccaaaaagataaagctcaaatggttttaccaaacaattctaatgaacatttaaagatgaatttaaacctattttacacattctcatccagaaatagaagggaactcattt

SEQ ID NO: 18487 - DNA, 431 bp, Homo sapiens
  misc_feature 38, 41, 42, 44, 47, 50, 54, 64, 82, 84, 85, 98, 105, 111,114, 121, 130, 131, 137, 151, 157, 168, 170, 181, 212, 216,277, 306: n = A,T,C or G
agtacttctagaattaattaaggcgggggttgcatctngcnnanatnacnccantgcactctancctgggcgacaaaggacnanntgaaccaaatganttatgantcctanggntgtagtncagattggnntatcancttacatctttctntgactntgagtattttntnttaaaaatgcntaactggccacgcccagtgactcatgcctgntatnccatcactttggggaggctaaggccagagaatcacttgaacctgggaggcagaggttgtancgagccgagatcacgccattgcactccancctgggcgacaagtgtgagactctgtcataaaaaataaataaataaaataaaaaataaaaatgcataataattttatattatttttcataaaaggaccttttaaattttgacacaaacatatttt

SEQ ID NO: 18488 - DNA, 282 bp, Homo sapiens
  misc_feature 118, 133, 134, 135, 136, 138, 141, 143, 145, 148, 149, 150,151, 153, 156, 157, 165, 166, 167, 168, 170, 171, 172, 178,179, 189, 192, 195, 202, 204, 210, 211, 218, 223, 228, 229,232, 233, 235, 236, 243, 244, 251, 252, 253, 257, 258: n = A,T,C or G
  misc_feature 259, 262, 263, 264, 265: n = A,T,C or G
agtacttctagaattaattaaggcggggcttgcagtgagctgagatcaggccaccgcaccccagcctgggcaacagagcaagactccatctcaaaaaaaaaaaaaaaaaaaaaatttnccccggggggggggnnnntnccntntnttnnnncntcnnaggggggnnnntnnngaaaanncttttaaccnggnaanggggggntncggggnncccaaantaagnctttnnccnncnnccggggnnaaaaaannnaaannnggnnnnaaaaaaaaaaaaaaaaa

SEQ ID NO: 18489 - DNA, 390 bp, Homo sapiens
  misc_feature 376, 378: n = A,T,C or G
agtacttctagaattaattaaggcgggagaaagaattggtgagcttgaagacaagctatttgaaaatacacaatcagagtagacaaaagaaaaaagagtaaaaacaataaagcagacttacaggatctagaaagtagactcaaagagacaaatataatagttattggccttaaagaggaggtagagaaagatagaggtagaaagtttattcaaagaaataaaatggagaattttccaagcctagagaaagatatcaacatccaagttcaagaaggtttaacccaaagcagatttaatccaaacaagactaactcaaggcatttcataatcaaactcccaaaggtcaaggataaagaaaggatcctaaaagtggcananaaaaaaaaaaaa

SEQ ID NO: 18490 - DNA, 260 bp, Homo sapiens
  misc_feature 213, 230, 233, 243, 245, 251: n = A,T,C or G
agtacttctagaattaattaaggcgggtatggtacatttgttataattgataaaccaatattgatacattattgttaactatagttcatagtgctatgaactatattattgtgttgtacgttctggtttacattctggtatctgttgtacattctgagttttgatgaatgtatgatgacatgtgtcaccatcatggtgtcatatagaatgttnactgccctaaaaaaaanaanatcctggatnanaaaaangcggccgcc

SEQ ID NO: 18491 - DNA, 556 bp, Homo sapiens
agtacttctagaattaattaaggcgggaaaaacaaaccaaaaaggaaataagaaaaggcagacaaaatggatgaaagagaattgtaaaagacaattggaatctataaaaagaatcaaatggaagttctaaaatgtcacaatacaatactggatttaacagaagacacgattgataaacttgaagaaagttcaatagaacatatccaaagtaaagcacagagggaacaaagaaaggaaaacagcagaacagaatatgagacatgagttttataaagtccctagaggagaaagagaataagagagaagcagtatttgaggaaatcatggcagacaatttcccaaatttgatgaaaacaaatccactgattcaagaagctcagcaaaatctaagcaggataaatacaaagaaaactatagctgaaaacatcatagctggtcaggcacagcagttcacacctgtaatcctagcaatttgggaggccaaggcaggcaaagcgtttgagctcaggagtttgagactagcttggccaacatggtgaaattccatctccaaaaa

SEQ ID NO: 18492 - DNA, 735 bp, Homo sapiens
  misc_feature 458, 474, 490, 580, 589, 590, 592, 612, 653, 690, 697, 707,710: n = A,T,C or G
agtacttctagaattaattaaggcggggaagggggcagttgtacatgcccctctaattctcacatcatctcacacaacccaagctccatttcctcagaaagccttctgctgctcaggtaagaaaaacccaaggccattgtgccatccagtacagtggccacgagccatgtgtggctattaaattagctaaaattagaagccagatcagcagttgcactagcctcatttcaagtgttcaacagccacctgtgactaggggctagaaacaggaacgcttttgggccaggctcggtggctcatgcctgtaatgccaacacttggggagggcgaggtgggtggatcacctaaggtcaggagttcgagaccagcctcgctaacatggtgaaaccttgtttctactaaaataacaaaaaattaaccaggcttggtggtgcgcgcctgtaatctcagctactcangaggctgaggcagganaatcgcttgaacccangaggcagaagttgcagtgagccaagatcgtgccattgcactccaacttgggcaacgagagcaaaactccatcttaaaaaaaaaaaagcanaacactttnntnatcccaaaaagttccctaanccccactggtcccggaaatgaaattttacccggattaaatntaaaaacttgcccgccttttggttttactgcctgaanccccaancaactggttnggncttcctcttgaaaaccccccccttc

SEQ ID NO: 18493 - DNA, 354 bp, Homo sapiens
agtacttctagaattaattaaggcggggaggtgagcttgtgccagaatgtaaaccaactgtgaaactaagcacactgtttagttcagctctttatttagacagaaagacctgctttaaacatattagttttaaaaagttgacaaaaattctatatatgtattgagtaaaacatgatgatctgaaatatgtataagctgtggaataatagctatgagttaataaacacagctgagtgcagtggctcatgcctgtaatcccagaactttgggaggctgaggcgggcagattgcttgagctcagaagttcaagaccagcctgggcaacatggcgaaatcccgtatctaccaaaaata

SEQ ID NO: 18494 - DNA, 422 bp, Homo sapiens
agtacttctagaattaattaaggcgggcacagtgaggctgccacctggtcagacctcggggctgaccctgcctgacagcatgtgtgaaatccctctttaagatgggcctcctccgaggagctgtgaggggtgagggtgaaatccctccttaagacgagcctcctctgaggggctgtgaggggtgagggtgaaatccctccttaagacgggcctccggccgggcgcggtggctcacgcctgtaatcctagcactttgggaggccgaggtgggcggatcacgaggtcaggagatcgagaccatcctgactaacacggtgaaaccacgtctctactaaaaatacaaaaaattagccgggcgtgttggcgggcacctgtagtcccagctacttgggaggctgaggcaggagaatggcatgaaccca

SEQ ID NO: 18495 - DNA, 379 bp, Homo sapiens
  misc_feature 25, 35, 41, 46, 47, 56, 75, 77, 82, 90, 97, 100, 102, 106,116, 122, 125, 187, 211, 311, 377: n = A,T,C or G
agtacttctagaattaattaagatntgggtggaangatatnttatnnataccgtgnagttgatttcagaatacanancattnccggggtntaaaggnggncncttnatactaatanatgggntanattattaaaaaaacataaaaatcctaaattatccacctaattacagagcttaaaatacatantacaaaattgatagaaccacaccnagaaacagatgaattcacaattatagttcgagtttttagcacccctttctcgataactaatataagacaaaatcagtaaaaatgaagaagacgtaagtanaaggctatcaaccaacttgtcccaattggcatttataaaacacacaacccaaaaagagcagaatanat

SEQ ID NO: 18496 - DNA, 396 bp, Homo sapiens
  misc_feature 140, 186, 187, 191, 192, 201, 207, 209, 244, 246, 247, 263,264, 266, 274, 277, 281, 291, 303, 306, 315, 316, 334, 341,362, 368, 371, 373, 380: n = A,T,C or G
agtacttctagaattaattaaggcgggtcagggcctggccttggtccccactctgcgatgatttctgtgaaattttgctgtagcgatgacattgttttcagaatttccaagagttctgtctgttctgtttttttattcanaatgaaatgaaatattttttttagttctgaaaaaaaaaaaaaaaannaaannaaaaaaaanaaaaananaaaaaaaaaaaaaaaaaaaaaaggaaaaaaaaaanannatgaaagctacagagnncncctgccancanagangagctcactntgctgcaagctncanagacctgcnnagacattggaatgacttngcctgcngagaggagccactctctccanggcctnctntntgttganagctgaatgcttgact

SEQ ID NO: 18497 - DNA, 416 bp, Homo sapiens
  misc_feature 30, 33, 38, 40, 43, 46, 49, 55, 56, 57, 58, 66, 107, 122,125, 126, 132, 139, 143, 144, 145, 147, 159, 162, 164, 167,168, 170, 173, 177, 179, 183, 194, 196, 197, 198, 200, 203,204, 210, 227, 230, 240, 255, 295, 304, 337, 347, 371: n = A,T,C or G
agtacttctagaattaattaaggcgggatnaanggttntnccnttncangaccannnncaaaggantgtgcaaacttgtggccccggattgcatccaatgctggcancattgcatgattctncannatattngtaaaanatannnanaaactaaccccnaananaannangtnctgntnaacnctactggcccncnnngnggnngacccnaaaatcccccaccaatnttntacctgcccncccataagggggtantatgtatagattgcatcgggtgtatcaattttagtaaatnaggctcacntgggagagaactgaaccagagtaaaacgttcancatctgtttnttttctattaaccaggatactganagcccaaactcacagaaatatatgcgtcaaatggcaacatataaa

SEQ ID NO: 18498 - DNA, 357 bp, Homo sapiens
agtacttctagaattaattaaggcggggtaagtagggaaatagaatatagtacttgaacaatataagaaaccaagtagatcttacagacatacacggggcattctactcaacaacagaatgcatcttcttcttaagtggacttaggaccttctttaggatagaccatacattaggccagaaattaagattcaagagatttttaaaaatacgataccaagtattttctttgacaaaatgggatgaagtgagaaatcagtaacagaaggaaaactggagactttatgtaaattaagtaacaccctcttcaagaaccagtggtcaaaggagaaatcacaagggcaatttgaaaaaaaaaa

SEQ ID NO: 18499 - DNA, 362 bp, Homo sapiens
  misc_feature 108, 109, 120, 124, 125, 149, 163, 169, 171, 173, 182, 188,209, 212, 225, 230, 246, 251, 273, 276, 288, 289, 290, 291,292, 293, 294, 295, 296, 297, 298, 300, 301, 302, 303, 304,309, 312, 313, 314, 315, 317, 318, 321, 322, 326, 329: n = A,T,C or G
  misc_feature 330, 331, 332, 333, 334, 336, 338, 339, 340, 342, 344, 346,347, 361: n = A,T,C or G
agtacttctagaattaattaaggcgggagcagtttaacgaattccgggatctgaacaaggacgggaagttagacaaacatgttccagttctccaatatttcctctttnntttatttatantcanngaccttgtctgattcatataccanatgcctggcctcancctgtncntnatctttttnttgaancatgatgatctgaaatatctnatntttgtctaacttnccgtncttgttcatataccgnaattngttcaatggctcatgcctttanttncaaactttgggnnnnnnnnnnngnnnnnatttnttnnnntnnagnnatantannnnnntngnnncntngnnaaatcccttttttnc

SEQ ID NO: 18500 - DNA, 380 bp, Homo sapiens
  misc_feature 29, 31, 35, 45, 52, 57, 61, 64, 66, 70, 71, 73, 75, 76, 96,108, 109, 112, 129, 160, 163, 168, 178, 188, 193, 201, 209,255, 298, 301, 312, 321, 323, 336, 370: n = A,T,C or G
agtacttctagaattaattaaggcgggangnacangaggctgttntgatcanatganattnagntnaacnncnannggctggtggagtggggcccnaaggaagacctnncangaagcctgaggccaggnaataaacaagagagatccagcctgggaatanccncgganggcggcaganaatttcacanagaanctgggatntcaaaganccatcccattacatggtgaccaggatctcaaggtgaaaggactgancctgccagtgatctggggctcaaataccacatgaccccacgcncantgacagtgatnaggctacananaccaatgtttctnaatcaaaggtctggcccctagccccatgataatncacaactaaa

SEQ ID NO: 18501 - DNA, 359 bp, Homo sapiens
  misc_feature 55, 106, 107, 122, 132, 134, 135, 136, 144, 146, 154, 155,157, 158, 161, 162, 164, 166, 168, 174, 175, 180, 181, 194,206, 209, 211, 326, 345: n = A,T,C or G
agtacttctagaattaattaaggcgggttgaaatgatgcaggctgctcctatgtnggaaatttgttcattaaaattctcccaataaagctttacagccttctgcannaaaaaaaaaaaaaanaaaaaaaacngnnncccccccncnggggggcnnannctnncncntntagggnncaaanntgccccccccccngggcgctgtttncanangtaacacaatggtaagtatttgtgtatctaaacatatctagggccaggcacagtggctcatgcctgtatcccagcacttcgggaggctgaggcaggtggatcactggaggtcaangagttcaagaccagcccanccaacatggggaaa

SEQ ID NO: 18502 - DNA, 420 bp, Homo sapiens
  misc_feature 38, 132, 158, 159, 160, 163, 164, 165, 169, 171, 172, 179,180, 183, 184, 185, 186, 189, 193, 197, 198, 201, 202, 203,207, 208, 211, 219, 221, 223, 224, 226, 227, 234, 236, 244,258, 273, 283, 285, 287, 308, 324, 330, 343, 356, 362: n = A,T,C or G
  misc_feature 366, 379, 393: n = A,T,C or G
agtacttctagaattaattaaggcgggggctgaggcanaagaatcgcttgaacccaggaggcggaggttgcggtgagctgaaatcacaccattgcactcaagcctgggtaacaagggcaaaaactccatctnaaaaaaaaaaaaaaaaaaaaaaaaannngcnnncccncnnggggggnnccnnnnttncccntttnnggnnngatnntancccccccntntnntnnatttttnanaaaaaaancataatccgattgnctggtaaagtctganagcaaccttntngngcctttgaggggctgagaaanaattgttcctgccatnatattnattgatgagctanatgccatcgctcncaaaanaganaaaactcatggtnaggtgggagctgcncattgtatcacagttgttgaccctcat

SEQ ID NO: 18503 - DNA, 349 bp, Homo sapiens
  misc_feature 35, 49, 54, 219: n = A,T,C or G
agtacttctagaattaattaaggcgggggggaggnctcactatgtaagnccaanctggtctcgaactcctggactcaagcaatcccttgcctcagtctcctaaagtgtggagactacaggcgtgagccactgtgtccagaccctctttcttcattactgtgcttccctccctaattctgtacatatctctcattctccccttctctctctagctcttgntttcttttctttttccctgggattctgctcttcattttgtacccctctcctctcctgctatttatccccttcttccctttattccttcccttaccacgctactcctacctatctccccttttatactaat

SEQ ID NO: 18504 - DNA, 433 bp, Homo sapiens
  misc_feature 313: n = A,T,C or G
agtacttctagaattaattaaggcgggataaaatttgcctcaaacaaaaactgctctggtactgcctaacaaagcttaaacataagacctgaaataatacaactgttttcaagtaaataaatctaggcgcaggctcacgtttgtaatcccagctctttgggaggctggtgcgggcagatcacctgaggccaaaagttcaagaccagcctggccaacatggtgaaaccccatctctactaaaaacacacacacacacacacacacaaaaattatctaggggtggtggtgcatgcctgtagtcccagctactcangagggtgaggcaggagaatcgcttgaatcccagaggcggaagctacagtgagccaagatcacgccactgcactccagcctaggcaacacagtgaggctccccccaaaaaaaaaaaaaaaa

SEQ ID NO: 18505 - DNA, 334 bp, Homo sapiens
  misc_feature 68, 140, 148, 152, 154, 155, 159, 160, 164, 168, 174, 176,188, 191, 193, 195, 196, 199, 203, 205, 208, 212, 216, 219,220, 235, 242, 243, 245, 246, 248, 249, 250, 251, 253, 257,263, 265, 270, 279, 283, 290, 300, 301, 304, 307, 314: n = A,T,C or G
  misc_feature 319, 324, 329: n = A,T,C or G
ctcgagagtacttctagaattaattaaggcgggggaatggcgtgaaccccattggcagagcttgcagngagccgagatcacgccactgcactctggtctgggcgacagagcgagactccatctcaggaaaaaaaaaaaanaaagaacntatntnntgtnngganttantacctnanggttttaatccnacntncnnggnaggntnagncagnaaanttnnttaaccccggggggngggggtnncnnannnntnaaancattgnantgccntctcggccngggngacggantgaaactccnnttnaantcttaanctacncctcncaaanccccc

SEQ ID NO: 18506 - DNA, 461 bp, Homo sapiens
  misc_feature 47, 241, 243, 245, 249, 252, 254, 270, 271, 280, 291, 292,294, 295, 302, 309, 310, 311, 316, 318, 319, 325, 326, 327,329, 334, 342, 348, 349, 350, 351, 395, 422, 425, 432, 433,434, 441: n = A,T,C or G
agtacttctagaattaattaaggcggggggccttttataagccttangaaaagaaaatgaaactatttcatctttggacttttcaatactattggagtgatttttttctttctaaacagggaaaataatgttacaaaagcatctttttttgttatttgtttgcatccctcccccacaccctggtgttttaaaatgaagaaaaaaaaccatcaccttttgtacaaaaactcttaatgatcanananaaanaananaaaaaaaaaagagggnnccccccccngggggggcccnnannccccccntataggnnncaatntnncccccnnngnggggnttttttanaagaannnntgaaatttcattaaggtaggtcagcgtcatttgtctctgtttangtaaaatataaaaaccctgcccagtancantggcatnnnttggttnctgatgcccatgttccaaaa

SEQ ID NO: 18507 - DNA, 206 bp, Homo sapiens
agtacttctagaattaattaaggcgggagaggttttcaaaaggcatttagcatgaagaatgttatgtatgaaattgacattcagaaacagtgactaaagatgcagttgtataatacatgccacgtacaacctctggcctaccactacgctcagtggtaatgatgactttgaggcattccataagttaaaaaaaaaaaaaaaaaaaa

SEQ ID NO: 18508 - DNA, 186 bp, Homo sapiens
  misc_feature 29, 35, 36, 37, 40, 47, 60, 66, 75, 84, 89, 95, 99, 108,111, 116, 118, 119, 128, 140, 143, 169, 173: n = A,T,C or G
agtacttctagaattaattaaggcgggangccacnnncgnactgacnacgttactatccngatcangtgagctgngtccagaanaccancgaganggantggaaggangantgaangnntcattctcnttaataaaggcnttntcctggattctgagcaagaagacttncttnaacccaagaggta

SEQ ID NO: 18509 - DNA, 333 bp, Homo sapiens
  misc_feature 29, 30, 31, 33, 34, 50, 57, 63, 65, 70, 77, 98, 101, 115,117, 159, 173, 175, 207, 210, 228, 236, 247, 319: n = A,T,C or G
agtacttctagaattaattaaggcggggnnntnntgtaacttacacattntgatatnaccagntncacanaatattntatcttatttttagaccaggnatnctgctaaaataatntnaaataaaaggaaatgcacatggttgtaaaaaatgccaaggancctaaaacacacanangcggtttcgcgagcgcgttggagcggcactcngancttctacagaagatggancccctacngaagggttctncaaaaaatgtggaatcctttgcatctatgctgagacattctcctcttacacagatgggacctgcaaaggatnaactggtcattgga

SEQ ID NO: 18510 - DNA, 424 bp, Homo sapiens
  misc_feature 163, 205, 251, 259, 261, 287, 300, 301, 305, 315, 342, 343,347, 363, 399: n = A,T,C or G
agtacttctagaattaattaaggcgggagcagaagctaaagccaaagcccaagagagtggcagtgccagcactggtgccagtaccagtaccaataacagtgccagtgccagtgccagcaccagtggtggcttcagtgctggtgccagcctgaccgccactctnacatttgggctcttcgctggccttggttggagctggtgccanccaccagtggcagctctggtgcctgtggtttctcctacaagtgagnattttatnantatatgttaatccttgccagatcttntcttcttcaaagnncagnggttggcatnactccagaaaacctacttcaacacagnncctnttaggcaaggccactnatcaaatccaattttgaaagtttgaacacttctggnatttaaaatcttatttttgcccatt

SEQ ID NO: 18511 - DNA, 392 bp, Homo sapiens
  misc_feature 168, 173, 176, 177, 183, 188, 191, 197, 198, 204, 206, 208,211, 213, 214, 220, 222, 224, 227, 233, 245, 248, 256, 263,266, 268, 270, 282, 286, 289, 293, 303, 307, 314, 317, 318,324, 332, 336, 340, 341, 343, 346, 348, 351, 356, 357: n = A,T,C or G
  misc_feature 362: n = A,T,C or G
agtacttctagaattaattaaggcgggcgcctgtaatcccagctactcagaaggctgaggcaggagaattgcttgaacccgggtggcagaggttgcagtgagatgagatggtgccactgcactccagtttgggcaacagactgagactctctctcaaaaaaaaaaaanaaaanaannaccaanaaaanatnccaaannccaaantntnaancnnttttantntnaancttttnggataaaaaatnttnatcctgtntaaaatntgntntntaaaacaaaaangggntcnttgnaaaaaagttnacgnccccaantannaaaatnttattttntagngctnnanaancnccncaaannggttnatcatatttcataatttcaattcccaaatt

SEQ ID NO: 18512 - DNA, 666 bp, Homo sapiens
  misc_feature 25, 32, 39, 57, 60, 69, 98, 106, 109, 144, 153, 159, 182,227, 234, 235, 241, 243, 249, 253, 255, 259, 262, 265, 268,269, 270, 272, 303, 305, 312, 313, 317, 319, 328, 331, 336,357, 364, 366, 379, 406, 430, 445, 454, 457, 464, 468: n = A,T,C or G
  misc_feature 472, 478, 479, 481, 487, 491, 498, 505, 509, 510, 517, 520,521, 522, 524, 530, 554, 561, 562, 563, 564, 566, 572, 579,584, 588, 595, 615, 621, 622, 623, 624, 625, 626, 627, 629,631, 632, 633, 634, 635, 636, 637, 638, 639, 640, 641: n = A,T,C or G
  misc_feature 642, 643, 644, 645, 646, 647, 648, 649, 650, 651, 655, 657: n = A,T,C or G
agtacttctagaattaattaaggcnggagaangaaatanagggtattcaattacganaanaggaagtcnaattgtccctgtttgcatgatgacatgantgtatatntanagaaccccagacctgcccttacatgtagtgtaacnccccctccntgtttnggctggagtaataatagccactntgtgtaggcgcggcgttcttttacgccgatgacgggtgggcagcntgcggcnngctccncncagccngatntncttnatntgnccnnngnggcccgtgttgtgttttgtgctgtgtccacncnctaaggnnaccncntcccccgtnctnacttntcctataagcgcttctcttanaatattnanacagctcccaatngaccctcttacttgtgtcttaccccanagtctatactcttatatttatatngctgtttttcttctnccaaaaaanttnttttaangtcntttntggaannantttaantaanacccttntgttttntttnngaaaatnggnnntnaaaaancccccccccttttcctttaaaaanttaaacnnnntncccccnaaaaagnttttngggntaaaaanaaaattttgggggggggggntttttnnnnnnnanannnnnnnnnnnnnnnnnnnnncccncnccccccccc

SEQ ID NO: 18513 - DNA, 328 bp, Homo sapiens
  misc_feature 148, 157, 178, 192, 222, 232, 236, 239, 258, 260, 279: n = A,T,C or G
gggtaccgggccccccctcgagagtacttctagaattaattaaggcgggtccccgggaggctttccggcagctgcgggagctgtcccgccagtggctgcggcctgacatccgcaccaaggagcagatcgtggagatgcttggtgcaanacaacttgntcccattcttgccaaaggggnttgggcccgggggntccccccccaacggatttccccttatttgnttaagggganaacntgngggcggtaagggccggccntntgtgcggactggggccatnatcggcccgggggcctgagcctgggaccccaccccgtgttaatgaaaaa

SEQ ID NO: 18514 - DNA, 304 bp, Homo sapiens
agtacttctagaattaattaaggcgggagaagaaggcggcagagttggccaaaggccagggacccggggaagtggaccccaaggtggccctgtagggggtgcacgactgggactactgcgagcaccgcgactatgtgatgcgcatgaaggagtttgagcgggagcggaggctgctccagcggaagaagcggcgggagaagaaggcggcagagttggccaaaggccagggacccggggaagtggaccccaaggtggccctgtagggggtgcaccccccaccctatggaccagtcaaataaaagcc

SEQ ID NO: 18515 - DNA, 409 bp, Homo sapiens
agtacttctagaattaattaaggcgggagggcatgtgcaggggaactcctcgttataaaaccatcagatctcatgagacttattgactatcgagaacagcaggggaaaaacccacccccatgattcaattttctcccgctgtgtcctcccatgacatgtgggaattatgggagctataattcaagatgagatttaggttgggacacagccaaaacttatcaggctccatctaatcagctgccactgtggctagaataaagcaggcaggagaaagtggaagagcagacttgctgagtcttccagtattcatttttctcctgtgctggatgcttcctcccctctaacatcagactccaagttcttcagcttttggactcttggacttacaccagtgatttaccatttcttg

SEQ ID NO: 18516 - DNA, 427 bp, Homo sapiens
agtacttctagaattaattaaggcgggccgtggtaagtcaaagaaaaagccctgtgttttataaaacttaaagcaaccactgaaatataacaacaaagagttatacctaataatccaatgaaggaaataaaatggaatcattagaaataatcaatacaaaagaaaatattaaaagaagaaaaagggaacaaaaacaaaagtacaaatagaaaatgaacagctagatgatagatttaaatccaacaatagcaataatcacattaaatataaatagtctaaacactccaattaaaaggcagagtttgtgcgattggataaaaacacaagaaccaacaatatagtgcttataagaaacacactttaggtaccatgtcgttaagcagatctctagagcttattcaccttgctggacttattgcctgttgat

SEQ ID NO: 18517 - DNA, 256 bp, Homo sapiens
  misc_feature 136, 152, 184: n = A,T,C or G
agtacttctagaattaattaaggcggggttgagccgggtagggaaagcagcctaaagcccgggacaggcacacaggcccaggtgtgtaggccacagcagccgcagtcctgaaaggctgcaacacccagacctccangagagaccaggcccangatgcctcgcctgttcttgttccacctgctanaattctgtttactactgaaccaattttccagagcagtcgcggccaaatggaaggacgatgttattaaattat

SEQ ID NO: 18518 - DNA, 423 bp, Homo sapiens
agtacttctagaattaattaagtgaaaatattggccggacacagttgcttatgcttataatcctagcacttcgggaggctggtctcgaactcctgacctcatgatccacctgtctcggcctctcaaagtgctgagattacaggcatgagccaccgcgcccagccctgtgccaagtatttttataaggattatctcatcgtatcttaaaaacagagcaatgagataggtagtattaattgtcccaagtttacaaatgaagaaactagagctttaaaagtttgttacttgaccaagatccgaaggctagtatattgagtagttaacatttgaacccaggcattctgactctagagcctgtactcataactatcatgcaacttctgttttgtttttttgtttttttgttttgagctagggtcttgc

SEQ ID NO: 18519 - DNA, 247 bp, Homo sapiens
agtacttctagaattaattaaggggcttcgctctattctccctaaccatactgtcttcctttcccccttgccacttagcagttatccccccagctatgccttctccctccctcccttgccctggcatatattgtgccttatttatgctgcaaatataacattaaactatcaagtgaaccactgttatgtctgatgcttcactcctctatccacagcccccgtcccaaaaaaaaaaaaaaaaaaaaaa

SEQ ID NO: 18520 - DNA, 389 bp, Homo sapiens
  misc_feature 168, 170, 172, 174, 175, 176, 177, 184, 186, 187, 188, 189,190, 196, 198, 201, 202, 204, 209, 217, 218, 221, 222, 223,229, 230, 234, 235, 242, 249, 256, 257, 265, 270, 271, 277,279, 280, 282, 284, 285, 286, 288, 290, 293, 301, 303: n = A,T,C or G
  misc_feature 308, 311, 313, 315, 318, 323, 329, 331, 335, 336, 338, 339,341, 342, 348, 357, 358, 361, 367: n = A,T,C or G
agtacttctagaattaattaaggcgggcaactgtaatcccagttactcgggaggctgaggcaggagaatcgcttgaacctgggaggtggaggttgcagtgagccaagatcgctgcactctagcctgggtgacagagtaagactccgtctcaaaaaaaaaaaaaaaaancncntnnnnaaaaatncnnnnnccaaantnccnncnaaaantttaaaannaannngggggnnaaanncattttngaaaatnggggaanngaaaaaangggannaaaaangnntncnnnangnaantttttttntnaattnaangnanggntaaanttgggnantaanntnncnnggaacnagggttttnnttncccccnaaccaaaaaaaaaaaaaaaccc

SEQ ID NO: 18521 - DNA, 441 bp, Homo sapiens
agtacttctagaattaattaaggcgggtggatcacttgagatcgggagtttgagacaagcctggtcaacatgctgaaaccccgactctactaaaaatacaaaaattagccgggcatagtggctcacacctgtaatcccagctgctccagaagctgagacagaagaatgtcttgaacccgggaggtggaggttgcagtgagctgagacagtgccactgcagtccagcttcggcaacagagtgagactccatctcaaaataaataaataaaagaaaaataaaattctaaaatgaatgcagtaagatctctctgtgtgtgtctccatgtgtgtatacacacacgtgtgcctagatatgtttaggagtgttttatacctatgtacatatattatgttgcgtattgtgtatacagccagaaattccttgaggaattctattcagat

SEQ ID NO: 18522 - DNA, 435 bp, Homo sapiens
  misc_feature 304: n = A,T,C or G
agtacttctagaattaattaaggcggggaagacataacagatggaagcaaaggaatcctgcctgccttcagcagagaattcaccgaatcctagaactgtggctccctccaggcagagcctaagatgctggtgaagaatagctgtgtgattgaataggctcaaaggagagttcagaattcccatttacatattactagtttggtttgtaagttttagttccttgtattattgagattcagagcttcattttatgttggtcattaggtgaatattactcattttccctcaagaaaaactcataaantgtggtgtgggtgtgagagcacgatggtgcctgtgttctgtgaatgtgtccatatgtgtctgtaagagagacagagaccaagaacttgcccaattttagaaatacactaatgtgcagttgttgccttttgt

SEQ ID NO: 18523 - DNA, 332 bp, Homo sapiens
  misc_feature 172, 176, 186, 190, 194, 196, 202, 203, 205, 212, 215, 219,220, 221, 222, 224, 226, 234, 235, 237, 238, 241, 242, 245,252, 257, 258, 263, 266, 271, 272, 275, 277, 282, 287, 290,291, 293, 294, 307, 317: n = A,T,C or G
agtacttctagaattaattaaggcgggcacctgtagtcccagctgctcaagaggctgaggcaggagaatggcatgaacctggggggcggagcttgcagtgagcagagatcacgccattgcactccagcctgggtaacagagctggactccatctcaaaaaaaaaaaaaaaanaaanaaaaaagggnttanttcntngggggnngnccccctnttncccnnnnangncttttttnnannggnnttnttttttnaaaannttttnttnccccnnaantnttttnccccnaanngnncccccaaaaaaantttaaaaggnccaaaaaaaaaaaaa

SEQ ID NO: 18524 - DNA, 436 bp, Homo sapiens
agtacttctagaattaattaaggcggggtcggatttcagcttttatccaccgggtttatcctgttgcaaagcagagtacacagttttagacacaaaataattgcagttgaaatggatacacattctggtggtaagatttggaaacgtggtatttgatggaaccctgttgtaacatctaaaactctttggattttttaaaaacgtattctgtgtaatccagtaaaaatttggattcgtccagtatttatagagtagattattaaccgcagtggtgctcattccagggccctgccgggtattttgtgctatggatgtgagtacggcaaagagactgaattaagctgttttgtatttggaatcggattgttcacgttgcaaccgttgctgcaatgataaatggatggatactctttacactttgaagtggatttaatct

SEQ ID NO: 18525 - DNA, 396 bp, Homo sapiens
  misc_feature 19, 30, 34, 39, 55, 64, 89, 126, 142, 161, 166, 170, 185,186, 189, 190, 191, 202, 204, 207, 211, 212, 217, 218, 219,227, 230, 231, 235, 239, 240, 241, 244, 245, 247, 251, 261,264, 266, 268, 270, 272, 275, 279, 281, 285, 329, 331: n = A,T,C or G
  misc_feature 332, 333, 334, 336, 337, 386: n = A,T,C or G
agtacttctagaattaatnaaggcgggggngctntaatntattaatgcaaacagnacctaacanacccacaggtactaaactaccaaanctgcattaaaaatttcggttggggcgacctaggatcngaacccaacctccgancactacatgctaagacttnaccantctnagcgaacctgacaannatnnnaaaataaagananaangccnnccctnnnctgggggnccnnaaanaacnnntannanctgntttaaacccnccncnancntnaangaananttanctgccccttcaaggagttaataaaatttgtttacttggtcccancnnnngnnagataaatcccttatgaatccctggtctaaaatactttcctacagctgngtaaaatact

SEQ ID NO: 18526 - DNA, 433 bp, Homo sapiens
  misc_feature 22, 28, 29, 30, 101, 119, 153, 156, 205, 209, 231, 252, 264,275, 278, 281, 294, 336: n = A,T,C or G
agtacttctagaattaattaangcgctnnntacctttttaacattaaaaatccgaagttgagtatgtccagtatttggaaccgaaccaaattggatttttngctatacagcttactgtncaagtgacctggaacagttgcttaaaacctcccncanccacagtttggcagcctgtaaaatgtgcatggtaatatctactttattnagtncatatgaaatttaaattggacnaacaagatagaagcacctggnagttagttaacnctcaacaatanttnatnttccctgcccacntttattaaataattaggcttttccagtttatcttcccatatntaccaaagatacgtccataattatgtaagaccaaagggctttttaccttttacagccctgagttcctgagataccccattaagtctgtgtacttatt

SEQ ID NO: 18527 - DNA, 265 bp, Homo sapiens
  misc_feature 41, 60, 69, 75, 76, 97, 155, 162, 184, 193, 241, 243: n = A,T,C or G
agtacttctagaattaattaaggcgggggaccggctatccnaggccaaccgaggctccgnggcgctgtncgtatnnttccgcctgggcgggattctnacttagaggcgttcagtcataatcccacagatggtagcttcgccccattggctcactnacccacnacattaacaacataaaaccctnattcacacnagaaaacaccctcatgttcatacacctatcccccattctcctcctatncnttaaccccgacatcattaccgg

SEQ ID NO: 18528 - DNA, 814 bp, Homo sapiens
  misc_feature 52, 156, 178, 217, 249, 251, 272, 287, 294, 298, 333, 345,368, 426, 474, 486, 488, 501, 512, 514, 528, 549, 559, 567,571, 572, 610, 617, 635, 637, 640, 643, 655, 671, 676, 679,722, 723, 731, 737, 739, 755, 756, 797, 803: n = A,T,C or G
agtacttctagaattaattaaggcgggcagatcacgaggtcaggagatcganaccatcccggctaaaatggtgaaaccccgtctctactaaaaatacaaaaaattagccgggcgtagtggcgggcgcctgtagtcccagctactctggaggctgangcaggagaatggcgtgaacccnggaggcggagcttgcagtgagcctagatcccgccactgnactccatcctgggcgacagtagcgagactccntntcaaaaaaaaaaataaaaatnaaaaataaaaattgnaaataanaatnaaactcacttcctaacttaaaaacctaaaacacangccaggcacggntggctcatgccttgtaatcccancactttgggaggccaaggcgggtggatcacgaaggtcaggagttcgagaccagcctgntcaacgcagtgaaaaccccattttttacttaaaaatacaaaaattttncttaagcacctntnggcaagtgccttnttaattcccancntacttttgggaagncttaaaggcaagggagaaatngccttaaacncaaggaangcannaaagattggcaagtgaagccccaaagaaattggggccncttgcancttttagccctggggtgncntgnagnaaaggaaaacgnttttttaaaaaaaaantaaanttnaaaattaaaacccctaaaaacaccaaaaaaccttttttacccnnccttaaancccaantntttttttgggaaaaanntgaagggctgaatgcccctcaagttatttaaatttcttttnttttcnaaagaaaaaaa

SEQ ID NO: 18529 - DNA, 616 bp, Homo sapiens
  misc_feature 29, 32, 35, 39, 43, 46, 51, 59, 71, 77, 92, 97, 116, 120,125, 126, 129, 133, 135, 140, 144, 146, 155, 161, 200, 201,208, 218, 221, 226, 227, 233, 236, 254, 262, 277, 308, 311,316, 318, 319, 321, 381, 395, 408, 419, 464, 465, 469: n = A,T,C or G
  misc_feature 475, 492, 513, 516, 528, 535, 556, 587, 599: n = A,T,C or G
agtacttctagaattaattaaggcggggngcntcncagnttcnacnccttnggcttatntatttggggctntgctanatcttgaagaatccncttanaattataaatctctatganaganggccnngancacngnctctncctngntatccccantctgtnactagcatgtggcttaccgatcacgtaggtcacgagatnntaaccancttaggattnctncagannaaaccncancacttctaaaaaagtacncatgaaanaacgcaagcatgatnggtgggctcctgcatgacccgacgttgagangangcctncnncntggaaatggcatgtgcccttagaaagtaagagcttgcaagaagaggcctacatgtgcccnctaattctctaccnctgggaagaggcnatgcttactcnttctcgtgaaggtgacttaaaacagcttaaaagtttaagtttccnncccngggggngattaaaataattcganggcgatcttttaaaaagagantanacccgggagggngattaanagacccttgaaatccatgacncagggagaatttgcgtcatttaaaagcctantttacgcatttnctaaacccgaccaaaaa

SEQ ID NO: 18530 - DNA, 451 bp, Homo sapiens
  misc_feature 69, 88, 91, 96: n = A,T,C or G
cccccctcgagagtacttctagaattaattaaggcagggtttctatgttacaatcttgaaaattccttnttccttaggaaaactctgnctnttttntaaaagctttcaattgattgaatgaggctcacccatattatggtgggtaatttgctttactcaaagtctacttatctaaatgttaatctcaactcaagcccactgatttaaatggttaatctcatctaaaaatatcttcacggcaacgtctggacttctgtttgaccaaacaactaggcaccactacctggccaagtggacacaaattaaccatcataaggataagaaaatagtacctacacttcattggttagttgggtggcttgagttaacgcccatagatgcttagcataatgccaggcaatgaaaaaatgatcaaagcatgttagttattatcggggtgacaaccattttg

SEQ ID NO: 18531 - DNA, 432 bp, Homo sapiens
agtacttctagaattaattaaggcgggggttgcggtgagttgagatcgcgccactgcactctagcctgacaacagagcaagacttcgtctcaaaaaaacaaacaaaaaaaagaaattacattagttgaggacctgctgtatgtgatatgaacaatgaggatcaactctttttgtaatagtttttttacatatgttatttcatttgtttatttcctctgtgagggtaagtattgatagtccagtcatagactggtaacacaggcacaccattaaaaataatagacatacagtatgcagtattttgttttacttatgaaactccgtattttatgtatgatgtattgagtatgaagaatagtacatactgtttccttttaactttatgtttcttgcctttgtatattttatatgaatagcacttgtcactaacat

SEQ ID NO: 18532 - DNA, 514 bp, Homo sapiens
  misc_feature 303, 305, 307, 312, 318, 323, 324, 325, 326, 327, 328, 329,330, 331, 332, 333, 334, 335, 336, 337, 338, 339, 340, 341,342, 343, 344, 345, 346, 347, 348, 349, 350, 351, 352, 353,354, 355, 356, 357, 358, 359, 360, 361, 362, 363, 364: n = A,T,C or G
  misc_feature 365, 366, 367, 368, 369, 370, 371, 372, 373, 374, 375, 376,428, 431, 459, 462, 466, 475, 495, 501, 503: n = A,T,C or G
agtacttctagaattaattaaggcgggggaggcctcacattcatggtggaaggtgaaagacatgtcttacatgctggcagacgagataaatgagagccaagtgaaagtggtttccccttataagccatcagatctcatgagacttattcactgccacaagaacagtatgggggaaaccaccgccatgattctattatctcccaccagtccccaccacaacacgtgggaattataggagctacaattcaagatgagatttgggtggggacacagccaaaccatatcaaagactaaaaaaataanantnaatanattttntaaannnnnnnnnnnnnnnnnnnnnnnnnnnnnnnnnnnnnnnnnnnnnnnnnnnnnngcgcgctcactggccggtcgtttttacaacgtctgtggactgggaaaaaccntgncgttacccaacttaattcgcccttgcancanattnccccttttngcccagctggcgttaataancgaaananggccccgcacc

SEQ ID NO: 18533 - DNA, 446 bp, Homo sapiens
  misc_feature 40, 100, 223, 288, 300, 305, 309, 310, 315, 325, 331, 339,343, 344, 347, 348, 349, 352, 363, 364, 368, 369, 370, 374,375, 376, 380, 386, 387, 388, 391, 393, 394, 405, 409, 419,425, 426, 435, 436: n = A,T,C or G
agtacttctagaattaattaaggcgggtggatcacttganatcaggagttcaagatcagtctggacaacatggcaaaaccctgtctctacaaaaaattanctgggtgtggtggcacgcacctgtaatcccagctgctctggaggctgaggcatgcgacgcttgaacccaggaggcggaggttgcagtgatccaagatcgcaccactgcactccagcctggaanaccaaacgagactctgtatcaaaaaataataataattaataaagttttactggaaaaaaatgctnaaaaaaaaatanatagngggnnccccncccggggggnaccccnattccccnttanngtnnngcnttttccccccnnctannnggtnnntttnaaaaannnttncnncccaatatttntaangtccaagganaatgtnnagaacttcnngagttttggg

SEQ ID NO: 18534 - DNA, 404 bp, Homo sapiens
agtacttctagaattaattaaggcggggaactgcaagggttgtttcttttcttcttttctttttcctcttctcttctcttttctcttattttctttttttgaggaggagtttcactcttgtcgcccagactagagcgcaatggtacgatcttggctcactgcaacttccacctcccgagttcaagcaattctcctgacagaagtccactcaagccagccattgtagctagcatcggggctccagccgtcagctgggattacaggcgtgagccaccacgcctggccgaaaaacccactctcataacagaagtgcagactcattgctagattcagtgcccttgagtgtgccagaggtcctctgtgtttgagacaatcctgtgtgtgccaggaggctccgtgtgcac

SEQ ID NO: 18535 - DNA, 414 bp, Homo sapiens
  misc_feature 324, 384: n = A,T,C or G
agtacttctagaattaattaaggcggggggccatgagccaagaaatgtgagcagcctagaagctggaaaaggcaaggaaactgattctttcctagagcctcaagaaagaaacagagccctgctgacgtctggattttagcccagtgaaacccacatcagacttctgacatcaagaactataatataataaatttttattgttttaagacactaagtttgtggtaatttgttagagaagtaataggaaactatattaatcagggttctccagagaggccgagaaatccaaagatctgcaagtcggcaagttaaagaaagacccangagagccaatgatgtaagttaagtctgagtccaacggccagagaaccaggagaactgatnatataagttccagttcaaaagctggcaggc

SEQ ID NO: 18536 - DNA, 419 bp, Homo sapiens
agtacttctagaattaattaaggcgggtcagcatgaaagtggggacctcagttctactattccagcatactgaaacattccaacaacttgaacaaacttagaagaggcctccacatttttcatgagaacccaatccagacagactcttgattttagccttcagagacccaaaggaaagaacccaattgagccctgcctggacttctgacatacagaactgtgagatcataaaaagatattgttttaagctggtgggtaaatttgtgataatttgtgactcagcagtagaaaataatgcatagtattcctattgcaatgatgtgggttttttcaatgtaatggatgatccaaatatcaattttaacatattacttaaaaacatttttaatatattgctatttattaatatagtactagtc

SEQ ID NO: 18537 - DNA, 328 bp, Homo sapiens
  misc_feature 197, 215, 219, 264, 265, 266, 267, 268, 269, 270, 271, 286,292, 293, 294, 300, 301, 307, 310, 312, 317, 318: n = A,T,C or G
agtacttctagaattaattaaggcgggcaggatagttcagacggtttctatttcctgagcgtctgagatgttagtattagttggttgcagttgtgtagtagttaaggactatggcaaggagtctcaggccaaggatgtcattgaagagtatttcaaatgcaagaaatgaagaaataaatctttggctcaccaaaganaaaaaaaaaaaaaattcnaaangaacaaaaaaaaaaaaaaaaaaaaaaaaaaaaaaaaaaaaaaaannnnnnnnccccccccccccccngggggnnncccccnncccccncananggggnncccccccccc

SEQ ID NO: 18538 - DNA, 263 bp, Homo sapiens
  misc_feature 28, 69: n = A,T,C or G
agtacttctagaattaattaagggagcnaatttacttaagcaattagagatctgtgggtacatattgtngttgtcatctctagtggtttgatttgtgtctttttaaaatatctttcacgtccacctaactttttggacacaatactgtattcatgtccttgtctgccaattctaacatttgtgtcatttcagtttagttcagttgactggtttttcttctcattataaatccttctcctgcttctttgcgtgtctggtaattt

SEQ ID NO: 18539 - DNA, 409 bp, Homo sapiens
  misc_feature 133, 140, 141, 142, 143, 145, 150, 152, 153, 154, 158, 159,160, 163, 170, 176, 178, 179, 181, 187, 192, 197, 201, 202,204, 206, 214, 228, 230, 231, 234, 236, 239, 247, 248, 250,253, 256, 258, 259, 261, 264, 265, 266, 267, 270, 274: n = A,T,C or G
  misc_feature 275, 276, 277, 281, 289, 292, 299, 309, 310, 313, 314, 323,325, 332, 341, 342, 344, 345, 350, 352, 353, 358, 362, 363,370, 371, 378, 383, 387, 390, 395, 397: n = A,T,C or G
agtacttctagaattaattaaggcgggagaatcgcttgaatctgggaggcggagattgcagtgagccgagatcccgccactgcactccagcccaggtgacagagcgagactccatctcaaaaaaaaaaaaacncaaaaannnngnccccnannncccnnnggnaaaaacnttttcntnnancaaagnccccnttttntttnntnangggggggnccccaaaaaatttnannaancnttnctttcaanntnctnggncnnanggnnnnacncttnnnntccnaaactttnggnaaggttnaggtaggagnnttnnttaaccccngnatttaanttttgcagnncnntttantnnccccnttannttttccnngaccaanaaacnaaanccnttttncnaaattcccaaaa

SEQ ID NO: 18540 - DNA, 196 bp, Homo sapiens
  misc_feature 15, 155: n = A,T,C or G
gggctgcaggagganagtctttcaaatgatttccttcctttggctaccttgcgatgaactgttctgtcttgcgcaattttaaaacaaaataaggttttaatggaaaatgtaaaactgtagattgtataatataaagataaatcttgtttcctcanaaaaaaaaaaaaaaaaaaaaaaaaaaaaaaaaaaaaaaaaa

SEQ ID NO: 18541 - DNA, 373 bp, Homo sapiens
  misc_feature 28, 33, 37, 46, 49, 51, 57, 60, 62, 64, 66, 72, 73, 77, 79,81, 88, 89, 110, 119, 129, 130, 131, 134, 136, 141, 144,158, 166, 168, 177, 181, 183, 198, 206, 209, 215, 216, 253,254, 255, 256, 262, 283, 285, 286, 287, 289, 290, 291: n = A,T,C or G
  misc_feature 294, 295, 297, 304, 310, 314, 315, 319, 321, 332, 336, 340,344, 346, 350, 351, 355, 359: n = A,T,C or G
agtacttctagaattaattaaggcgggnggatnacanggtcaaganttnanaaccanccngncnancatggnnaaancncntctctannaaacatacaaaaattagatgngcatggtancgcatgcctnnnatncnagctnctnaaggggctgaggcnagagaatncnttgaacctnggangngaatgttgcaatganccgaaatngcnccattnnacttcaacctggcgacagatcgagactccatctcttnnnncatgtngataaacctgggtgtgtcctncnnnannnccnngnggggttntaagcncccnntaantnacctgtgtgcncccnctanaggncncatnntgancttncctctgggagcctt

SEQ ID NO: 18542 - DNA, 450 bp, Homo sapiens
agtacttctagaattaattaaggcggggtcttagctttggctctccttgcaaagttatttctagttaattcattatgcagaaggtataggggttagtccttgctatattatgcttggttataatttttcatctttcccttgcggtactatatctattgcaccactgttggaatttggtacaaaatatgttttgtctattgaaaacatacacggtaaatggtgttgttaggtaggttctgtccagttcttagggacttttttcacattatagcatttttaccctaaacatgatgttgagattattatatactgtattttcttctaaattaaccctaatgtttaaaaactcactttccccctttaattgaaggcattgttttgttagatgcagtaatgatgtttaccagagattattgtttcctatgcaaaataaattttcatattttgaat

SEQ ID NO: 18543 - DNA, 278 bp, Homo sapiens
  misc_feature 235, 264, 265, 266, 267: n = A,T,C or G
agtacttctagaattaattaaggcggggatagtatgtagagacaaagtgtggaacattttaaggcaggaatagtcaatattgaattccacagagactatggaatctaattttgatttgaggcattggttggtgagtgcacagtttctaaatatacaataatatggtttctctgaattgagcatgatagcaactagattaagatgagtaagatttgaatagagaaagtaaactcanaaaaaaaaaaaaaaaaaaaaaaaaaaggnnnncccccccccgg

SEQ ID NO: 18544 - DNA, 359 bp, Homo sapiens
  misc_feature 272, 275, 289, 298, 304, 305, 313, 318, 319, 321, 324, 328,338, 341, 342, 343, 344, 345, 347, 349, 350: n = A,T,C or G
agtacttctagaattaattaaggcggggggcggtctccgaagtggagtatgatccctaactcctgatttggatgcatctgagggacaaggggggcggtctccgaagtggaataaaataggccgggcgtggtgacttgcacctataatcccagcactttgggaggcagaggtgggaggattgcttggtcccaggagttcaagaccagcctgtggaacataacaagaccccgtctctactatttaaaaaaaagtgtaataaaatgataatatanttnaaaaaaaaaaaaanaaaaaaaanaaaaanntaaaaaanaaaannanaanaaanaaaaaaatanaannnnnancnnccccccccc

SEQ ID NO: 18545 - DNA, 419 bp, Homo sapiens
  misc_feature 10, 33, 35, 41, 42: n = A,T,C or G
agtacttctngaattaattaaggcgggaccttntngtattnngcaatttacatgtgtttggtttgttttaaattctgtgaaagtggcttgattaaaagactccttttaaatggaagccaccagtcagcagaatggaagcttagaggaacttgcctgtgagcgctggtctttgtgtttggttttgtgatgtaacgatctttgctggggtttttttgctttgttttgagggaaatgtcttggagtaaattttaagttcctggagttaatttgttttacaggaattttgttttttaaaaaaataggatcattctgaactttggaatgacccccttatatattttctgaaaatgaaaacagttacatgaaaaaaatttccaatgaagatgtcagcattttatgaaaaaccagaagttattaga

SEQ ID NO: 18546 - DNA, 409 bp, Homo sapiens
  misc_feature 29, 34, 49, 73, 76, 89, 90, 91, 115, 121, 128, 132, 139,141, 145, 148, 151, 152, 181, 189, 202, 205, 237, 287, 297: n = A,T,C or G
agtacttctagaattaattaaggcggggngtatntgaaaactttctgtncttcctgctcaattttgctgtgantcngaaactactctannnaataaggtctattttcttaaaggncatttngcctccntagngggaaananaatngcnctnnactaatatctgctcttatcctgcctaaanaaaattanaaagccatcttgnaangatgaaaattgtttttaagtaactttattgtntaccaaaacaaagctcaaagaattttaacacaaaatgcaaaaaaatccancacccaatangttacaatgctcaatgtctaaccccaaataaaataatgttaggaatgcagagaaacagaaaactgtaatccatgataagaagggggaaaaaaaatcaatctacttaaactga

SEQ ID NO: 18547 - DNA, 438 bp, Homo sapiens
agtacttctagaattaattaaggcgggggactgttgggaaggcatgattggttttaaaatgtgaggacatgagatttgggaggtgcaaggggaggaatgatatggtttggctgtgtttccacccaaatctcatcttgaattgtagcctcccacaattccctcatattgtgggagggacctggtggaatataattgaatcatagggtggttttctccatactgttctcatggtagtgaataagtttcataagatctgatggttttataaggggcttcccttttcatttggctctcattatctcttccctgcctccatgtaagacatgacttttttcttctgccatgattgtggggcctccccagcacgtggaactgtgagtccattaaacctccttgtctttataaattacccaatctcagttatggtttgatcagcac

SEQ ID NO: 18548 - DNA, 407 bp, Homo sapiens
  misc_feature 265, 276, 284, 294, 363: n = A,T,C or G
agtacttctagaattaattaaggcgggcagatcacgaggtcaggagatcaagaccatcttggccaacatggtacaaccctgtctctactaaaaaaatacaaaaaactagccgggtgtggtggcgggcgcctgtagtcccagttactcgggaggctgaggcaggagaatggcgtgaagccgggaggcagaggttgcagtgagcccagattgtgtcactacactccagcctgggcgacagagtgagactctgtctcaaaaaaaaaanaaagaaagttntaaagcantgtccaaatntaccaaaatatcattgagttttttaacttgcttacactgaatcttaacatatctgagtgattcctaaanagaagtcaaattaacctcacatttataaaatgaaattgcagttg

SEQ ID NO: 18549 - DNA, 485 bp, Homo sapiens
  misc_feature 28, 38, 47, 57, 58, 63, 72, 75, 76, 81, 85, 87, 91, 92, 93,110, 112, 121, 132, 135, 139, 145, 154, 218, 222, 248, 291,315, 359, 435: n = A,T,C or G
acactggccgtcgttttacacaccgganacagctatgnccttgatgnctggccgtcnntttcnacacaggantcnnatatnaccntnatgnnntgaccagtaaggctctncncagaacttnacaccatccangantccngcccgngatcacctngctctttataggaaaccacctttcctctggggaagaacagtctgaattaataaaacatcacagnggtngagtagtaaaaataaacacagatgtnttgctttcaagtcttagagtgacataaagtagtcttaaataantcgttcttagtttattttaagcanttgattgtactaacgagatgtaattatctgaagtatttatgatnagcatattggtttttataagtatttctgagttattgagggtgcttaaaaatgctgaagaaactttaaaacatgatncttcttataattttatgtgattcttatagcacaatcatttttgaaaaagg

SEQ ID NO: 18550 - DNA, 376 bp, Homo sapiens
  misc_feature 28, 30, 31, 32, 38, 39, 40, 43, 45, 47, 48, 55, 70, 92, 123,125, 133, 138, 139, 147, 165, 166, 171, 172, 174, 178, 219,243, 264, 287: n = A,T,C or G
agtacttctagaattaattaaggcgggngnnngaagannnatntnannatgaggntgtacctacgatagnggtaatgaactctcttatgctngaacctgctctgatcaaacatgtggctcctngntgacatgncaatnncactgatntatatttcatctgagctnncactnntnaatntccgtcgtgcagtattctgcaaaacaggattacagtagatntacagtactgtctagttacttgtnatgataccctcctttcatcanttatgtaaatatggcagtacacngttacataatttttgtaaatacattgttataaagtctgactaaaaaatgttaagaaaaccaaaaaataaaacatttttctatcttttgt

SEQ ID NO: 18551 - DNA, 415 bp, Homo sapiens
  misc_feature 400, 401: n = A,T,C or G
agtacttctagaattaattaaggcgggggaaggatctgagctacagatataaatgtaacattgttaacttcttgattttgataattattctgtggttatatacaagcatgagcttccccgactcccaccccaaattaagacatgcttactgaaatatttaaggggtagggtgtgatgtctgtaacttagtctcaaacagttcagggaaagtaatcatatagacagatcaatagagaataataaagcgagtgtgatgaatttaacatttaaagaacctgggtgaaagatatatgagaattctttgtactatgctttcagcagcttttctgtaaatcagaaattatttcataacagaatgtcttttaaaagtgaaggaaaatacagacatttccaggcaaannaaaaaaaaaaaaaa

SEQ ID NO: 18552 - DNA, 416 bp, Homo sapiens
agtacttctagaattaattaaggcggggggtccgcagcttcattctttaagtcagcgagaccaagaacccactggaaggaaccaattccggacacatgtagcctatggaacaccaagtagatttaacccaaagaagactacttaaaggcatttaataatgaagctccaaaggtcaagaaatggaaaaattccttgaaacaaatgataatggaaacacaacatacccaaaacctgtgggatatagcgaaagcagtactaggagggaagttcatagctattagtgcctacatagaaaagaataaaaacttcagataaataacaatgcatcttaactaaaaaagcaagagcaaaccaaacccaaaattagtagaagaaaaagtaaagatatgagcagaaatcatgaatttgagatgaga

SEQ ID NO: 18553 - DNA, 395 bp, Homo sapiens
agtacttctagaattaattaaggcgggttcctgacaatgcagaagtattctgatattcaaaactgtctccacagccagtatatttttttctccttgtttggatttctgacattgcataaatgtcagtttaatgtataaaatcctatgccgcaggtcttccaataatgctgtttcattcaacagcatttcattataacattgatgagaagaatacggattcccggccgggaccactgtgtgtgtggagtttgcaagttttcctcatgtcctcgtgggtcttctccaggcactccagtttcccacaccccaaaaagctgtgcatatcaggtgaactgctgtgtttatgtggtcccagggcgatagagtgtggttttgtgtgtgtgtgtgtgtgtgtg

SEQ ID NO: 18554 - DNA, 447 bp, Homo sapiens
  misc_feature 28, 29, 30, 32, 33, 39, 55, 56, 65, 66, 67, 69, 71, 73, 78,82, 84, 107, 118, 119, 120, 123, 125, 130, 133, 142, 144,147, 148, 149, 150, 151, 152, 153, 154, 155, 158, 162, 168,170, 171, 172, 173, 174, 177, 179, 180, 181, 184, 189: n = A,T,C or G
  misc_feature 190, 191, 193, 194, 195, 197, 198, 204, 205, 207, 209, 213,215, 217, 218, 224, 225, 228, 231, 233, 234, 237, 241, 247,248, 250, 253, 256, 285, 313, 355, 356, 359, 394, 395, 438: n = A,T,C or G
agtacttctagaattaattaaggcgggnnncnngtgctnacactaaaacctgccnnggaggcccnnntntnanagccncttntngccgtacccggggatgatacgangtgaaactctnnntgngngaaancgntacagctantntannnnnnnnnatngccngcgagncnnnnngangnnnttngtatnnnannntnntgcaanngntntatnananngatggnngcnttncnnccntttnataganngnggnacnaaaaggttggcttacttaccgatggtccntcaggaggaacctggtctaaatgggatntgaacccggaccagtgtggaatcaactgttgatactatgctnnctntcagccagcaccgtgacaccattcgagaataatgnntttcccaacatttattgaaggcatattatgccccggctatganttaagcctt

SEQ ID NO: 18555 - DNA, 259 bp, Homo sapiens
  misc_feature 59, 81, 223, 243, 249: n = A,T,C or G
agtacttctagaattaattaaggcgggtgcctgtagtcccagctactcgggaggctgangcaggagaatggcgtgaacccngcaggtggagcttgcagtgagccgagatcgtgccactgcactccagcctgagcagcactccaaaaaaacaaaaagaattttcttaaagatgagtgtcactttttcatggctccccaccatcaccctccttaacctctacttntacctacgcctaatctactncacctnaatcacacta

SEQ ID NO: 18556 - DNA, 285 bp, Homo sapiens
  misc_feature 207, 208, 209, 210, 211, 221, 229, 230, 232, 241, 242, 243,244, 245, 246, 248, 249, 254, 257, 258, 271, 272: n = A,T,C or G
cgggccccccctcgagagtacttctagaattaattaaggcgggtgcaagccttcgctgtgccgagccttgtgtttctgacgcaagccaaatgaagaaaagcaaagctttaaaaaaaaaaaaaaaaaaaaaaaaaaaaaaaaaaaaaaaaaaaaaaaaaaaaaaaaaaaaaaaaaaaaaaaaaaaaaaaaaaaaaaaaaaaaaaaaannnnncccccccccngggggggnncnccccccccnnnnnnannggggntannccccccccccccnngggggttttttta

SEQ ID NO: 18557 - DNA, 513 bp, Homo sapiens
  misc_feature 470, 480: n = A,T,C or G
agtacttctagaattaattaaggcgggagacaagggaattacattttaaagagctaaaaacattaacatacaactctatatacaacaaaaatagctttccaaaaaaagatgagataaaaactttcagagagaaaatctgagaaaagtgtttgccatccagcttttatgaaatactaaagaaaattcatcagatggaagaaagtgataccatgtgaaaccttggctctatacaaatccatgaagagtgacagaaatagtaaaattagatacttttttattttaaacattattttaaaggtaattatttaaagcaaaaaataccattctattttggtttttctaacatttgtgtatgtaaaagacatagaaaaatagcataaaggcaggaagaggagaaatggaaatatacagctttaaggtcattgtgtgtgaaataggataattatacaaataaaccaggagagaagatnaaaagaagtntcaacaaataatatcaaataatatagaaaagga

SEQ ID NO: 18558 - DNA, 146 bp, Homo sapiens
  misc_feature 35, 41, 53, 66, 70, 84, 89, 97, 122: n = A,T,C or G
agtacttctagaattaattaaggcgggggtgggcncacaangcaatggtaaangggcctggggttntttntagggtgatggaanttctnaaattgantctgaggatagctgcctatattccntaaatatgtggaatatgctgaaaa

SEQ ID NO: 18559 - DNA, 329 bp, Homo sapiens
  misc_feature 138, 161, 209, 211, 254, 261, 323: n = A,T,C or G
agtacttctagaattaattaaggcggggctggtgccgtgtggcctggacactaattctcctctcatatgtttgctcaaaggtaaaatgaggccgggtatggtggctcacgcctgcaatcccaccaccttgggaggccnaggggtttcttggaactcatcancggaaccagccatctggcctcccacaggatgctgctggcacagtctanantcagaccaaggcacatgagccaaggtgcccaaggaggactganaagggcngtgagagggaaggattcattcattcatttgcatttattaattcagcaaacaaaaaattgaangcaata

SEQ ID NO: 18560 - DNA, 437 bp, Homo sapiens
agtacttctagaattaattaaggcgggaggcgcaggttgcagtgagccaagatcgtggcactgcactgcagcctggcgacaaagtgagactccatctcaaaaacataaaaaaaattaaaaaaagatcagtttgctacaaagagtagcatctgccagttaccaagcacctgctgtgcccaggtgagtaggacatgcttcctgcctgcaaatgtccccaggcttgttcccaaacaagcggctaggaaaacaagaggctgattttacatctggcaacctccatctgagtgaaacaaaattttaatgaaagcctgtggtaataaggtcctgagaccgcattcttggtagtagatctccagtcctaacatggacacagtttaacttgccgggggaacatatgtatcccctagcagcagaaaagatggaatccctaagatcct

SEQ ID NO: 18561 - DNA, 529 bp, Homo sapiens
  misc_feature 490, 491, 492, 493, 495, 501, 502, 503, 504, 505, 506, 507,508, 509, 510, 511, 512, 513, 517, 519, 520, 521: n = A,T,C or G
agtacttctagaattaattaaatttttatttttatttaaaagaaataggaggtctcagtgtgttgcttagactggtctcgaacttctgggctcaagtgatcctcccaccttggccttccaaagtgctgagattgcagatgtgagccaccatgcctggcctgagccactgtgcctggtcccctttttattgttgaataatattccattgtgtctatatcacatttttttatcaatttatccatcgatggacaattaggttgtttcacccagcctggatgacagagtgagactctctaagaaaaaaaaattgaaaaatcgaaaaacagaaaaatgaaatggaaagtaatcagtattgttaaggatgtggataaattggagccctcatatattgctagtgtagccactgtgaaaaatttcactagttctttgaaaggttaaacatataattaaccgtatgacccagtaattctgcccctaactatgtaccccnnnnanaaaaannnnnnnnnnnnnaaangnnncccccccc

SEQ ID NO: 18562 - DNA, 178 bp, Homo sapiens
agtacttctagaattaattaaggcgggtaggcctaggattgtgggggcagccgatgcctggtccaggctgtgagggacacgtatggagcagataaagaattcactcaagcaaaaaaaaaaaaaaaaaaaaaaaaaaaaaaaaaaaaaaaaaaaaaaaaaaaaaaaaaaaaaaaaaaaa

SEQ ID NO: 18563 - DNA, 733 bp, Homo sapiens
  misc_feature 30, 31, 35, 39, 41, 42, 46, 49, 54, 56, 57, 58, 61, 62, 63,65, 68, 69, 74, 76, 78, 79, 80, 81, 83, 85, 86, 94, 95,96, 97, 99, 103, 106, 108, 111, 114, 115, 122, 123, 124,126, 127, 135, 142, 146, 147, 152, 153, 154, 156, 167, 179: n = A,T,C or G
  misc_feature 180, 182, 183, 186, 191, 200, 203, 209, 368, 438, 536, 539,579, 605, 616, 711: n = A,T,C or G
agtacttctagaattaattaaggcgggggnngaangaangnnctcnaanctaancnnnctnnncncannatggncnannnntntnnatactatnnnnangaanttnangcnggnngcaatgnnngnnacctgaantgccagnactnngaggnnntnagactctacgntcactcgctgtnngnnctncaggnccaaggttnttnacaccnagaaaaacaaagtgttactgtaccccaaccgagcagcatgtcaacttgaaggatggaaactgcagagactgcatcaaagattgcacttcagcactggccttggttcccttcagcattaagcccctgctgcggcgagcatctgcttatgaggctctgganaagtaccctatggcctatgttgactataagactgtgctgcaaattgatgataatgtgacgtcagccgtanaaggcatcaacagaatgaccagagctctcatggactccttgggccttgaatggcgcctgaagctgcccttaatccccttggtgcctgtttcaactcanaanaaggtggaatttcttgcctttcggaaaaaccacaaaaaanatggcttaaaaagcaaaattccaaangaaaccaccancttccaaaagaacaaaaaatgccttttttgctgggggattttggaaaaaaagcccaaaaatttttgaaagggaaaaaaggccaattgaacctttntaaaaaaaaaaaaaaaaaaaaa

SEQ ID NO: 18564 - DNA, 330 bp, Homo sapiens
  misc_feature 113, 124, 159, 270, 272, 273, 274, 289, 290, 291, 292, 294,296, 297, 299, 301, 303, 306, 307, 308, 309, 310, 312, 316: n = A,T,C or G
agtacttctagaattaattaaggcggggggatcatgatcatttgttcagaaaaaaagcccctgaactgattttgttaccatagaatttaaaaaaaaaaaaggctttaacagtnggctgtaattnggcttttattatcctttattaaaatacaaatgtcnaaaaaaaaaaaaaaaaaaaaaaaaaaaaaaaaaaaaaaaaaaaaaaaaaaaaaaaaaaaaaaaaaaaaaaaaaaaaaaaaaaaaaaaaaaaaaaaaaaaaaaaaaaaaaanannngcccccccccccccnnnncncnncntnanttnnnnntnaatnaatacccccccccc

SEQ ID NO: 18565 - DNA, 304 bp, Homo sapiens
agtacttctagaattaattaaggcgggtaggcctaggattgtgggggcaatgaatgaagcgaacagattttcgttcattttggttctcagggtgtgaaattggaagtatcaagggctttctttggtgattgagggaaataatgtctctacttgtaatttattgtgaccctttttcactgtatatgctttgtatgtctaatatttatttcaatgcaaattcaattgttccttcatctgtattgttatatctaagattttattgatgttaaaatctaattgtggaataaaaatctctctggaattt

SEQ ID NO: 18566 - DNA, 202 bp, Homo sapiens
agtacttctagaattaattaaggcggggggaggaaaatttttactttccatcttaatgtaaccttatgctattctgtatttttactgtatattgcttttacaataaatataaaatgaaatgtttatgttgacatttcagtgtgaaaaaaaaaaaaaaaaaaaaaaaaaaaaaaaaaaaaaaaaaaaaaaaaaaaaaaaaaaa

SEQ ID NO: 18567 - DNA, 444 bp, Homo sapiens
agtacttctagaattaattaacagatagatatgatgtgacaattcagtttaagtgcaactttcagtttctatcttaactataacttgagagattaatttagaattacaaatgtgtgtatatatatatatgagcatatgtatacataacatatttacacacaaggcacacatactatgagcaccctgcagtttgtaggcatttttacatgcgaatgttattggaacagataggcatcacgggaagaaattttgcctctacctgctctcaccatgtcagttgacaggactcaggacatgggagaagagtgagcttcctttctgaagttgatggtagctgtcaagatttttgaaaagttagtgccaggaattaggtgattggtaagcagcggcccattccttgccttcagtgaaatgacatcccgaaaaaaataaaaaaaaaaaaaa

SEQ ID NO: 18568 - DNA, 679 bp, Homo sapiens
  misc_feature 8, 45, 55, 71, 98, 119, 140, 142, 143, 145, 151, 159, 178,205, 206, 207, 209, 213, 215, 216, 223, 225, 226, 238, 259,278, 295, 303, 316, 390, 394, 403, 417, 441, 442, 447, 456,458, 464, 466, 472, 480, 482, 495, 500, 502, 524, 530: n = A,T,C or G
  misc_feature 533, 538, 547, 549, 553, 555, 559, 570, 571, 574, 585, 592,599, 600, 601, 617, 623, 630, 632, 637, 642, 643, 644, 648,650, 657, 660, 661, 663, 670: n = A,T,C or G
agtacttntagaattaattaaggcggggagggaatggaggaggcnaccgttgttntcgagcattgcactanctgacgcgtctatgggcgcaacgccgnggacctgagccaggcgctgcncctggaggccccagagcttcnanncnaggtgnacccgacnaagccccggaggggcaagnttcgaggtgacgctgctgcgcccggannncngcanannggagctntnnactgggattaanaaggggcccccacgcaaactnaaattccctgagcctcaangaggtggtggaagagtntgaagaancacctgtcggtanggagatttgggtagaagccctcatgctgagctttgtgtccctgggggatgttggaacattaatgatggaacatngccnaaacttcantcttgatcctgaancccatgggttttcttcccctgccnnaaatnaagggtttnantttatnanggccanccttttantnagggccttttgtnaaaancnttacttggattttcggtttaanttgcanctnaaaanacccccttngntagncntgtnttaaaaacttnnggnggggggccccncccgggngggggcnnncccaaaaccccccccnaaaaanaaggggntnaaaanaaaannncccnanaaaaaanccnncnttttttnaaaaaaaaa

SEQ ID NO: 18569 - DNA, 492 bp, Homo sapiens
  misc_feature 31, 33, 35, 37, 41, 44, 51, 57, 85, 86, 88, 92, 105, 142,146, 151, 156, 160, 163, 173, 176, 177, 181, 186, 189, 190,192, 195, 196, 198, 232, 233, 463: n = A,T,C or G
agtacttctagaattaattaaggcgggcacngnancnctgnttnggacacnccatgnaccatcgggctattcccagggcatggcnnancggncagattctttttnccaggattaaaactctgaccccctgtaaaaaaaactnaaanaaaanaaaangggnccncccccggggnggnngacnttatngcnnanttnngntggttttgccccccccctggaacaactttttatnnatactgtgattttgaacagattatgcaacattggaaggaaggctgtactttgatggtttgaaggaactcagcagtatgatgatctggttccaggggaaaaaaatagctggttgggtgtctagccccccaacacttttgtctgttgtgtataaaagaagaaagactggcatgtaccttcatttgcttagctatttgagtatctagagaaaaattaaaatgcaattgagttngcattataccctggcacacttaataaatt

SEQ ID NO: 18570 - DNA, 341 bp, Homo sapiens
  misc_feature 146, 147, 149, 150, 167, 171, 174, 176, 181, 182, 183, 184,186, 187, 189, 192, 196, 197, 208, 209, 210, 212, 215, 220,221, 227, 229, 230, 231, 233, 238, 257, 258, 261, 274, 278,279, 282, 285, 288, 300, 305, 309, 312, 319, 320, 321: n = A,T,C or G
  misc_feature 326, 327, 339: n = A,T,C or G
agtacttctagaattaattaaggcggggatgcttgcatgtgtaatcttactaagagctaatagaaaggctaggaccaaacctatctccccttttatactaataatcttataaaaaaaaaaaaaaaaaaaaaaaaaaaaaaaaaaanngnncccccccccgggggggncccnaancnccccnnnnannanggntttnnccccccccccnnngnccnttttnnaaaaangnnngngggtncttgctaaaaaaaataatnnctntggtgctactttnaatnnggncangtntaaaatgttttnagaanggtnaancttcttnnnattanngcctggtgtggnaa

SEQ ID NO: 18571 - DNA, 282 bp, Homo sapiens
  misc_feature 135, 144, 149, 155, 157, 158, 160, 162, 163, 176, 178, 183,187, 192, 193, 196, 206, 211, 212, 216, 217, 221, 225, 230,239, 241, 244, 245, 254, 255, 256, 261, 262, 269, 271, 280: n = A,T,C or G
agtacttctagaattaattaaggcgggggaattgcttgaacccagaaggcggagattgcagtgagccaatatcacaccattgtaccctagcctggcaacagagcaagactctgtctccaaaaaaaaaaaaaaaanttttttttnaaaantttttntnncnannattttttgttttntngccanggcnggccnnaanttttgggttnaaagnnatcnncccncctnacccncccaaaaantnggnnttaaaaatnnnacccnntgccccngnccaaaaaantt

SEQ ID NO: 18572 - DNA, 385 bp, Homo sapiens
agtacttctagaattaattaaggcggggggcaagataaaatagctgtgaaatgtaattagaagaatatacaaacaacaaacaataacgtttcaaacctagaacgatgcaaggaaacatgcactatttgatattatgaagtcctgtgaagtccaaagatgagttacagaaagtgacttcagggcccatgcacatgctttctgtgtgtatgtgcatgtgtgtaagtgatttcttcattgcccatttttgtattttccacatctccaaagtgaccattaaaatgcaccattcttggtaggcagcgtcttcattctggctggggaaggcagagataaagaatgcattcagggctgggcgcggtggctcacgcctgtaatcccagcactt

SEQ ID NO: 18573 - DNA, 372 bp, Homo sapiens
  misc_feature 179, 182, 183, 185, 197, 199, 200, 203, 208, 211, 212, 233,244, 252, 258, 259, 265, 269, 270, 273, 276, 277, 285, 298,299, 304, 305, 313, 319, 340, 341, 343, 344, 346, 348, 355,359, 360: n = A,T,C or G
agtacttctagaattaattaaggcgggtgagggataaaaaactacatattaagtacagtgtgcactgctcaggtgacaagtgcactgaaatctcagaaaacacactaaagaacttatccatgtcatgaaaaaccacctgtatttccaaaacaattgacacttaaaaaaaaaaaaaaccntanngnctttttttaaananntanaaaancannaccaacccaacccaaatttanaaaaaaaaaantattaaanatcaanncaaaantaannganttnnaaataaantccaaagggtcannaaaanncaaagttntttttnggaaaaaaaaaaaaaaaaccnngnnancnttttttnaaanntaaaaaaaaaaa

SEQ ID NO: 18574 - DNA, 803 bp, Homo sapiens
  misc_feature 427, 442, 466, 517, 543, 551, 567, 570, 572, 573, 574, 640,660, 688, 699, 700, 707, 710, 713, 716, 720, 731, 732, 734,743, 746, 747, 752, 758, 777, 783, 790: n = A,T,C or G
agtacttctagaattaattaaggcgggggaaggaggagccgcctcagccgcagctggccaacggggccctcaaagtctccgtctggagtaaggtgctgcggagcgacgcggcctgggaggataaggatgaatttttagatgtgatctactggttccgacagatcattgctgtggtcctgggtgtcatttggggagttttgccattacgagggttcttgggaatagcaggattctgcctgatcaatgcaggagtcctgtacctctacttcagcaattacctacagattgatgaggaagaatatggtggcacgtgggagctcacgaaggaagggtttatgacctcttttgccttgttcatggtcatttggatcatcttttacacttgccatccattatgactgatgggtgtacagctcccaagtgcttnctatccagtccaaangaccctcttgattaccagcacagnaacttgatccgttgggggaaccccaaccccttggaacttggaagaccccgngtttcctggaccgcgaatcaatgtgnttggcatnaatgttttttgcaaanggntnnnaacctgaaaacttttttaaaaaccccccccccctttgggggaagcattttcttgaatttttttcantcaccaaccctttttttttntttgggattcccttcaaattaaacagcnttttttttttnnccaaatnggnagnctngcanttttaattttnntnggccccctnttnnattcnaaaaanaaaacaatttaaattgggnttcctnaattccnaaaaaaaaaaaaa

SEQ ID NO: 18575 - DNA, 442 bp, Homo sapiens
  misc_feature 24, 27, 30, 41, 50, 58, 60, 65, 70, 71, 81, 82, 86, 88, 89,94, 99, 196, 198, 203, 204, 215, 219, 221, 228, 229, 231,233, 235, 237, 238, 240, 241, 242, 244, 245, 253, 254, 255,256, 257, 259, 268, 275, 276, 278, 279, 280, 282, 310: n = A,T,C or G
  misc_feature 326, 327, 328, 331, 340, 342, 345, 351, 352, 359, 365, 366,367, 369, 373, 375, 383, 388, 389, 394, 405, 415, 418, 419,429, 430, 433: n = A,T,C or G
agtacttctagaattaattaaggnggncanggcggcggggncctgcaatnccacctantntgaangctanngcacacgatnngtgngnncctgnaaaanggagcttgcagtgagccgagatcatgccactgcactccagcctgggtgacagagccagactccgaaaaaaaaaaaaaaaaaaaaaaaaaaaaaaggngnccccnnccgggggggancccnantgccccnnanangnanncnnntnncccccccnnnnngnccgtttttnaaaaaannannntncctaaattagtggcaaaagaaagagaangggaggttctaaacannnaangcattgaananganacagtnncacacanaaagcnnncnccananaaatgganagcanngaaanaaaaaaaaatnccataattanatnnaaaaaaccanncanaatgctttt

SEQ ID NO: 18576 - DNA, 434 bp, Homo sapiens
  misc_feature 257: n = A,T,C or G
agtacttctagaattaattaaggcggggaagtgggagcagaccacatgtgagtggaatccagaacattaggactggaagggaactgaggtggggtaggtttcttggagaaagtagtgtcaaaacaagggttttccctagccacctggcaactctgtgatcttaacctctctcaggctcagtgtcttatcaagaaaagggggctaatgatcatagaactgttaagggtattcagtgagaatgtatatagagcacttancacaatcactggcttacagtaagcagtcaataaatatgagctagttattgcatcattcaaggccccagcagacaccaaattttccttcctcatttagcatttctatcacaggactgtgattatatatatatatatatttatttacttattatttattttttgagatggagtttctct

SEQ ID NO: 18577 - DNA, 420 bp, Homo sapiens
  misc_feature 37, 175, 202, 243, 326, 380, 385, 409: n = A,T,C or G
agtacttctagaattaattaaggcgggcatggtggcncacacctgtattctcagctactcagggggctaaggcaagagaatagcttgaacccgggaggcagaggtggcagtgagccgagattgtaccactgcactccagtctggatgacagagcaggactccatctcaaaaaaanaaaaaaggaacaaatgcattaaaaatntcctttttttgacacacaaagtagaaggatgcaaatttatnacatcaacttaaaagaggtgtgaatgaacctataatggtgtagcatttgggatgttattgaagttaaattggcatcaatttanagtgttgtaactttaggatagtaaatgtaatctccatgacaattataaacaatncagcnagagcatatacacaaaacaaaatnagaaggaaatt

SEQ ID NO: 18578 - DNA, 460 bp, Homo sapiens
  misc_feature 29, 31, 34, 39, 40, 50, 55, 64, 85, 93, 115, 126, 137, 148,149, 173, 176, 178, 199, 202, 213, 216, 233, 241, 243, 259,260, 266, 270, 271, 278, 282, 294, 296, 297, 303: n = A,T,C or G
agtacttctagaattaattaaggcgggancntgngatcnnacctactttngatgntgaagcaanatgaatggcgtgaacctcggncgtgccgntcgtggtgactcatgcctgtantcctggaattncgtgacccggnaggctgaaggnntggaggatcacattaaaccacganttngngaccagcttgggctacatagnaanaaaataaaaancangcaaaaaccaaacaggngccccccntntggggggaatcaactnnacctcntganntacagantatncccccccatttntnnctaaancctcaatagatgacattgacttgatactggacataattgaagaattagtgaattaaaagccagtgctgaggaattcatgagagacccaacccggggcaatgaataaaaattatgaaagattagttaagagacacaggaagtagatggaaagattcca

SEQ ID NO: 18579 - DNA, 353 bp, Homo sapiens
  misc_feature 23, 24, 35, 40, 44, 49, 68, 71, 76, 78, 88, 90, 94, 102,108, 113, 139, 185, 214, 237, 323, 327, 328, 329: n = A,T,C or G
agtacttctagaattaattaagnnggaagcatgtncgggntcancgcangttaattgacgaggggggnttnggagnanatttttactnanaatncaaaaatnagacgngtgcngtggcaacctcctgtgatcccatcancttgggaggctgagggaggagaatcagttgaacccggagggtgganattgcagtgagactctcaaaaaaacaaancaacacaaaaaaaatctcctaanatgattaaaacaaacttgcttctacaataaaccgtaaactcaccgtatctagtgattctgtacattaaatcttttgaacatgtttncccnnnaaaaaaaaaaaaaaaaaaaaaaaa

SEQ ID NO: 18580 - DNA, 420 bp, Homo sapiens
  misc_feature 239, 240, 241, 242, 243, 244, 253, 259, 260, 261, 263, 265,266, 267, 268, 274, 275, 276, 277, 279, 280, 281, 282, 284,288, 289, 301, 302, 303, 307, 314, 324, 333, 340, 356, 367,377, 380, 390, 409: n = A,T,C or G
agtacttctagaattaattaaggcgggggaggcagtgctaccagaaccatggttcggttggttcagccgcctggacctcatctgctccctgaggttggtctttgctccgcaccctggtgcggcctggtacacagaaggcgctcagtaaacacttgtggatgaaggaaaaaaaaaaaaaaaaaaaaaaaaaaaaaaaaaaaaaaaaaaaaaaaaaaaaaaaaaaaaaaaaaaaaaaaaannnnnnccccccccngggggnnncncnnnncccccnnnnannnngntttnnaccccccccccnnngggncttttanaaaaaacatnacttgtcantttaatntttttcactgactaanagggactcaantacattatangtntttaaagatnaaaaccctttaccctaccnaagggtaaaaa

SEQ ID NO: 18581 - DNA, 394 bp, Homo sapiens
agtacttctagaattaattaaggcgggtaaagaaaaaacagtggagaagaaatcacaaaggaaaatatagatagatttgtttacataaaaataaaaactaacgtatatttaaaatcatattaagactcatttttggccaagacccacttattgatgggagtataaattggtattgtataaattggggattgggagtaccaatccccagccctcaggccatggattggtactggtccgtggcctgttaggaaccaggctgcacagcaggaggtgagtggtgggcaagcaagctttaattcccgagctttgcctcctgtcaaatcagtggtggcattagattctcataggagtgtgaaccctattgtgagctgtgcatgcaagggatctaggttgc

SEQ ID NO: 18582 - DNA, 414 bp, Homo sapiens
agtacttctagaattaattaaatatgatgttgagaggctgagatgggcggatcactaggtcaggagatcgagaccatcctggctaactcggtgaaaccccgtctctactgaaaatacaaaaaaaatagctgtgcgtggtggcgggtgcctgtactcccagctactggggaggctgaggcaggagaatggcaagaacccgggaggcggagcttgcagtgagcagacatcgcactactgcactccagcctgggtgacagagcgagactccgtctcaaaataaataaataaataaataaatattacgtaaactgagaaaatgagtataacaagagtagtattgttgtttctctgagaaataaactaaatatgttggaaaaatgagaaactcaacagttgctgtcagcttaactgttg

SEQ ID NO: 18583 - DNA, 450 bp, Homo sapiens
  misc_feature 30, 34, 35, 37, 49, 53, 54, 58, 66, 73, 80, 93, 95, 96, 109,110, 114, 117, 119, 122, 126, 137, 140, 150, 151, 153, 174,192, 196, 232, 242, 289, 294, 302, 307, 312, 317, 319, 320,321, 340, 346, 347, 348, 357, 358, 359, 366, 371: n = A,T,C or G
  misc_feature 382, 384, 386, 395, 397, 398, 401, 402, 403, 405, 407, 408,410, 412, 418, 426, 430, 434: n = A,T,C or G
agtacttctagaattaattaaggcgggagngatnncntggggagatttncctnntgcnagatgacncataatngggtgcnacgcaccatcatngnncatgtatacatanntacntancntgnccanagtgcacatgnccnctacaactanncnttttatatacaaatcaagganaatatgaaagagaggacnattntggggaggatatcaaaacaagaggttccagaagaanatgcactaantagcaaagaacactcaaaaagcagtgttaagaaaaaatttacctcanaattnactgggtntattncgtcntatgncnnnttttaaaaattggaatttnggtttnnngcccccccnnnggggggnctccnttttttttttngngnaaaaatttntnnccnnntntnngntnggaaantaaaattncccntccnaaaaaaaaaaaaaaaa

SEQ ID NO: 18584 - DNA, 418 bp, Homo sapiens
  misc_feature 405, 406, 407, 418: n = A,T,C or G
agtacttctagaattaattaaggcggggccgagatcaaggcattgcagtgcagcctgggtaacagagcaagactttgtctaaacaaaaacaaaaacaaaaaaattctttttctcagaatagctacattcatctcatcattatataaaagacttactaaaaattaaagccttggatttgactctaggtaaagtgcatggagaataaacatgaatcattatttgttttagtatactattagtataataattgaaacagactactcatattcctgcttatgtgacatacttgtttttgttttgttttgtttttttgagcaagactttgtctaaacaaaaacaaaaacaaaaaattctttttctcagaatagctacattcatctcatcattatataaaagacttacttnnnaaaaaaaaaan

SEQ ID NO: 18585 - DNA, 479 bp, Homo sapiens
taccgggccccccctcgagagtacttctagaattaattaaggcaggagaacaaagctgagaactatttcaaaatatacaatcagaggagaaaaataaaaaggaatgaggaaaacttataagaattatgagatataatcaaaaaagcaaatatttgaattataggagctcaaaaagaaaaagagaaaaacaaagcttttttaaagaaataattttctacagaaaacattctaaatctgggcaaagttacaaattccaggtataagaaggtcaaagatctccaaaccaattcaatccaaataagatgacatcaacatatttgataatcaaactgccaaatatcaacaacagagagaatatcctgaaagtagcaagagaaaaaaaatacatatgagggagttcaataaacatgtattttataagagatattataggccagaagagagtggcattatatatgtgaagtgctaaaagaaaaaaa

SEQ ID NO: 18586 - DNA, 261 bp, Homo sapiens
ctcgagagtacttctagaattaattaaggcgggaggagataaatggaagtatactgatgtaagactcttatactatacatgaagtggtataatatcactgtgataagtgataagactgtgagaaattgaagtgtatactttgaacctcaaagcaatgaagaaaatagcaaaacaaagaatttacagctgataagccaacaaaggcaataaaaattaatcattaaaaaatacgcaatccagaagaaaaaaaaaaaaaaaaaa

SEQ ID NO: 18587 - DNA, 381 bp, Homo sapiens
  misc_feature 83, 85, 96, 97, 104, 105, 265, 314, 361: n = A,T,C or G
tcactaaaggggaacaaaaagctgggtacccgggccccccctcgagagtacttctagaattaattaaggcggggtcccatatngncttggaggttnnggaaagnntcttttttttttttttccaggaggaaaaaaaagcctatttaatgaactcagaaaaaatgaagacaaaagaaacataaaatgaacatatggccttttccatgatacatgctgttattttacctgtcttctattactcatgtgttattcatctttcttccanatttgcatatttctccatttatacatagggaattgggaacttttagaantttttccctgtctctgatggattggacaatgtttgcaattctagganacatctgattattctttcaa

SEQ ID NO: 18588 - DNA, 138 bp, Homo sapiens
  misc_feature 8, 19, 67, 75, 86, 91, 107, 126: n = A,T,C or G
agtacttntagaattaatnaaggcgggaattaagtacttctaattaacaatgctagataatgtcagngactgttncttgtatctgnactgnaaggacaaatgctgtncatagttgtaacttctaanacaaggctttga

SEQ ID NO: 18589 - DNA, 581 bp, Homo sapiens
  misc_feature 28, 33, 42, 45, 48, 64, 70, 85, 101, 113, 116, 118, 132,148, 150, 165, 169, 184, 198, 206, 209, 210, 219, 220, 285,286, 290, 295, 310, 321, 325, 329, 330, 338, 341, 343, 382,386, 388, 391, 396, 406, 407, 410, 424, 435, 436, 437: n = A,T,C or G
  misc_feature 439, 451, 461, 462, 467, 476, 485, 498, 504, 506, 508, 513,522, 543, 547, 575, 576, 577, 578: n = A,T,C or G
agtacttctagaattaattaaggcgggnggatnacctgaggncanganttcgagaccagcctgnccaacntggcaaaaccctgtntctactaaaaatacanaaaattaaccangcntngtggcgggtgcatntaaacccagctactcngnaggctgaagcaaganaatntcctgaacccaggangcggaggctgcaangagccganatnncaccattgnnctccatcctaagtgacaagagcaagactctgtctccaatttaaaacccccaaatgttatgggccnngaanaaggngggtgggggtcaaanttcgggatatngatngcanncccgatgnttntnaacggaccccttttttttggggggttttcatgcccctcnaatntnccnaaaanttttgggccnnaanggggacccaaaaantaaaaaaattnnnanattggccaaggnaaggggtttnnccccnttattcccncctttttgnaaaccccaagggnggggtntntnggggncagaaaatnaaaaaccttcttggttaaacngggnaaaacccccttccccttaaaaattcccnnnnaaa

SEQ ID NO: 18590 - DNA, 492 bp, Homo sapiens
  misc_feature 34, 62, 83, 200, 236, 262, 268, 306, 314, 329, 331, 336,344, 345, 348, 350, 355, 369, 371, 372, 374, 380, 381, 392,394, 398, 401, 403, 412, 416, 418, 423, 437, 444, 447, 456,458, 462, 463, 464, 467, 474, 475, 478, 483: n = A,T,C or G
agtacttctagaattaattaaggcgggaggtcangcacgctggctcatgcctgtaatcccancactttgggaggctgaggcangtggatcacttgaggccaggagtatgagaccagcctgggcaatgtggtgaaattgcatctttactaaaaatacaaaaactagccaggcatggtggcacatgcctgtaataccaggtncttgggaagctgaggcataagaatcacttgaacccnggaggtggaggttgcagagtgagccnagatcncagcactgcactctagtctgggtgacagagcaagactntgtcacanaaaaaaaaaaaaaangnttttnaaattttnnggnanccctntttttttttaaacnanntncctttnncttttaaaaancncaanggnanccaaggggnaaanantttcngggccccctaaaantttccanttnagaataaancnttgnnnaanaatttgnnggnctgcnaaaaaaaaa

SEQ ID NO: 18591 - DNA, 455 bp, Homo sapiens
  misc_feature 190, 193, 194, 197, 200, 203, 204, 207, 220, 225, 235, 236,239, 247, 248, 250, 251, 259, 272, 274, 279, 284, 290, 295,324, 326, 334, 343, 347, 349, 358, 368, 372, 374, 376, 378,389, 390, 391, 396, 405, 408, 411, 412, 416, 417, 420: n = A,T,C or G
  misc_feature 422, 429, 430, 439: n = A,T,C or G
agtacttctagaattaattaagtcgggggaggggggagggatagcattgggagatatacctaatgctagatgacacattagtgggtgcagcgcaccagcatggcacatgtatacatatgtaactaacctgcacaatgtgcacatgtaccctaaaacttagagtataataaaaaaaaaaaaaaaaaaacgnaannaanaanttnnttnaaaaaaaaaaaanaaatnaaaaaataannaangaaaaaannannaaaaaaanaataaataagaantnaatanaaaantgaaanaaagngaaaccccaattttttttccggttttttncntttttttnaaattgggntttngntttttttcnttttgatttnttgnantncnttttttttttnnnggaanaaccccttnaanaanntttnnttnanaaaaaanntttcccctncccccaaaaaaaaaaa

SEQ ID NO: 18592 - DNA, 340 bp, Homo sapiens
  misc_feature 322, 323, 325, 326, 328: n = A,T,C or G
agtacttctagaattaattaaggggggaaacactacacctaaacgtttcagtcaaactgctgaaaagtgaaagataaagagatcttacaagtagcgagaataaaaatggggcattacttacaggggaacaatgatatgaatggtggctaatttcttaccagacattacttacaggggatcaatgatatgaatggtggctaatctcttaccagaaacaatagaaacttgaacacaatggaatgagatctttaagtactaaaggaaaaaaaattgtcaatctagacttctatatctggtgaaagtaacttcaaaaacaaaagcnnannanaaaaaaaaaaaa

SEQ ID NO: 18593 - DNA, 136 bp, Homo sapiens
  misc_feature 28, 41, 49, 55, 77, 121: n = A,T,C or G
agtacttctagaattaattaaggcgggngttccgaataatntcctggangttatnacgacacctattttaaatatangcctgaattttgtaaagtaatatttaaggtggtccgtgataatnaaataaaatgcttaa

SEQ ID NO: 18594 - DNA, 431 bp, Homo sapiens
  misc_feature 79, 84, 90, 108, 140, 149, 154, 157, 158, 162, 168, 170,184, 194, 197, 202, 205, 206, 207, 213, 218, 219, 222, 226,229, 231, 233, 241, 242, 253, 273, 283, 306, 318, 335, 338,353, 358, 382, 410, 420: n = A,T,C or G
agtacttctagaattaattaaggcgggagaatggtgtgaacccgggaggcggagcttgcactgagttgagattgtgccnctgcnctctancctgggtgacagagcatngactctgtctcaaaaaaatatatctgtaatcnaaaatactnaagangannaaanaagggngnccccccccccgggngaggcccatnctnccctnagnnnagattntttcnnccncccnccngncngagctatnnaatgagacttncacctcaaaaaaaataattnaataagaaangccaggctcggtggctcactccntgtaatcccaancacttttggggaggctngangcgggccgggattancaaangttaattagatcgagaccattctnggccaacatggtgaaaccctagtctctnctaaaaaatncaaaaaaatta

SEQ ID NO: 18595 - DNA, 315 bp, Homo sapiens
  misc_feature 30, 31, 32, 35, 38, 40, 41, 42, 57, 58, 59, 63, 66, 70, 71,74, 76, 78, 82, 87, 94, 98, 99, 102, 107, 110, 112, 121,131, 136, 137, 139, 140, 143, 154, 155, 157, 158, 174, 186,298, 303, 312: n = A,T,C or G
agtacttctagaattaattaaggcgggggnnnggnatntnnntatcctggggatgannncggnctnatgnnaanancntaanaaaantttaacnttgnncanaaaanccncntgaatcctnagttaatttnactgnnannccnaagaggaacanntnnttggacactaagaaanaaccttgtttanagagtaaaaaatttaacacccatagtaggcctaaaaagcaagccaccaattaagaaagcgttcaagctcaacacccactacctaaaaaaaaaaaaaaaaaaaaaaaaaaaanggggnccccccccnggg

SEQ ID NO: 18596 - DNA, 501 bp, Homo sapiens
  misc_feature 480: n = A,T,C or G
agtacttctagaattaattaaggcgggcagatcaagaggtcaggagtttgagaccagcctggctaacatggtgaaaccccatctctactaaagatacaaaaaattacctcagtgtggtggtgcatgcctgtaatcacagctactcgggaggctgaggcaggagaatcgcttgaacccaggaggcagaggtttcagtgagctgagattgtgccactgcactccagcctgggcaacagggtgagactctgtctcaaaataaataaataagtaagtaagtaagtaaaaaaacaaaagtaaagagcaggtttggcgctctgagccctctccagttgagttcttaccccatctttttaagggccttcttgacaaatccattacatttctgaaaagagcccggtttctcaagggatcagaatcttctttcctagtctcctgctagagtgctgttatttttggggttgtccagattaaaaatcttgngtgggtttcttttacattctt

SEQ ID NO: 18597 - DNA, 446 bp, Homo sapiens
  misc_feature 435: n = A,T,C or G
aaagctgggtccgggccccccctcgagagtcttctagaattaattaaggcggggtatctttttccatctatttgctttccacagacagcatctgtgtcttccttttaaggcccatctcatatagacaagatatagctgagtcttgttttttcagcccttccaaacatttctaccattgaactgtagtgctcagtggatttacagggagtgcaataattgttagtcaaaatagacctatacgtttaccatttaaactacggttgtctagtctaatttttttactcctttttcccctgcacattttaatgttaattaccttttagaattccactttaactgggtactgactttttatgcatacctatttccatgatctatgtgcaagtgctatagggaatacagtatacactcaagtgcttatattctattgaaggnttttttaaaat

SEQ ID NO: 18598 - DNA, 338 bp, Homo sapiens
agtacttctagaattaattaaggcggggtgatgaatccaaagcgtttgcagcattaggggaacttacatacagaggacttcagcgtcctcatgacagaaaaaaatacgttctacccaagtatgtccttaaccagagtgtcaccctatgtagtttatataagagtgtcaggaatttggcccaggccgttgctagattctatgtgtttggcagcatgcttgatatttcagggcttgggaaaaccacctaaacaacttcctgtgggccttggagtactccttgataccttccaggccccagtttccccagtttgggtttaagcctgcagggaaaaaaaaaa

SEQ ID NO: 18599 - DNA, 185 bp, Homo sapiens
  misc_feature 8, 26, 35, 36, 94, 98, 106: n = A,T,C or G
aaagcctntaaaccaacaacacaaanggctgcttnngagaacggctacctgcctgtgctgccaccgggagaaggaaggaggaaggacacatctnctanaatagganctgcttgttttatatatgataaagatgttagggaaggtttccatacatatagccattaaagcccttaactcaaggcttt

SEQ ID NO: 18600 - DNA, 361 bp, Homo sapiens
agtacttctagaattaattaaggcggggagggtgtattgtcacaaagtcaatttatcagttagggtggggcaggaacaaatcacaatggtggaatgtcatcagttaaggcaggaactggctattttcacttcttttgtggatcttcacttgcttcaggccatctagatgtatacatgcaggtcacaggggatatgacggctttcatgtcccagagacctgttgtgctgtgtattttgatttcctgtgtatgcaaatgtgtgtatttaccattgtgtagggggctgtgtctgatcttggtgttcaaaacagaactgtattttttgcctttaaaattaaataatataacgtgaataaatgacc

SEQ ID NO: 18601 - DNA, 205 bp, Homo sapiens
  misc_feature 33, 42, 93, 125, 161, 162, 163, 172, 175, 183: n = A,T,C or G
agtacttctagaattaattaaggcggggtacantaaggcagngcttcccacactggacctctttcctggttctcttttgcaatacattaacanaccctttatcaacataaacaatagtaactganctattaaaggcaacctctctgactccttctgcctannnaaaaaaaancanatgtaccntaaaaaaaaaaaaaaaaaaaaa

SEQ ID NO: 18602 - DNA, 626 bp, Homo sapiens
  misc_feature 31, 32, 36, 37, 38, 40, 42, 44, 47, 57, 67, 70, 76, 77, 80,83, 84, 92, 105, 120, 133, 135, 137, 143, 149, 153, 156,157, 158, 162, 164, 165, 167, 168, 177, 201, 207, 216, 219,220, 221, 222, 228, 230, 232, 234, 237, 244, 247, 249: n = A,T,C or G
  misc_feature 250, 251, 253, 259, 309, 310, 321, 382, 386, 416, 427, 452,484, 492, 514, 567, 587, 592, 625: n = A,T,C or G
agtacttctagaattaattaaggcggggggnntggnnncncncngcncatatggttngggggccctntangtgctnnatntanncatctgangggtctcctggancagccgtatgttganctaaagtctacantnancattgnacagantggnaannnattncnncnntaaaggcanacaagtggctatcactttatactnttattncaacgatanatnnnnatactntntntntcntaatatnaantnnngncgttgntaataccatatactttatatttctatacatttatatttctaataatacanntatcactgatntatgtagacacttttagaatttattaaatccttggccttgtgcattatagcattccattancaanagttgtaccccctccccagtcttcgccttnctctttttaanctgttttatgaaaaagacctagaanttcttgattcatttttaccattctttccatanggtagaanaaaaagttgattggttggttgnttttcaattatgccttaaactaaacatttctgttaaattaccctatcctttgntctctactggtttctttggnaatgnatgactaccaaaagtgatacttttgctgaaaant

SEQ ID NO: 18603 - DNA, 202 bp, Homo sapiens
  misc_feature 36, 57, 63, 125, 145, 156, 185, 188: n = A,T,C or G
agtacttctagaattaattaaggcgggattcctganattcctatgctgtacagcagngggttntcaaatcttttgctcaggactcctttatattttaaaaaattattgaagaccccaaatagctnttgtttatatgagttatatntatcaatattntctctattaaaaactaatactgataaatnttntaagtatgtattaa

SEQ ID NO: 18604 - DNA, 177 bp, Homo sapiens
  misc_feature 30, 44, 45, 79, 154: n = A,T,C or G
ctgttacttctgtcacagaagtaaaaactnattctattagaggnntatccgaatgaagtaacaaaaaaccttgccaatnctttgagtcagatatgatttcttcatctgattaaaggaaatgatgcaaactgggtagggtggcacatacctgtantcccagctactccaaaggctgag

SEQ ID NO: 18605 - DNA, 347 bp, Homo sapiens
  misc_feature 345, 346: n = A,T,C or G
agtacttctagaattaattaaggcaggtaacaattagaacttagtgttagccaatttctctggtgtaaacacgccagccatggcttattccaagtaccaggacaaaggcactgcatgtgaagttgggaagagatgtgcacaatcagctcctgcaaaccactgcaggctggcttctgcacaccactggctctgagacacacgtgaatattcaccctggcttcccctggccacaagcctaagatggtcgctctgcacccacctctctcaaaggaatttttgatgtcattgacttccacctgagatcctggcactctgaagatcccctgctgctggagtcctaaaaanna

SEQ ID NO: 18606 - DNA, 654 bp, Homo sapiens
  misc_feature 28, 31, 41, 46, 47, 61, 72, 87, 88, 91, 107, 161, 174, 195,197, 215, 216, 220, 222, 226, 230, 242, 243, 245, 249, 253,257, 269, 271, 273, 282, 296, 297, 298, 299, 301, 302, 306,311, 316, 318, 370, 411, 471, 473, 489, 495, 509, 513: n = A,T,C or G
  misc_feature 523, 542, 548, 554, 567, 572, 583, 587, 588, 595, 598, 599,603, 605, 617, 620, 621, 626, 627, 628, 630, 633, 635, 644: n = A,T,C or G
agtacttctagaattaattaaggcgggnganaatgttttcntgttnnttatactaacattntttcttctatngggtgatagattggnncanttgggtgtgaggagtncagttatatgtttgggattttttaggtagtggcgacaaacctacccagcctggngatagctggttgnccaagatagaatcttaacggnanaagctaaactaatatccnnaatntnaccnaaantaacccgacccnncngccncagngggngactctcatctntncngcaaataantattctataatccnnnncnncggnggggnttacnanctagatgttggatcaggacatcccgatggtgcatccccctcttaaaggttcngtttgttcaacgattaaagtcctacgttgatctgagttcanaccggagtaatccaggtcggtttctatctacttcaaattcctccctgtcgaaaggacaananaaataaggcctacttnacaaancgccttcccccgtnaatnatatcatctnaacttatattatcccactncccttnctaccngacaaccttaccnaaccntttacccaatnaaanntaaggcnatnnaaantnaaacctggcgcnatnnaattnnntnccncnaggggaaanataaaaaatt

SEQ ID NO: 18607 - DNA, 383 bp, Homo sapiens
  misc_feature 8, 12, 14, 15, 18, 20, 23, 34, 38, 214, 228, 301, 306, 320,355: n = A,T,C or G
ttcacggnaaantnnttntnttntttctgacgcnccgnggctgttgtgttcactggtttttggaagccaagatgtcaaacacttccgaagtatgaaaagaagattgcgaaagttacattagggttctgctgtccccaaaaagccctttgtgcacaagttctcacagtcccgccccatgcattttgtgccacaagtgcaaattgaaggacttcangcagatcgcgccanggaagagcaattttgaaagtttttttttttttaaagcttttaaatttcagttaccagctccaatgaaaaaaanaaatncagtctaaaaacanccactctgaaaagccaaaacaaaaagagctccaanaaaactgttgaagcaaaagttaagtgcc

SEQ ID NO: 18608 - DNA, 497 bp, Homo sapiens
  misc_feature 70, 197, 198, 205, 219, 305, 451: n = A,T,C or G
aaaagctgggtactcgggccccccctttagagtacttttagaattaattaaggcggaaatagggaataancaacgctaagcatagttgtactatctcagatagtgatagaccaggataagaggttagaaagtgaaggtgaagtgctcttgttttcctgagtaacactcttactccagatacatatacaggtcactcnnctccttnaatttgtaaatctntggttaaatagaaaggtagcagatcagccctccttgatctctgccaacttaatatttgaacaagagatttaaaggaaaaaatattncagaagtgggaatcctcaaaatactttctaaaactagctttgggctgggattataggcataaagctactgcacccatctcagaatttggtctatgtttacaatattatcaatgggtagacagctaattgcacagaatataaatgangagaggggagatttttattaatgtgtacattttccttaattcctga

SEQ ID NO: 18609 - DNA, 412 bp, Homo sapiens
  misc_feature 8, 233, 342: n = A,T,C or G
agtactantagaattaattaaggcgggagaaagagtgaatgagctcaaaaacagtctatttgaaaatatacagtcacaggagacaaaaggaaaaataagaggaatatggtacacttataagatctagaaaatagccagaaaacaagtaaagagagatctaggtagaaagtttatttaaagggataacagataacttttcaaacctagaaaaagccataaatattcaagcacangaaggtgatagaacaccaagcaggcttaacccaaatagtacaacttaaagatatttaataatcagacttctgaagatcaaggagaaagaaagggatcctaaaagcagcnaggggaaaaagaaataaataacataaaaggtagctccaacatgcctggccacagaattctttgtggaaac

SEQ ID NO: 18610 - DNA, 238 bp, Homo sapiens
  misc_feature 59, 65, 141, 163, 202, 208, 212: n = A,T,C or G
ctcgagagtacttctagaattaattaaggcgggggaggggaaggttggtaggtaagctntaacanattgctccagctgccttatactatgcacatagctaagtgaccaaacttcttgttttgatttgaaaaaagtgcattnttttcttgccctccctttgatnaaacgttaccctatgacgggccttttgatgtgaacagangtttcnctangacaaactatcacgactaattttaaa

SEQ ID NO: 18611 - DNA, 450 bp, Homo sapiens
  misc_feature 30, 34, 40, 41, 42, 46, 53, 54, 57, 65, 70, 78, 81, 90, 104,125, 132, 228, 233, 235, 240, 242, 267, 272, 295, 335, 352,357: n = A,T,C or G
agtacttctagaattaattaaggcgggccntatnctatcnnntgangaccttnnganaaaaaganaagantgatttcncangtaagatanaattctgccaaaanactgcgtttggacttgagatncaacatnacctcttccccaggtccccggcctgtcagcctaccctacagattttgaacttgcaagccttcacaatagcatgagccaattcctcaaacatcaatnaaccngncaatntntacacacacacaccctattggcctngcttntctggagaaacctaatatactgncatactccagcagtagtattcttctataatatagaaccgntattaatataagcttantctgncactaaactctaccagaatgaatattcttcactcttcatactgcttgaactctactccctgggtaccctccaagcaaattaatgctttcaagg

SEQ ID NO: 18612 - DNA, 266 bp, Homo sapiens
  misc_feature 169, 172, 174, 180, 184, 191, 192, 203, 206, 212, 218, 234,236, 239: n = A,T,C or G
agtacttctagaattaattaaggcggggaggcagagaagagaactttgtttaaaaacaaaacaaaacagaacaaaaaactatgactaaaggatagaactctacagcagacatttagtttctacaattgatgccaaaggtagaagagattttgagaggaaaaaaaaaaantananggatantttntaaaacnngtaaagcaaancancaaatntgcaantgcaggggaaaaaatncncanctagcagcttgaaaaccccagggaaac

SEQ ID NO: 18613 - DNA, 408 bp, Homo sapiens
agtacttctagaattaattaacaggtaatcataaaatatctatctcatttatagggtacagaaaagttaaatatatttaggttataaacaaaatatatttaggttataaacaaaaattgaggaaatattcagaaattgttgtcatgtggtataaaacagttcaaaattacttcctgggtttttcactggaaattcgagttactaagagttaaaattgtagttaatatacgtaattaaaactattaggtataagaaacaattttatatacagagcatattttaaaagatgtaaggaaagttgaaaagagactaattgtttttcccttgtcacagagatctttgtatggtcaaaatgataagggggaaaggaaagtaagtttttctcttaaggtaaaatgccaatataaa

SEQ ID NO: 18614 - DNA, 247 bp, Homo sapiens
agtacttctagaattaattaaggcgggagtagcaaatttgaagacaggacagtggaaataactgagtctgaggagcaaaaagagaaaagattgaagtgaacagagcctgtgggccctgcaggacaccatcaggctgaccagtgcacatgttgtggggtctatgaaggagaagagaaagaaaggggcagagagaatatttgaagataataatggctgaaaacgcaccaagtttaataaaagacatgaa

SEQ ID NO: 18615 - DNA, 157 bp, Homo sapiens
  misc_feature 28, 32, 34, 35, 51, 55, 58, 60, 62, 69, 71, 74, 75, 77, 78,79, 80, 84, 88, 93, 94, 96, 128, 141, 152: n = A,T,C or G
agtacttctagaattaattaaggcgggnggancnnaaggatctgactacantacncancntnttatctnanatnncnnnntttnatcntaaanngnactttacgctccaattaaaagacaaagattangctgggcactgtnactcacacttntaatc

SEQ ID NO: 18616 - DNA, 661 bp, Homo sapiens
  misc_feature 157, 189, 190, 195, 196, 200, 204, 207, 213, 217, 221, 228,236, 239, 243, 247, 249, 251, 253, 260, 262, 266, 268, 271,279, 280, 297, 302, 309, 312, 314, 315, 320, 321, 328, 336,342, 345, 348, 353, 355, 359, 365, 375, 377, 381, 384: n = A,T,C or G
  misc_feature 390, 406, 407, 413, 417, 421, 422, 436, 438, 442, 458, 466,469, 471, 472, 473, 485, 504, 506, 509, 510, 512, 513, 514,538, 550, 551, 554, 557, 562, 564, 565, 566, 567, 571, 579,582, 584, 587, 590, 591, 593, 600, 602, 606, 615, 621: n = A,T,C or G
  misc_feature 622, 637, 638, 639, 640, 649: n = A,T,C or G
agtacttctagaattaattaaggcgggggggcgggcgcctgtagtcccagctactcgggaggctgaggccaggagaatggcgtgaacccgggaagcggagcttgcagtgagccgagattgcgccactgcagtccgcagtccggcctgggcgacagancgagactccgtctcaaaaaaaaaaaaaaaaanntaaanntggntaanccntcaaancccntttnacttttntttttaanggnattncccntngnanttttttngnaaangngtntttttttnnaaaaggggtttttttcngcccnttttttnaantnnggccnntccccanaaactttnaattcnggnccnttaananattntggggnttttaatggncngggnccntttttnggcttacaaaaaaaanntttttngagncccnnttttttagtccccncnttgnttggggggtttttggntggggccnttntnnngtttttttttanaggaaaaatcctttggggngnganncnnncttttttttttttttttttttgcnaaaaccccgggnnaanttnggggncnnnngggnggggggtnccntnggngtnngnttttggnancccnaaaaaattnatcccnnaaaaatttttttttnnnncccaaaaantttttttttttt

SEQ ID NO: 18617 - DNA, 424 bp, Homo sapiens
  misc_feature 7, 29, 44, 61, 125, 132, 332, 379, 384, 392: n = A,T,C or G
cccaatngaagcttatttcttctgtatgnctgtgtctacatcanacatctttctaagaggncacacagggacccaggttccttcttttttggtttctacctaccctaggtatttggagttctctncgttcantggggaaagagagtagaagattccactgcatgaggtattcacaggttgggctgaaagtgttacataaccctctgcccatatttttattgtgcaaaactcaatcacaaagctatatctaaacacagaggacatagttatgtgcataatgtgggaactgaaataaagttttaggtgttcacataaaatctgttacctcacangagtcgttgtgagattggagggaaatcacgtatgtgacatgctttantacangtgcatancatatggagggtatttaaatgtcccttttttt

SEQ ID NO: 18618 - DNA, 367 bp, Homo sapiens
  misc_feature 30, 40, 47, 56, 60, 73, 131, 145, 155, 158, 174, 180, 182,186: n = A,T,C or G
agtacttctagaattaattaaggcggggtngggaggcctncctgtcnctccttgtncatnttgttctgactgnggggggcggccatgcccaattcctcttcgagagtgtgccccatccatgacagactgantcttcagcaaacanaaacccttangtnttactcataccccctnaagccnantttncatttctcacctgtgggcagaaatgaggcagatgtgtggttgccttcatcacgtggccagaaagtaatatggctcactgggccaccccaggacctttctcagaagatgctccgatacagaaaggatccttcagctatggccccaggccttggtgagagacaggcactcgatggtataagtt

SEQ ID NO: 18619 - DNA, 279 bp, Homo sapiens
  misc_feature 111, 113, 114, 116, 118, 121, 163, 168, 169, 171, 173, 175,180, 183, 184, 185, 189, 190, 191, 193, 213, 217, 227, 229,230, 231, 232, 233, 234, 235, 236, 237, 239, 240, 243, 246,258, 260, 264: n = A,T,C or G
agtacttctagaattaattaaggcggggggggaaaaaaaaaaaaaaaaaaaaaaaaaaaaaaaaaaaaaaaaaaaaaaaaaaaaaaaaaaaaaaaaaaaaaaaaaaaaaancnncncnttnaaaaaaaaaaaaaaaaaaaaaaaccccccccccccccccccngaggnnananantttcnttnnnaaannnangaaaaccccccccccccccngcanataaaaaaanannnnnnnnntnnaancanataaaaaaaaantncttntttaaaatccaaaaa

SEQ ID NO: 18620 - DNA, 370 bp, Homo sapiens
  misc_feature 40, 52, 53, 62, 74, 100, 224, 228, 229, 233, 251, 255, 263,267, 273, 275, 276, 288, 293, 294, 310: n = A,T,C or G
agtacttctagaattaattaaggcggggagttgactctgnttccataaccanntaattaaancaagtgcccatnatggaatttgaataactgcctaactntgatatttaaacagaaactttgaggaaaaacaagtctctttttgtaaatatattctacttgttaagaaaaaataaagtagatcatgatgttcatctgaaaaaaaaaaaaaagaaaaaaaaaaanaggnncccncccccggggggaaccccnaaancccctatnaggngtaaantnncccccccccccnggccnnattttaaaaaaatcancaaattgattccttcaatgcatatgtgctccagtttaattttcatttgtggacacatttt

SEQ ID NO: 18621 - DNA, 467 bp, Homo sapiens
agtacttctagaattaattaaggcgggcagaagccaagaagtggcagaacacacccagagttactactggacccactcctttcagcaccatgccaaacgcagcagccgttgccatggctgcaacacttacacagcagcaacagcctgctacaggatttggaactagctctggttttggatgcagcaccacaggggcctccacatttggatttggaacaacaaataaaccctcaggaagtcttagtgcaggctttggcagctcaagtacatctgggtttaacttcagcaatcctggcatcacggcatcagctggtttgacttttggggtgtccaatcctgcctctgcaggttttggaacaggaggacaactccttcagttgaagaaacctccagctggaaacaaaagaggaaaaagataaacatgggttgatgtgttgagagaatccatagcagcaccgttcattcta

SEQ ID NO: 18622 - DNA, 279 bp, Homo sapiens
  misc_feature 49, 62, 89, 135, 147, 148, 151, 159, 161, 169, 183, 186,192, 193, 242, 258: n = A,T,C or G
agtacttctagaattaattaaggcgggagtggagtggaagaagaggganaggtggagcaaantgagggccgagtgagagcgtgctccancctggctcccacaggcagctttaaccattaaaactgaagtctgaantttgaaaaaaannaanaaaaaaananaaaaaagnaaatgacttactancantaaaanngaaaacaaaaaaatgccattttcctgaaagtttttaattatttccatanaaataccaaaccccantgattaaaaaaaaaaaaaaaa

SEQ ID NO: 18623 - DNA, 432 bp, Homo sapiens
  misc_feature 24, 27, 30, 38, 45, 55, 56, 57, 59, 67, 84, 87, 89, 121,123, 129, 133, 135, 136, 137, 139, 144, 148, 152, 155, 156,169, 179, 182, 186, 190, 193, 194, 195, 196, 197, 205, 217,227, 252, 261, 267, 273, 291, 300, 309, 311, 312, 313: n = A,T,C or G
  misc_feature 326, 334, 343, 372, 418, 419: n = A,T,C or G
agtacttctagaattaattaaggnggngcngaagaacngggaaangccgctgtgnnnanttatagcncttgtgcttaaactacntgncngaggagtgtgcctccctgtgccctctcatgtntnaggctngccntnnntntgggngttncttntgnnatatatacactgntatctatgantcnaatngaanctnnnnnaatgctgncttttttaagcnattatgactngaaaagagcattctggtatgcatcncactatctnacatcnaaagtntattacaagcctatagtntccaaacangatgatacngnnntgaaaacagacanatacaccnatggaacanaaatgaggatcccgaaatgaatccatgtntttacatccaactgattttcaacaaaggtgccaaaaacacacactnngaaaaggactctc

SEQ ID NO: 18624 - DNA, 447 bp, Homo sapiens
  misc_feature 71, 74, 102, 108, 125, 127, 133, 142, 145, 147, 155, 156,169, 183, 207, 214, 240, 244, 248, 255, 306, 366, 371, 386,402, 403, 404, 422: n = A,T,C or G
agtacttctagaattaattaaggcgggcgtggtggcctgaacctgtagccccagctactcaggaggctgangcnggagacttgcttggacctgggaggcatnaggttncgattcctccgagatcntnccactnctctactgntgngnatcagagnntgactttgtctcnaaatacccaaaaantaaaacaaaaggactttcaattangaaccgngggattttctcttaattacaagtggnttgnaatnggctttncaggataaaatatgaaatgataacataattgaaaagtctatggtagcatcnagcaaactacagcccgcaggccaaatctggcccatctcctatttttatatggcctgtganataangatgtgatatggttnggctgtgttccccccnnntgtcatcttgaattgtanctcccataattcccatgtgttgggg

SEQ ID NO: 18625 - DNA, 426 bp, Homo sapiens
  misc_feature 31, 33, 41, 43, 49, 54, 57, 60, 63, 65, 70, 79, 81, 83, 85,87, 88, 102, 107, 111, 114, 117, 121, 127, 128, 131, 132,138, 139, 140, 143, 150, 158, 160, 166, 168, 169, 172, 174,176, 181, 184, 193, 199, 212, 218, 226, 228, 230, 234: n = A,T,C or G
  misc_feature 251, 255, 264, 266, 323, 336, 337, 339, 340, 341, 350, 355,366: n = A,T,C or G
agtacttctagaattaattaaggcgggcggntnaccaggtnangacatngagancancanggntnacacngtgaaacgntntntntnntaaaattccataanattanccgngcntgntggngggccnntgnnctcccnnntanttgggangctgatgnangaaaangnnctnancnctganggnggagcttgnactgancctagatcagatnacgacnctgcactncngnctgngcgacacagccagactntgtntcttgtggnanatattcaccatggaatactctgcccccccgggggggatgagttcatgtcctttgcanggacatggatganncnnnaaaccatcnttctnatcaaactatnacaaggacagaaaaccaaacaccccatgttctcactcataggtgggaattgaacaatgag

SEQ ID NO: 18626 - DNA, 314 bp, Homo sapiens
  misc_feature 290, 291, 293, 307, 308: n = A,T,C or G
agtacttctagaattaattaaggcgggggaggagtagaattaggagaaatacctaaagtaaatgacaagttgatgggtgcggcaagccaacatggcacatgtatacctatgtaacaaacctgcacgttgtgcacatgtaccgtagaacttaaagtacaattaaaaaaaaaaggtaaaaaaatgtgaacaggaacagtttgttttagaaaggcttgaatggctttgattggaagatcttttagtgtgataaattaaaggaggaaaaattacatgagtatataaggttgcannanaaaaaaaaaaaatnnaaaaaa

SEQ ID NO: 18627 - DNA, 316 bp, Homo sapiens
  misc_feature 54, 82, 134, 172, 216, 237, 250, 254, 265, 267, 269, 273,302, 309, 312: n = A,T,C or G
agtacttctagaattaattaaggcggggaatctgatggatgttgacttctatcnaataaattggctccaaatcaccccccangaattcctgtgcatgaaagcactgctactcttcagcattagtaagtgcctanaagtgcagggaatgccccctgagggcacagagattcanagaggaccacttttgccattaaaacattattatggaaaagccanctcctggacatttccttcttnattccccctcccnatcnccactctactntntntcancatcattttcctaacaagaaacaattttntgactanaanccaa

SEQ ID NO: 18628 - DNA, 263 bp, Homo sapiens
  misc_feature 122, 125, 135, 141, 143, 150, 156, 159, 162, 163, 164, 175,176, 180, 187, 200, 201, 208, 210, 231, 246: n = A,T,C or G
agtacttctagaattaattaaggcgggagggtcttcctttggcatgggatggggatgaagtaaggagagggactggaccccctggaagctgattcactatggggggaggcgtattgaacaanccnacacaacccncacatntnccgattnactaanagnacnnncaaaaataaanngctnataaacngggacaggaacannttgattnanaaaggcttgaatggctatgantggaaaatcttttantgtgataaattaaagga

SEQ ID NO: 18629 - DNA, 364 bp, Homo sapiens
  misc_feature 25: n = A,T,C or G
agtacttctagaattaattaaggcnggaacattatatattacatctgatttaatctcaacaagaactctttcaggaagaattatcctcctcttacaaataagtagaatctatctcctggtagttacaataacttggccaactttaaacaagcataaagacattatttgaacttagaaatgataaaactaatctatctgaaacaaatccaatatgcttttccactcttctactcttccccaaatagaaaagctatataagaattataaatttggagagcatcttttccttaattcccacaatccatgtggaaaaaatataatatctttaaaaccatttaaaccatgagaaaaaaaaaaaaaaaaa

SEQ ID NO: 18630 - DNA, 716 bp, Homo sapiens
  misc_feature 113, 114, 115, 123, 127, 128, 129, 135, 136, 137, 138, 140,141, 145, 152, 156, 162, 168, 172, 174, 177, 178, 184, 185,188, 196, 199, 205, 211, 238, 239, 249, 250, 251, 269, 272,274, 279, 280, 283, 290, 293, 295, 296, 298, 302, 306: n = A,T,C or G
  misc_feature 308, 313, 318, 327, 328, 330, 338, 339, 340, 341, 343, 347,349, 360, 364, 368, 371, 372, 374, 375, 380, 385, 405, 409,410, 417, 418, 424, 430, 432, 434, 437, 445, 452, 462, 469,496, 518, 533, 540, 544, 553, 562, 571, 579, 590, 594: n = A,T,C or G
  misc_feature 615, 625, 638, 639, 642, 643, 647, 651, 657, 659, 664, 673,674, 675, 676, 678, 685, 689, 698, 699, 705: n = A,T,C or G
agtacttctagaattaattaaggcggggcttgcagtgatcccagatagcgccactgcactccaggctgggcaacagagtaagactccgtctcagaaaaaaaaaaaaaaaaaannnggggtttngggnnncccccnnnnanncccnccctttngggnggccangggggncaantnacnngaaatnnggntttaaaanccnttttgnccaaangggaaaaccccctttttttttaaaaanncaaattttcnnnagggggggggggggtccntgnantcccnnttntttgggnggntnngncagnaaantnttttnacccnggggggcgnngnttccaggnnnntnaaanancccctttgccntccncccnggnnannaaaanaaaanttttttttaaaaaaaaaaantccnncccgggnncagggnctcatncntntantcccaccnttttggnaggccaaggnggggggntcccaaaccccaattggaaccttcttnggttaacccgggggaaaccccnttttttcttaaattnccaaaantttnccccgggcnggggggggnccccctttnttcccacnttttttagggngctnggggcgggaaaaaatggtttnacccccgggngggggggaccttnncannagancctnaaaatncnccccntttgttttnnnncntgggggngaanggagggganntttttntttttaaaaaa

SEQ ID NO: 18631 - DNA, 841 bp, Homo sapiens
  misc_feature 255, 263, 264, 265, 267, 269, 270, 271, 275, 276, 277, 278,287, 288, 289, 290, 291, 292, 293, 294, 295, 296, 297, 298,299, 300, 301, 302, 303, 304, 305, 306, 307, 308, 309, 310,311, 312, 313, 314, 315, 316, 317, 318, 319, 320, 321: n = A,T,C or G
  misc_feature 322, 323, 324, 325, 326, 327, 328, 329, 330, 331, 332, 333,334, 335, 336, 337, 338, 339, 340, 341, 342, 343, 344, 345,346, 347, 348, 349, 350, 351, 352, 353, 354, 355, 356, 357,358, 359, 360, 361, 362, 363, 364, 365, 366, 367, 368: n = A,T,C or G
  misc_feature 369, 370, 371, 372, 373, 374, 375, 376, 377, 378, 379, 380,381, 382, 383, 384, 385, 386, 387, 388, 389, 390, 391, 392,393, 394, 395, 396, 397, 398, 448, 452, 477, 552, 577, 597,604, 608, 627, 642, 661, 663, 671, 701, 718, 737, 748: n = A,T,C or G
  misc_feature 749, 759, 781, 782, 791, 798, 800, 806, 810, 811, 814, 820,823, 826, 830, 836: n = A,T,C or G
agtacttctagaattaattaaggcgggtggatcaccagaggtcaggagttcaagaccagcctggccaacatggtgaaaccccgtctctattaggaatacaaaaattagctgggtatggtggtgagtgcctgtaatcccagctacttgggagactgaggcaggagaatcgcttgaaccagggaggcggaggttgcagtgagccgagattgtgccactgcaccccagcctgggcaagagtgagattctgtctcaaanaaaaaaannnanannnaaannnnaaagcggcnnnnnnnnnnnnnnnnnnnnnnnnnnnnnnnnnnnnnnnnnnnnnnnnnnnnnnnnnnnnnnnnnnnnnnnnnnnnnnnnnnnnnnnnnnnnnnnnnnnnnnnnnnnnnnnntaatcgcctttgcaacacattcccctttcgccagcttggcgtaattagcnaaanaaggcccgcacccgatcgccctttnccaacagtttgcgcaacctgaatggcgaaatgggaaaatttgtaagccgttaaatatttttgttaaaaaattccncgtttaaaatttttttttttaaaanttaagccttcattttttttnaacccanttanggccccgaaaaattcggcnaaaaattcccttttntttaaaattaaaaaagaantntaaccccnaattggggtttgaggttgtttttttcccanttttttggaaacaaaanatttccccttttttaaaanaaacgtggganntcccaacctncaaaaggggggaaaaaaacccnntttttttangggcgantnggcccncttnnttnaacccnttnccnttantaaaanttttt

SEQ ID NO: 18632 - DNA, 409 bp, Homo sapiens
  misc_feature 33, 36, 48, 49, 51, 53, 56, 58, 65, 67, 69, 70, 86, 91, 99,103, 105, 109, 110, 114, 117, 123, 126, 131, 134, 147, 151,160, 167, 168, 169, 170, 171, 173, 176, 177, 184, 185, 187,191, 196, 197, 217, 218, 221, 222, 224: n = A,T,C or G
agtacttctagaattaattaagggcgggggctnttntcgtaccatggnntntncanangatcttntntnnaaaggcccaaaatgcngaccnctctaccnctgntnctcnntagntcncacaantcnaaatntgncaagaccttgacnctantttcatatnaggagannnnncngtnnggaaagnntnaatnacttnngcatgaaatcactgacaggnntgnnantgtctgttagaacaagattgtgagaatggtgaaagattgaagagtttgattagatctatttaattctgttagcagaccacaatttttgtgaaaattttaagaactattacagagcttccgtgttttatttaaaacgattaataaaaatggaaagtggtcatgagaaaatttaaagccctttgcat

SEQ ID NO: 18633 - DNA, 392 bp, Homo sapiens
  misc_feature 83, 204, 212, 216, 254, 259, 285, 360: n = A,T,C or G
agtacttctagaattaattaaggcgggaggagtaagttttagtgatctattgcacagcacgaaaatcacattattaataatgnatttgtatacttcaaaattacttagaggagatttcaaaagttttcaccacacaaaaggaaatgaggtgacaagatatgtcaattaacttgatttaattattctgcaaggtatacatatatnaaaacacnctgnattccataaatatatataattattatttctcaattaanaaatnttaaaaaaaatcgttcctactttaangcaatgacatccttatacctaatcttttttaaaaagcatatgattaatatattgagtaattttagcatagcctgntttttcaagttaaggaatggtaattcttggaa

SEQ ID NO: 18634 - DNA, 305 bp, Homo sapiens
  misc_feature 29, 212: n = A,T,C or G
agtacttctagaattaattaaggcgggangagtgaacagaagaaatcttgggctttgattgggtcggaaagaaagtgtggccctacccactttgatgccatctctaagacctactgctacctgacccccgacctctggaaggagactgtattcaccaagtctccctatcaggaattcactgaccacctcgtcaagacccacaccagagtctncgcgcagaggatccaggctccagctgtggctacaacatagggtttttatacaagaaaaataaagtgaattaagcctgataaaaaaaaaaaaaa

SEQ ID NO: 18635 - DNA, 452 bp, Homo sapiens
  misc_feature 57, 81, 194, 195, 223, 263, 265, 280, 283, 289, 291, 293,294, 295, 296, 297, 305, 306, 312, 313, 318, 330, 331, 332,334, 335, 336, 339, 344, 346, 352, 354, 358, 360, 368, 374,387, 408, 417, 431, 439, 449: n = A,T,C or G
agtacttctagaattaattaaggcgggcggatcacgaggtcaggagttcgagattancctgatcaacatggtgaaatcccntctctactaaaaatacaaaaattagccgggcatggtggcgggcgcctgtaatcccagctactcaggaggctgaggtaggagaatcgcttgaacccgggaggcggaggttgcanngagccgagatcgggccattgcactgcancctgggtgacagagcgagactctgtctcaaaaaaaaaaantnaaaaaaaaaaaaaanaanaaaaanantnnnnncccccccnngggggnnccccnattccccctttnnntnnnccntttancncccccncntggncngggttttnaaaaanaacaagggaacanggcggatacctgaccaactcntgatcctanacatgaacatggantggaggcnaaaaattacnaaa

SEQ ID NO: 18636 - DNA, 729 bp, Homo sapiens
  misc_feature 488, 509, 637, 651, 673, 681, 697, 710: n = A,T,C or G
agtacttctagaattaattaaggcgggaacacaaaaactatccttgctagggaaacacagccctggaacaaaccccctggaccccttgtcaccaccagcccatcctgtaagaaaatgatggttgaagctgcagtgacagaattggagagatgctctgttagacaagtctgtcagctgaaaggggcagaaaccattgttgaactgcttatatgagaggaagacctgggtggcacaggcctggctggacgcagggctcacagagcgtcatcagcacttcatctcttcccctgcgggacctgctgtcctctgcgttgcacacaccccccgccaggctcatccctgtatcctccttggaggaaagtgccaggctggtgctacttggccctgcctgggtcacacgcctgcctcgggatgtggaggatggtcagcccagccacagcacatggattgctatgtgaaggatgatgttccacaagaaaaccaggacngcttcaccagggaggcaagancagcagatgcccatgacagaaggtgtatactctgaataaaagaatttggatttttaaaaagagacaggaagaaaaggactttccaacttctaaaaggttaaaactagttgaatgaaacatattgggtntaatgtaaagcttntttgttgagaataaaatatccnatcaattnaaatttttttttaacntttttttttcccnttttccccccccccccctt

SEQ ID NO: 18637 - DNA, 711 bp, Homo sapiens
  misc_feature 40, 249, 266, 269, 270, 272, 275, 278, 284, 290, 297, 298,300, 306, 307, 323, 337, 344, 353, 371, 372, 374, 379, 383,392, 395, 415, 420, 438, 468, 474, 482, 483, 499, 505, 519,520, 522, 539, 545, 548, 577, 588, 605, 609, 615, 617: n = A,T,C or G
  misc_feature 620, 628, 641, 643, 645, 652, 660, 697, 704, 705: n = A,T,C or G
agtacttctagaattaattaaggcggggggaacatcccanccttgtcaacataatgagaccatgtctctacaaaaatttaaaaaattaaccaggcatagtggcatgcacctgtagtcctagctactcaggaggctgtgacaggacgatcacttgtgcccaggagttcaaggctgccgtgagctgtgattacaccactgctctccaacctgagtgacagagtgagaccctgtctcaaaaaaaaaaaattnaaaaaaaaaaattttgnccnnanttnaanaaaaanttcccngccctannanttgccnnaggattttaaattttnccaaaaaaaattcnttccctnaaaaaaaancttttgaaaacctgatgnngncctantccnggaattttnccngggaaataatttaaaccccntgccnttttttaaaggggggggnggaccaaggggggcacttttttaaaccttntttaancccgggtnnaaaaattgggaaaaanaaattnccccctaaaaaaanntnggttttaaaaatttttnaaaaangcntaaaaaaaaaaaaaaaaaactttttttanttaaacccccncctttttttttaaaacnaaanaatttnanttngggggggnaaaaatttttttngngngtggganaatttttnggggcttaaaaaaaatttttgggaaaaaaaaaatttnttaaaanntttaaa

SEQ ID NO: 18638 - DNA, 547 bp, Homo sapiens
  misc_feature 122, 131, 298, 301, 312, 353, 369, 397, 404, 406, 418, 430,435, 454, 473, 477, 486, 518, 522, 525, 533, 538: n = A,T,C or G
agtacttctagaattaattaaggcggggtatggccgggcacgcggtggctcacacctgtaatcccagcacttttggaggccaaggcaggtggatcacaaggtcaagagatcgagaccattcnatgacctangaccaccagcacacaccaccatgcttggctaatatttttatttagtagaggcgaggtctcactatgttgcccaggatggtctccaactcctgggctcaagtgattctctcaccttggcctcccaaagtgttgggattacaggccgtgagccaccatgcccagcctanatnttccttttaantgcatatataaatgttcactaaaaaaaggccatataattanctattaaaacaaagtntcaaaaaaatttaaaaatgaatttgaanttcacanantaataatttttntaacccactggnaaaancttaaaattttgaaaatcnaatttttagatcaatattntggnaaactcttnaaatattttgaaaaatttaaaacaatgttttnttantantccctccngttgnattaaaaga

SEQ ID NO: 18639 - DNA, 418 bp, Homo sapiens
  misc_feature 3, 4, 50, 51, 54, 57, 62, 63, 64, 67, 93, 94, 108, 123, 167,174, 183, 192, 204, 215, 219, 234, 245, 269, 282, 284, 285,287, 292, 296, 308, 316, 317, 323, 326, 328, 329, 330, 332,345, 346, 359, 361, 367, 372, 373, 374, 383, 386: n = A,T,C or G
  misc_feature 393, 401: n = A,T,C or G
ggnnccgggccccccctcgagagtacttctagaattaattaaggcgggcnnatnacnaggtnnnganatcaagaccatcctggctaacgcaannaagctccgtctctnctgggaataccaaanttatccgggcatggtggtgggcgcctgtaatcccaactacttgngaggctnaggtagganaatggtgtnaacccatgaggnggagcttgcantggncccagattgcaccantgcactccatnctgggggacacaacaagactctgnctcaaaataaaancnntngtgancatntatcactacaanaacctggnncccccnggngnnntnccatatccccttnnacaaaactgtttncncccccnatgtnnnccgaatttnctnttaaacncaaggccnactggaggccaaggtca

SEQ ID NO: 18640 - DNA, 159 bp, Homo sapiens
  misc_feature 22, 35, 36, 48, 50, 53, 93, 96, 100, 103, 105, 135, 142, 143: n = A,T,C or G
tgacaggtcaagaccctgtctnaaaaaataaaatnnagtaaaataatntnacntaatactccttataccattaccatggcaactatgggatgnctnagangtntngaaaagcataaccatacttatattttcagnttacatnntgatatagaaaaattc

SEQ ID NO: 18641 - DNA, 448 bp, Homo sapiens
  misc_feature 227, 420: n = A,T,C or G
agtacttctagaattaattaaggcgggaggtaggggagtggaggaactctacagtggagaaaactgataaacattatttcaactggatgatcaaggtcagtatcactagttacaaatcaggttgatagtaggtacccttgttatgacatcatgaaattgacactttacctctgtgatttacctcccgcaaatacatgactccagtctaatcatgatgaaaacatcanataagtcgcaatagggcagcatcctacaatatatgtgaggagtactcctaaaacatttcaaggtcatcaaaaacaaggaaaaactgagaaactgtcacagccaagaggtgcccatggaattatgacaactaaatgcaatgtggtatcctgtatggaatcctggaacagaaaaaggacacttggtgaaattaanaagatctgagtaactatggactttggtt

SEQ ID NO: 18642 - DNA, 446 bp, Homo sapiens
  misc_feature 28, 29, 30, 32, 34, 37, 41, 43, 45, 50, 52, 53, 54, 56, 57,58, 63, 66, 68, 70, 72, 74, 79, 80, 83, 86, 91, 93, 94,99, 101, 102, 103, 104, 105, 116, 136, 162, 163, 170, 171,172, 176, 179, 184, 185, 190, 191, 192, 193, 196, 197, 200: n = A,T,C or G
  misc_feature 201, 205, 207, 209, 211, 213, 214, 216, 218, 220, 225, 230,266, 267, 272, 273, 274, 276, 283, 321, 430: n = A,T,C or G
agtacttctagaattaattaaggcgggnnncngnttncttnangngctcncnnnannngttcnttngntnantnacctnntanccntcganannttttntnnnnngggaacttgtnggctatcaaaagcatttatngtcctgacctaagaaccttatttttnntacattnnncttntanttccnnctatnnnnatnntcnntgcncnangngnntntnantattnttccntatatacgactctttttggtaataacaaacgtgttnnttccnnnancctggtntttctcaatacgcctttaaaggtttttaaattgccccntatctggtcaagttgaaatttttaagaacttcatttttaatttgtaataaaagtttacaacttgattttttcaaaaaagtcaacaaactgcaagcacctgttaataaangtcttaaataattgtc

SEQ ID NO: 18643 - DNA, 389 bp, Homo sapiens
  misc_feature 196, 200, 203, 205, 206, 207, 220, 223, 227, 230, 237, 238,242, 243, 245, 247, 248, 251, 252, 253, 254, 266, 268, 278,282, 283, 285, 286, 291, 295, 302, 310, 314, 328, 330, 343,344, 345, 355, 381: n = A,T,C or G
agtacttctagaattaattaaggcggggtgtggcagcgcacgcctgtaatcccagctactggggaggctaattgcttgaacaggagaattgcttgaacccgggaggtggaggttgcagtgagccgagattgtgccactgcattccagcctgggtaacagagcgagacttcatctcaaaaaaaaaaaaaaaaaaaanaaanaancnnncccccccccgggngancccncantcccccnntaannangnnttnnnncccccccccccngncccttttttnaaanngnntgttnaatntgattcngactattnccangcaagaaatccaantntgaaaatatcaannngaaaactganatgaaaaaaagaattcaaacttgganaaaacacc

SEQ ID NO: 18644 - DNA, 487 bp, Homo sapiens
  misc_feature 37, 39, 40, 44, 62, 64, 65, 76, 79, 87, 107, 109, 116, 125,134, 169, 189, 191, 199, 214, 220, 221, 228, 231, 234, 238,240, 241, 252, 254, 256, 288, 375, 422, 437: n = A,T,C or G
agtacttctagaattaattaaggcgggaggattgatngnncccnagatgtcgaccctgctgngnnccttgattgtnccnctgctctnctacctgggcaccaaagccnanactctcnagctaaagngggtggtcnagctccgagtctagagagatacgcatgaggctggnttttaagactgaccgaaagnanctacaggncgaatgcaggcaacntctggnncacggantanacnctancnnacattctcccntngngcctccagaaggaaccagccctacctacccanattttagcccaggcagatcatgttaggcttctaatcaacagaactattaaacaataaatctaaggttatggtggttaattacagcancgctggaaaaccaacacgggcagcactgacacaagtcccagcacttnttcaacgcccaaganctgttctctgtctcccttccacacccttcatttgccttcacttattcccc

SEQ ID NO: 18645 - DNA, 445 bp, Homo sapiens
  misc_feature 240: n = A,T,C or G
agtacttctagaattaattaaggcggggggtgcagtggctcatacctttaatcccagcactttgggaggccaaggtgggcggatcacctgaggtcaggagtttgagaccagcctggccaacatggttaaaacctcgtctctactaaaaatacaaaagttagccgggtctggtggcgtgcacctgtaatcccagctactcaggaggctgaggcaggagaatcgcttaaacccgagaggcanaggttgcagtgagctgagattgtgccactgcactccacctgggcgacaaagcaagactttgtctcaaaacaaacaaacaaaaaacccacatacacactataaagatgggtgggattacaggaaggcagatgcagaccctgaagcctgcgatggagctgattttgtatttccagcattaacaagttcctctcatgttcttccattt

SEQ ID NO: 18646 - DNA, 344 bp, Homo sapiens
  misc_feature 322: n = A,T,C or G
agtacttctagaattaattaaacttgtcccgaatcctcctataacttgggtaattttaggcaatatagtctcccctcagtgttcatgagagattggctccaggacacccctcataccaaaatccttggatactcaaatcccttatataaaataagtgtattatttgcatataacttatgtaccttctcctgtatactttaaatcatctctagattacttataatattaatggtaaaaccacaattacttctgcaccaacctaataatacaatgtaaatgctatgtaaatagctgttaaactgtattgcttcttaaagtttgnattatttaattgtatatatata

SEQ ID NO: 18647 - DNA, 356 bp, Homo sapiens
  misc_feature 10, 14, 29, 44, 45, 62, 64, 72, 77, 118: n = A,T,C or G
tggccgtcgntttncacacaggaaacagntatgaccttgatgcnngggccgcggtttcattntntgcagagntccanactgataaatgctttatttcattacaattctgcatataaantagcaaagaaaattctgtatgccaaaaaaatcctttgttgtttaacaaatgttcattagacataattatttcccagcctcatgcccctgatcatattctgtctttctctgccctgctctgtgctccgtcccctagggactacatcatccagactcaggctctttggctgaacattttattcatccaacgggaggtatcagaaaggaggtcagagggcagaaccaagtggttggggata

SEQ ID NO: 18648 - DNA, 317 bp, Homo sapiens
  misc_feature 120, 121, 123, 124, 130, 140, 141, 145, 151, 160, 162, 167,174, 175, 176, 177, 178, 180, 183, 188, 190, 191, 207, 211,214, 221, 237, 246, 251: n = A,T,C or G
agtacttctagaattaattaaggcgggatgggacagggcacgggctctcagaaaataaactgctttattggaaaaaaaaaaaaaaaaaaaaaaaaaaaaaaaaaaaaaaaaaataaaaannanngaaaanggatagtacnncccnggggcncttacatgngnccccncacactnnnnntntgngattnannttcccccaaatacatnactncantttaatnatgatgaaaacatcanataagtcgnaatanggcatcatcctcaatatatgtgaggagtactcctaaaacattttaaggtcatcaaaaacaaggaaa

SEQ ID NO: 18649 - DNA, 402 bp, Homo sapiens
agtacttctagaattaattaaggcgggagggtcagtaaagaaaaaagccaaaaatgatagtcagggtttgggcttgaactactcaaatggttaaacaaaaatgtttggtattttgcaggttttttgtttttgtttttgaaaggacaggtgaatttattaggagtgtattaggagtttattactttatggtaaagacagacacaaatcagtttggacaagttgaatttgaggtgttttgggggaatcaagacagcaataggtgctagaaataaggacaatgaaaatacacagagcaatgtgttctagagccatgaacctgggacttacgatcacattacaaggaaatgggtaagttcagccaaaaggggacccaggaagaacatatacaggtaggcaagaaac

SEQ ID NO: 18650 - DNA, 474 bp, Homo sapiens
  misc_feature 30, 34, 37, 38, 45, 47, 51, 54, 58, 61, 68, 69, 71, 78, 87,89, 91, 97, 98, 100, 103, 106, 111, 115, 118, 119, 126,131, 133, 134, 139, 141, 147, 149, 150, 151, 152, 153, 163,171, 188, 191, 196, 200, 201, 204, 205, 207, 211, 213: n = A,T,C or G
  misc_feature 214, 218, 219, 225, 227, 228, 231, 232, 233, 239, 243, 252,286, 287, 317, 339, 354, 420, 446, 453, 455: n = A,T,C or G
agtacttctagaattaattaaggcggggcngtanganngataggngntcgngcncttnccntctagcnncntgccatnctaagccgntntncatccnncnctnttnactcncctnccnntcgcgangggancnngttcntngacccntnnnnntggtggtacnaatatatngctcaacaccacttatnctncctgnctgnngcnnangatnannccannatattntnnaannnctgacntaanggaaatctntattgatcacgtatggggcacatataattttttnnttgaaaaaaccaagcctcctagatgaagcncaactgtcaagagtcttgtacncacaacttcggcttngcataacccagtcttgtattccaagaaaatggcaagtggttacaatattgaattgggatacgcctnttgatactttctaaataaactctttntttttgnanggtgattaaaataatttga

SEQ ID NO: 18651 - DNA, 303 bp, Homo sapiens
  misc_feature 64, 72, 74, 101, 121, 139, 143, 153, 195, 201, 211, 224,229, 231, 239, 253, 265, 267, 296: n = A,T,C or G
agtacttctagaattaattaaggcgggtgggggtggaataaaatactatttttactgccaaaanaaaaaaananaaaaaaaaaaaaaaaaaaaaaagaaanaaaaaaaaaaaaaaaaaaanaaaaagtctactttaaanctanctgtggcacntgtatattataatgtattatgtgcctctggcgttcacatacntacaanaattatttcnaaacttcattttncggcntnttccatanaacttaatttattnaaaataaacatnantgtattttttaaaattgatttttctcttnatttttt

SEQ ID NO: 18652 - DNA, 437 bp, Homo sapiens
  misc_feature 80, 89, 132, 223, 248, 249, 252, 254, 257, 259, 262, 263,264, 275, 276, 286, 290, 291, 294, 295, 302, 313, 324, 332,333, 335, 336, 339, 346, 351, 352, 354, 358, 386, 413, 417: n = A,T,C or G
agtacttctagaattaattaaggcgggagctaccagcgagggtgtcagggacccgttgggagcatttgggtgggggccantggggttgnagagagctggaactcacctgcttttaatacatgtgacttctantgagacacatgcacccctgacccaaggaacatgcggggaaaagaggagccactggctcctttgcgatgttatttattttctcgctctgcanatgtttattgaacatttctgaaaannaananatncnaannnaaacagctggnncccccccccngggnnaanncaaactnccctatttganaaagtttttcncccccccnntnngcngaagttntaaannancctnctaaaaatgaaaagtttgtttcatatantgagagaacgaaatctctatcggccantcanatgtttctcatccttcttgc

SEQ ID NO: 18653 - DNA, 410 bp, Homo sapiens
  misc_feature 236, 319: n = A,T,C or G
caagtaaatctggaaaatgtttcattattcttttaattctaatatataatccaatattaacattatttaaattctaagtcactggctctcaaactttttggtctcagaacttcttttcactcctcaaaattaagaacccccaaagaggttttgtttatgtaggttatagattgagttcgaatcctgctctgctaccatcatttgacattaaaactgagattgaatgccacatgcanggtttgttaaatttaaaaataaataaatgaggccaggtgcggtggctcatgcctgtaatcctagcactttgggaagtcaaggngggtggatcacctgaggtcaggggtttgagactagccttgccaaaaaaaggtgaaaccctgtctctaccaaaaaaaaaaaaaaaaaaaaaa

SEQ ID NO: 18654 - DNA, 455 bp, Homo sapiens
  misc_feature 30, 42, 61, 76, 79, 99, 122, 140, 180, 256, 260, 271, 310,314, 320, 321, 327, 328, 337, 339, 340, 341, 342, 343, 346,348, 349, 358, 362, 371, 387, 388, 389, 407, 410, 413, 417,435: n = A,T,C or G
agtacttctagaattaattaaggcggggtngactcttccagngagggcagaaccaagctgncaggatgggaggacngtntacctgctgctcagagcccncaaggctctactctgacagccancaagcaggacagaacacnctcttgtcccagtgtccctccggctgagcggccgtagtcnccaatgagaatagtgctcacagcccatgcatgggtgtgtggctcctggatgggctcgtggggctgggatgggacanggcncgggctctcanaaaataaactgctttattgacaactggaatgggaaactnattnaaatgnncatggnnccccccccngnnnnnctngnnatcttgccnaaangaccgggcnctttttttcccctttnnnggcttagtttttaaaaanaantgnacanggacagggcgtgtatgtntctgccttatttatttattt

SEQ ID NO: 18655 - DNA, 570 bp, Homo sapiens
  misc_feature 288, 376, 465, 469, 474, 498, 503, 512, 513, 515, 517, 521,532, 535, 536, 540, 541, 542, 545, 546, 547: n = A,T,C or G
agtacttctagaattaattaaggcgggagggggaggggagtggtcggaggaggggataagagggaacaacgggaaggaggggaaggaggaagggcagaagggattaataacaaaatagtgctaccaaaaggagaaataaagtttagcatgctagttacaaagacatgatgatgttcatgaggtagtaaaaatattatctgtgtatttaaaaaaaaataaaggaagcagctgtgtaaatattttaactttttccccccaaaaaatgtttatatgctgttctgaggatanaaataatccaagctggggcaatgtgttaaccccctataaaacacacacacacatatacacaggcacacacaaaatgaagtgccttgantctcttcatccttcccctttttgattcgaaacatttcctcccaactttggctgcaagacacaaatcctgaaaagtggagggtcatcaanaatntctgncactctcccaacttggggttttgnagggnaaaaaaaannangntgtntacttacccgngcnncaannnttnnnaaaaaaaagaaaaaaaagaaaaa

SEQ ID NO: 18656 - DNA, 646 bp, Homo sapiens
  misc_feature 34, 37, 39, 40, 65, 66, 187, 192, 193, 194, 195, 196, 197,198, 199, 200, 201, 202, 203, 204, 205, 206, 207, 208, 209,210, 211, 212, 213, 214, 215, 216, 217, 218, 219, 220, 221,222, 223, 224, 225, 226, 227, 228, 229, 230, 231, 232: n = A,T,C or G
  misc_feature 233, 234, 235, 236, 237, 238, 239, 240, 241, 242, 243, 244,245, 254, 278, 304, 323, 341, 359, 364, 381, 387, 389, 393,398, 399, 416, 419, 426, 444, 456, 478, 487, 488, 501, 518,550, 559, 561, 590, 593, 598, 642: n = A,T,C or G
agtacttctagaattaattaaggcgggcgcctgnagnannagctactcgggaggctgaggctttnnttaatggcgtgaacccgggaagcggagcttgcagtgagccgagattgcgccactgcagtccgcagtccggcctgggtgacagagcgagactcccaaaaaaaaaaaaaaaaaaaaaaaaaanaaaannnnnnnnnnnnnnnnnnnnnnnnnnnnnnnnnnnnnnnnnnnnnnnnnnnnnngcgccgctnactgggccgtcgttttttacaacngttcgttgacttgggggaaaaccccntggggcgtttaccccaaanttaaatcgcctttgcagncacatcccccttttcgtnccagnttggccgttaataagcngaaaananggcnccccnncccgaatatgccctttnccnaacaagntttgctgccaagcccttngaaattgggccnaaaattggggaaaaatttggtnaaagcccgnnttaaaataatttntttggtttaaaaaaaanttcggccgtttttaaaaatttttttttggttnaaaaattcnangctcttccatttttttttttaaaccccanaantatgnggccccgtaaaaatttcgggggcaaaaaaaatcccccttttttnaaaa

SEQ ID NO: 18657 - DNA, 428 bp, Homo sapiens
agtacttctagaattaattaaggcggggacaaacccggaagcggatcgcgtggagtgaaggtcacgccgcggcgcgtgagtttccctttgtgtaaattaatctgcgcttcccaactcccccgcgcttctgtacccgggatctgaggggccacacagaccttgaaatcctcgcaccgctccctctaccccgaccaaattcaggcgtctccgtgagagtcaggcggtcgcttccctgtgtgtttaaatcgctcggcggcgggtcctgtcccccgtccttctgccacagggccatgtagtcacctcctgtcgcggagttttcctgtttcaagtccttcagtgatgcttacatccgccccgcacagcgtaaagtcctcccccgctaggcggattccggtctatgcggtcccccaagcctcgcctttgttggc

SEQ ID NO: 18658 - DNA, 174 bp, Homo sapiens
  misc_feature 33, 56, 62, 75, 82, 84, 92, 116, 124, 148, 174: n = A,T,C or G
agtacttctagaattaattaaggggggaggttntgaaaaaaaggtacagaattganctgatncctgaatgacacnaatctancnggaagaantgagggatacactgttgtgaacanaggtgtanaatacacggatatggttgaatatnagaaggctggagaaagactgggggcn

SEQ ID NO: 18659 - DNA, 411 bp, Homo sapiens
  misc_feature 28, 33, 39, 45, 46, 47, 52, 54, 55, 58, 60, 61, 65, 69, 70,71, 78, 79, 83, 88, 99, 112, 120, 130, 131, 132, 134, 135,190, 191, 192, 196, 197, 207, 236, 239, 290, 292, 336, 339,388, 390, 395: n = A,T,C or G
agtacttctagaattaattaaggcgggntggantggatncacctnnnataangnnttntnngagntatnnngttaaannaaanattgnttttcttgcanaaaaccaaggtcntaccactngccctttgtnnntnnactgactctcacgctgtctcttattcctaaaaaatcctgtttatataaaaaatcnnnccannaaaaaaattncaaaatgtttttgtatattctgttgtaanaanccattcctgttattgcgatatactctggattctttacataatggaaaaaananactgtctattttgaatggctgaagctaaggcaacgttagtttcnctnactctgcttttttctagtaaagtactacatggtttaagttaaataaaananttctntatgcaaaaaaaaaaa

SEQ ID NO: 18660 - DNA, 755 bp, Homo sapiens
  misc_feature 175, 181, 185, 186, 189, 191, 194, 196, 197, 198, 203, 204,205, 206, 210, 211, 212, 215, 216, 218, 219, 221, 222, 230,231, 233, 236, 239, 241, 243, 244, 247, 248, 250, 253, 254,257, 263, 267, 268, 271, 277, 281, 288, 291, 294, 298: n = A,T,C or G
  misc_feature 299, 300, 304, 323, 333, 342, 343, 350, 351, 363, 364, 365,368, 371, 373, 380, 387, 394, 397, 398, 415, 428, 430, 474,484, 492, 493, 507, 517, 521, 524, 531, 532, 539, 541, 542,549, 550, 551, 552, 558, 602, 611, 612, 617, 630, 666: n = A,T,C or G
  misc_feature 667, 677, 680, 683, 697, 699, 700, 703, 704, 705, 706, 715,716, 732, 733, 738, 739, 740, 742, 743, 744, 749: n = A,T,C or G
agtacttctagaattaattaaggcgggcacctgtaatcctagctacttgggaggctgagggagaagaattgcttgaacccaggaggcagacattgcagtgagcagagatcgcaccactgcactccagcctgggagacatgtgagactccatctcaaaaaaaaaaaaaaaaaaaantttccnttannggncnggncnnnggggnnnncccnnnaanncnnannttttgggnngnccnggncngnnganncnttnnaanccgggntttnnaancccccngggnaaaaaanggnaancccnnncccnttttttttaaaaaaaaaanggaaaaaaantttcccccnnaaaaaanngggggggggccnnnttnttngnggaaaanctttttnttaaaanttnntttggaaaacccggggngggaaaaaggggngnggcccttttaaaaaggggggggaaaaaaaaaaatttgggggggntttttaaagngaaaaaanngaaattttttttgnaaaaaagggngggnaanttttttnngggggananngcttttnnnngggggntggggcccccaaaattccccggggggaatttttcccccccccgnggggggaannaaaantttttttttaaanaaaaatttttttttttaaaattttttaaaaaaaagnntttttaaaanttnttnccccccgggggggngnnttnnnnaaaaaaaanntttttttttttttttnnaaaannnannnggggntttttt

SEQ ID NO: 18661 - DNA, 453 bp, Homo sapiens
  misc_feature 28, 39, 40, 42, 46, 49, 63, 73, 87, 89, 97, 99, 101, 110,113, 114, 115, 116, 131, 133, 173, 208, 213, 216, 218, 224,232, 240, 251, 272, 273, 274, 280, 282, 285, 286, 287, 293,303, 313, 331, 340, 351, 352, 355, 356, 358, 372, 377: n = A,T,C or G
  misc_feature 412: n = A,T,C or G
agtacttctagaattaattaaggcgggnggattagctgnntntaangantttaccaagagttnaagaccagcntgactaacatggtnanaccctgtntntnttaaaaatncannnnattaactgggtgcantngcgcgcacctgtaatcccagctactcaggagactgaggcnggaaaatctcttgaacccaggaggtggaggttgcngtganccnanattgcnccactgcnctcctagnctgggcaacanagccagacttcatctcagatnnntaaaangnatnnnaaatancttaccgggncccccccttnggggggaacctcttcccnattggcttngagtggttgcnnccnncnaggagacctactancttcnttactttcagattagtcaagatgaagatgaatcanagtcggaggactaggcaaaggctccccttacagggctttgc

SEQ ID NO: 18662 - DNA, 243 bp, Homo sapiens
  misc_feature 4, 39, 43, 48, 58, 62, 76, 77, 84, 85, 92, 94, 99, 100, 128,135, 171, 188, 195, 207, 221, 228, 231, 233: n = A,T,C or G
agtncttctagaattaattaaggcgggggtctagttctncatntgctnaaagatcttnttcnttcaattttcgtanncgccctnntgctgancnatganntaccactctaccatgttctgggttgacntatatcnggaccgttgatatctctgaagtgaagatggatgcanaattccgacatgactcnggatatnaagttcatcatnaaaaattggtgttntttgcanaanangtgggttcaa

SEQ ID NO: 18663 - DNA, 429 bp, Homo sapiens
  misc_feature 30, 34, 37, 38, 39, 41, 48, 66, 89, 93, 97, 98, 107, 109,111, 118, 126, 131, 136, 140, 148, 158, 160, 163, 169, 176,177, 190, 191, 196, 197, 198, 206, 207, 209, 210, 222, 229,230, 231, 232, 233, 234, 235, 240, 296, 351, 359, 364: n = A,T,C or G
  misc_feature 371, 389, 390, 394, 403, 415: n = A,T,C or G
agtacttctagaattaattaaggcgggccntggnccnnntngtggagntggagcctgcgccattgngcttgctgcacttcccctgagantacnagannaccacgggngngngcttgcnctaatggngcagntgatncaangaccctgnggctgctacnangtncgcatnacaatgnnacggactgagccnngcttnnnctggggcnncnnacagagtgcatntgttggnnnnnnntatanttctatttatcccttgggacaaattgaattatgtaacatgcccatagaagggggcnaaataaatgtttgctccctcccttaactatagctaataaacaggatagaattttntgcagacnttcanaacttancatactaattatctatannaatngagaataangtgaaaaaagcngaagacaattatat

SEQ ID NO: 18664 - DNA, 178 bp, Homo sapiens
  misc_feature 37, 42, 48, 64, 69, 81, 85, 91, 112, 113, 127: n = A,T,C or G
agtacttctagaattaattaaggcgggagctctgaanctaanatgggncaactgagttgcttancattngggctgaaatgnccanaccttnatatttctacctagatgggtnnctggatatgggctntattcaaaaatatatgatactgggcaaagtgtcagtgcctgaaaggactga

SEQ ID NO: 18665 - DNA, 433 bp, Homo sapiens
  misc_feature 29, 69, 114, 124, 163, 177, 189, 231, 232, 234, 235, 236,240, 246, 248, 252, 259, 269, 277, 308, 311, 322, 324, 333,340, 341, 342, 347, 356, 366, 388, 396, 399, 402, 405: n = A,T,C or G
agtacttctagaattaattaaggcgggcngatcacaaggtcaggagatcgagaccattctggctaacanggtgaaaccccgtctctattgaaaatacaaaaaattagccgggcntggtggcggncgcctgtagtcccagctactcgggaggctgaggcagganaatggcttgaaccntggaggcagagnttgcagtgagccaagatcgcgcccctgcactccagcctgggnnannnaacnagaatntntctnaaaaaanaaaaaaaaanatttcccntggtttttacccaacggtgatttgaacccancantattagttcgncnccccgcttngggtgtnnntcaanatcctgaancaaaaatccnccaccccactgggcacggtggnttaaaccntgnatnccnacacttttgaaaggccaaggcggccgga

SEQ ID NO: 18666 - DNA, 320 bp, Homo sapiens
  misc_feature 299, 300, 302, 303, 304, 305, 306, 307, 314: n = A,T,C or G
agtacttctagaattaattaagccggggcaacagagtaagaccttgtctcaaaaagatatatatatatatatttaatttaaaaactggctcatccaggaaacacattgaagggctgatcacccagtgttgtgagccctctcagaagtcataaacctctggagagagaaactgagacatgtaagagggtggaaaccattcagtggtggcacattgtggagtcctgcccacaagcagcacgtgatgatccaccacacagaaactctaagccacagctcagtttctccttttaagaaaaaannannnnnnaacaaanaaaaaa

SEQ ID NO: 18667 - DNA, 483 bp, Homo sapiens
  misc_feature 25, 189, 207, 232, 244, 261, 273, 280, 289, 295, 300, 322,337, 338, 345, 350, 355, 356, 371, 372, 376, 387, 389, 399,405, 408, 414, 415, 418, 419, 434, 436, 459: n = A,T,C or G
agtacttctagaattaattaaaatnttaacaggattaaaaagtgatccattaccattccttcactgctatgtgcaaggatcatcttctttgtctaattcaccttcacagggacacagtgtagtggttaagtgtataggctctggaatcagactgccagttcatagccaaggcattatcaagttatggcntgaccttgggccaataangtacaccccccttgtgactcaagtntcaatctggtanacataaaggggcttacnctattgtcctcnaacagangttttggcntgctgnagggnatctaaaaattggaaatataanagccccctttttatnntaccatntttgncctcnnattttaacatccaannttantaggttgcctncnacatttaaantttttnttntgatannganngcccacaaaaaaaantnaatggaaaaccaagttttgaaanttctttttcccttggaaaaactta

SEQ ID NO: 18668 - DNA, 424 bp, Homo sapiens
  misc_feature 21, 138, 140, 147, 149, 150, 154, 156, 157, 159, 163, 167,174, 175, 188, 190, 191, 194, 195, 197, 200, 213, 218, 219,220, 222, 226, 227, 228, 233, 255, 271, 273, 276, 285, 291,294, 310, 313, 315, 330, 343, 349, 351, 358, 359, 364: n = A,T,C or G
  misc_feature 370, 375, 383, 384, 388, 389, 391, 396: n = A,T,C or G
agtacttctagaattaattantgcgggagaatcggttaaacccgggagttgaaggccgcactgaattgtgttcttgccactgcattccagccagggtgacagggaggctgtcttaaaaaaaaaaaaaaaagggccggncncgggggntnncccntnnantccnaccnttttggnnggccaaagggggngnnttnnanggnaccgcaaattatnccttnnngnttannncagtnaaccccttttttttttaaaaantccaaaaatttacccngnttngggggcttncccctnaantcccatctaatctggnggntnaggcagggaaaatcntttgttcccaaanggcccngnttgcagnnaaatnttcccnccccnttttaccnngggnnanaaggnaaaattttttaaaaaaaaaaaaaaaaaa

SEQ ID NO: 18669 - DNA, 426 bp, Homo sapiens
  misc_feature 43, 44, 46, 51, 54, 63, 73, 74, 79, 91, 93, 115, 116, 121,150, 156, 157, 168, 175, 181, 184, 186, 190, 193, 200, 202,205, 208, 213, 231, 239, 240, 252, 253, 254, 261, 302, 309,358, 366, 374: n = A,T,C or G
ctcgagagtacttctagaattaattaaggcgggatgaaaggtnntnccatnacnggacccttnccggaggagnntgcanacttgtggcccngnattgtatacaatgctggcatgnnttgcntgattctccagtatatttgtgaaagatanaaaaanncttgcccatantactganaaactnaantngtanacnctggccncnccncgnggganggccatttcaacacatgngggggggnnacattgatgccnnnattgccnttttttttaaaaagctgtgcaatgctggtgtcaaagactanacagtcnctattcataatggctgttgcaattccttcatgaatagatcgaggagtcncttcccantcaatcgncgcctatgaccatttagctcaagtcggtaagcaaaattttcagcttgcttgc

SEQ ID NO: 18670 - DNA, 287 bp, Homo sapiens
  misc_feature 277, 281, 282, 283, 284: n = A,T,C or G
agtacttctagaattaattaaggcggggcacagaattggaagatgctggaagtacaacacatgggccttcagcttttgcacaggagtttcacagagacttctcgacagcctattactacccaagacaagttcttctagggctggtccacctcctcaaccccctgacattatcccctaacccctgtctttagatttacagtccaatgcttcactcagccattttacctcacccccaataaaaaaaaaaaaaaaaaaaaaaaaaaaaaaaaaaaaaaanaaannnnaaa

SEQ ID NO: 18671 - DNA, 588 bp, Homo sapiens
  misc_feature 271, 304: n = A,T,C or G
agtacttctagaattaattaaggcgggatcaatagtgatgttttaggatcagttctcctatggtaatttcactaaatgcctatttaatgaattgatttgatttcatacatctctaccacttactagaactgtctttgtacaaacgtcaaactttcctgttacatatgggtaagcgtagaagcacttgatataatttttttttatcttggttcatagtgtagaagtggtctgttgcttttcctaaaattgctatacatattttttctttaanagtgatcatttcaggtaccctattatgtacagnggtaaaaagtaaactcgttatgatagcaacgacgatgtaaccaaaataagcaacacttaattggtctgaaagttatacatataagctttattattgcttcagtggaagttgtctatgcattctgtgctttgttcagccattaaacaactgggtccgtgatcttcttcaaggggccgtgaagtccctaaaattgtatttaaacattagagtggctgcattttaagggagatagtcatagtcaaatatccaaaatggacctgtggcctaatagaaaattaagaacc

SEQ ID NO: 18672 - DNA, 461 bp, Homo sapiens
agtacttctagaattaattaaggcgggctctttcccgtgatgttctcgtgatactaagtttcatgagatctgatggttttataagggggagttcccttatacaagctctcttgactgctgccatccatgtacaatgtgactttgctcctccttgcctcctaccatgattgtggggcctccccagccatgtggaatgtaagtcaattaaatctctttcctttctaaattacccagtctcggatatgtctttatcagtagcgtgaaaacaaactaatacaaggagtcattatattagtggtgatataaattggtataactactttgggaagcaatttggcagtaactagtcaggttgaagactggccagccctataactcagcaatcacactcctagatacataggctatgcacatccatgtctatgagcaataagagtgttcacatttgtgtggcagtgttt

SEQ ID NO: 18673 - DNA, 265 bp, Homo sapiens
  misc_feature 57, 101, 117, 148, 176, 179, 182, 222, 234, 244, 254: n = A,T,C or G
agtacttctagaattaattaaggcgggaggcgttgctgattctcgattaaacaatantgacaagacgcgtgcggggcgcctgcgagccccttcctgccacnccggggcctccaccgnctggtcctgagcctgaccgggccattcccanatttgggacgcggaaggagaggctctcngancanaagaggccagataccctgaagcataaagtttacgtcaaangtttacatgganaaggcggttncgttctgaancgtggtctgct

SEQ ID NO: 18674 - DNA, 364 bp, Homo sapiens
agtacttctagaattaattaaggcggggtgaggtaaatattctataattgattgccacattggttacacaactctttgagtatatttaaaaaacactgatatttagaatactttaaatgaatgaattatgtgatttgtgaattatatcataatttagctgtttaaaaaattctaattactagaaccagaaatcaaagtcatgtttaacaactcactattatgaggccttgattttgaaagctaccaattttagaattgaatctactctgaaactgttcagagtagattctacttgtttgattaatacttgttgcatctccttcggcatgaaatgaaacctttaaaattcagttgtaaaataaaa

SEQ ID NO: 18675 - DNA, 603 bp, Homo sapiens
  misc_feature 26, 31, 33, 37, 39, 40, 42, 46, 47, 59, 60, 64, 68, 70, 74,75, 77, 78, 79, 81, 84, 85, 86, 88, 89, 107, 122, 123, 126,153, 160, 171, 174, 175, 177, 186, 194, 197, 356, 370, 397,416, 443, 444, 447, 457, 463, 476, 489, 508, 530, 567: n = A,T,C or G
  misc_feature 576, 582, 583, 585: n = A,T,C or G
agtacttctagaattaattaaggcgnggggnanagananncntttnnctgaccctgccnncccnattntncgcnntnnncngcnnngnntgcatccggtgctgtctnttttgcttgattttnnatngtatttagactcactcactgcaacttntgctcanccggcttctgnatnngnatcacacanccatcagnccngactgcccagttggtgagcacactccattgaccacgtggcgccagcgcttcctcaatgcacatgattgagaggaaagaaagttctcttagatgttactgcttttgctcagactttgcaaaaaaaaaatatatatatatatatgtataaatatataattnttaatcacttttgnccttgaaaaagtcttgaatgaacaaanaatttattccattgcaatntttgatttgtataaaggcccctgtttnntcnccagaaaaancaaaanggctttgggtaantttttggactatntacccccttctgttatttnttttaaagctgaagttatttcntggttcttaaaacccatattattttttaaatgggggngggattttnaaaaanntnttttttttgaaattcttt

SEQ ID NO: 18676 - DNA, 465 bp, Homo sapiens
  misc_feature 226, 419, 429: n = A,T,C or G
agtacttctagaattaattaaggcgggaaagctgcggcacagcccgctttaaacgcaagcttttgggacttctggttttggctttttctttttaagccaagttagggagaaggctgactgccatggagccacttctgcttttggcccagacaatttacgggattttttttttcctcccatttagagattttttgtaggaagttaacaaattattttaaagaagtangttagagcttgtcagataaaatacaggacgcccagttaaattggaatttcagataaccagtgttttggcatatgtgtgttacatatattatttaaaatttgtttatctgatattccaattttaaactgcacattctcaaatttttaatggactgtatcttggcaaccctatcagccctttacccctgaaaatncaaaacctgnttatgacaaaaagtaaaggaaatgggaggggaaaat

SEQ ID NO: 18677 - DNA, 528 bp, Homo sapiens
  misc_feature 128, 138, 143, 146, 150, 152, 158, 159, 165, 169, 172, 174,178, 179, 182, 183, 184, 187, 190, 194, 197, 201, 204, 208,209, 210, 211, 221, 228, 229, 231, 232, 235, 237, 239, 240,244, 251, 252, 254, 257, 260, 263, 278, 279, 280, 284: n = A,T,C or G
  misc_feature 289, 292, 295, 310, 313, 314, 316, 318, 326, 338, 341, 346,350, 363, 374, 375, 378, 380, 395, 399, 402, 403, 410, 411,414, 416, 420, 428, 433, 434, 435, 440, 443, 456, 461, 483,488, 489, 495, 496, 502, 504, 521: n = A,T,C or G
agtacttctagaattaattaaggcgggcggatcacgaggtcaggagatcgagaccgtcctggctaacacagtgaaaccctgtctctactaaaaatacaaaaaaaaaaaaaaaaaatttccccaaattngggggcgggnccctnttncccnantttttnngggggntaanccngnaaannggnnnaanccngggnggnaaanttngcannnncccaaaatcnccccctnncnntcnancnngggnaaaaaannanaanttnttntcaaccaaaaaccannnaaanaaaantanccncccccccttttaaanggnntntnaaaaaaanttgggggggggnggnatttnaaantcttttaaaaaantttttttttgnnaangncaatttttccccccngaanttnncagggannctncnggantttggccncaaannnaaccnccntaattttaaaaancaaangttttttggggcttaaaaaaanaaaanngccctnntttaancnggggttttccaaccccnaattttt

SEQ ID NO: 18678 - DNA, 404 bp, Homo sapiens
  misc_feature 172, 315, 322, 331, 332, 338, 350, 378, 382: n = A,T,C or G
agtacttctagaattaattaaggcgggagccaggttaagaactctgaggatttctgcattctagaaagtcagcattcatttcttggtcaaatcttgcttttcttctgagagggctcactttggagtttatttgtgcggatttatgttttgggggtgtccagagttagtgaantaacccaaaagctgctgcctttgatgtggatgtaaaacattctattgggtgatatgaaatcggtcttttattgagactgggcctttgctaatttacagaaagatttttcaataaataaagaaataaaggctgcactttctttnttatttntttttaatnnttattnatttatttattncgagatggagtctcaaaataaataaatnagtnaaaaaaaaaaaaaaaaaaaaaa

SEQ ID NO: 18679 - DNA, 273 bp, Homo sapiens
agtacttctagaattaattaaggcgggaagttgagaaccgctgtgggcacctcaggactgagtctggttaccctgctgatccaagaaatgaagccatctaaaattttgcctgctttcacaattttctgtgtgtgtgtgtgtttattaaacaaagtgaactaagaagccttttattggagacataatgtactcacagtagtttcaaaatcaatggtgtcactcttcaggtaaattactccaaggcttgggcctagtgcagatgttcattggggc

SEQ ID NO: 18680 - DNA, 239 bp, Homo sapiens
  misc_feature 63, 73, 99, 123, 166, 168, 190, 193, 228: n = A,T,C or G
ggtaccggccccccctcgagagtacttctagaattaattaaggcgggggatggaactccgatngaaagcaatngctggagtggagcacgaatttcaacnagccgcatgttgaactgtgaggcngtgaaagggtatgtctgatatttgctttaaaatgctccagcananaaattaagggatggatgaagcnaangaaccaggtatggtggctcatgcctctaatctcancactttgggag

SEQ ID NO: 18681 - DNA, 441 bp, Homo sapiens
agtacttctagaattaattaaggcgggacaataaaataaaagacatcaagaatgaaaaagaaataaactgtctctcttcccatataacatgatcttgtataaagaaaatcctaaggaatccactaaactattagaactccaataggttcagtaaggttgcagaatacaagatcaatatacaaaaattgtatttctatatacttgcaaaaaatccaaaatttaagaaaactgttccatatatgatagtatgtgatacagtttggatgtttgtcccctccaaatctcatgttgaaatgtaatccctactgttggaggtggggcctggtgagaggtgtttgggtcatggggccagatctctgatgaatggcttgttgctgacctcttgatagtgaatggcttcttgtgagatctggttaagagtgtgtggctcttcctcctctc

SEQ ID NO: 18682 - DNA, 321 bp, Homo sapiens
  misc_feature 114, 121, 128, 134, 148, 170, 179, 188, 190, 199, 205, 237,248, 269, 279, 291: n = A,T,C or G
agtacttctagaattaattaaggcgggaattcaatgggaatcatatcttcagtgtgtttccaaggaacagtagacttttatagacagaaattaaaaatgatattttttcagatnaaatatnaactccnaaaatnccaaattgagcctnccagaagggattaaaatttatngaaatgatnaatatgtcntnattattagngaatgngttccatctaaaataatagtatcttcttgttngactaaagggngtgattgataagatatatgcnaatagtaatnaaagagactggnggttacagaaaataaatttagtttaaggat

SEQ ID NO: 18683 - DNA, 313 bp, Homo sapiens
  misc_feature 61, 86, 141, 167, 233: n = A,T,C or G
agtacttctagaattaattaaggcgggggatggaactccgattgaaagcagttgctggagnggagcacgaatttcaacaagccgcntgttgaactgtgaggcgtgaaagggtatgtctgatatttgctttaaaatgctccngcaaagaaattaagggatggatgaancaaaagagccaggtatggtggctcatgcctctaatctcagcactttgggaggcccgaagcaggcanatcacctgaggtcaggagtttgagaccatcctgaccaacatggtgaaactcgtctctactacaaacataaaaaaattagc

SEQ ID NO: 18684 - DNA, 532 bp, Homo sapiens
  misc_feature 29, 30, 35, 36, 38, 42, 46, 47, 56, 57, 59, 60, 62, 63, 70,75, 76, 79, 88, 89, 91, 95, 101, 103, 105, 106, 109, 114,118, 125, 128, 130, 134, 148, 154, 160, 172, 175, 176, 190,192, 197, 198, 199, 200, 204, 209, 214, 215, 218, 240: n = A,T,C or G
  misc_feature 251, 264, 335, 336, 357: n = A,T,C or G
agtacttctagaattaattaaggcggggnnctatnncnagangggnnggggagcgnntnngnntgtctanttttnntgnccctactcnncncacncacatnantnngcngacanatcngcttccnaancnattnctttagcaggcatnacttgnaacatncctgattctgantanngaatgaattgcttngnctttnnnnaacntaaantgctnnccnaactatactatatctatggagncaagtagtggntgaaaaacctccntgctgcttggatctttggggggaaatacaggatccttcaccactgaggtgtttaagatttgcaactagcanngcaattttttctaaatatggngatatttacctttattaagaaattatactaaacattgatgtccttgatcattttatgttctcatattacttttgattctactatgattgtgtggtggtgaacaaagatcattacaaacaaaaactgtaattttgttatatttgattcaatggaatttacctaaaaaataaagact

SEQ ID NO: 18685 - DNA, 231 bp, Homo sapiens
  misc_feature 28, 34, 36, 37, 93, 100, 131, 139, 143, 144, 150, 155, 157,160, 161, 162, 165, 168, 169, 170, 173, 179, 181, 192, 197,200, 201, 202, 203, 204, 205, 212, 216: n = A,T,C or G
agtacttctagaattaattaaggcgggngagcangnngactggagtttctcttgagggcaataaaagttgtcatggtgtgtaaaaaaaaaaanaaaaaanaaaaaaaaaaaaaaaaaaaaaaaaaaaaaanaaaaaaanaacnncccccnccccngnggnnnacnctnnnccncccttntnaaaagtatganccccnccnnnnnngaccctntttnaaacaaaaagctaag

SEQ ID NO: 18686 - DNA, 764 bp, Homo sapiens
  misc_feature 1, 3, 190, 242, 304, 333, 382, 387, 405, 429, 430, 449, 459,510, 516, 528, 531, 539, 545, 548, 555, 563, 587, 592, 599,601, 638, 640, 652, 658, 667, 682, 684, 686, 689, 700, 705,708, 714, 718, 732, 733, 736, 739, 755: n = A,T,C or G
nanagggccagaccctgtctcaaaaagtaataaaataaaatgggatagtatttgcatataacatagcactattcttctatatactttaaatcatctctaggttactcataatacttaatacaatatgaatgctatataaatagttgtcatacttattttttatttgtattatttgttatagttgtattgntatttttatgttttatttttcaaatatttctgatccttgatggggctcaatntcaggatatggaacctgctgataaagggggactggctgtattttatgtgcatcttattcaanacaccccctaaccataactcccaaagaanggcctggaggacactctttttcttttaaaagtccttggtaaacagaaanccatncagccttttttaaaagancttgatgccagcccacttatagannggctggtcccttttggcanaactgggaanatgaatgggtgaaaaaggaccttggccaaaaggaaattaaggcccccttgnaccttnatttggggaaantanttggaaanaaaacnaanggcaaanaattgccnaactggtttttaaaaccaaggttngggcncaaattnantgtaattaaaaaaattaccaaaaaggatttgaacatnantggtattttttnaaattntgggggatnttgggataaaagggntnanttnaaagcccaaanggttnttnttaaantaanaagccttttaaaanngtnggnttaaaacctttttaanaaaaaaaat

SEQ ID NO: 18687 - DNA, 430 bp, Homo sapiens
  misc_feature 52, 78, 150, 161, 181, 191, 192, 209, 212, 218, 220, 227,255, 273, 275, 278, 281, 286, 288, 293, 295, 296, 300, 305,308, 309, 311, 314, 315, 316, 318, 319, 323, 335, 341, 342,344, 345, 349, 355, 362, 394: n = A,T,C or G
agtacttctagaattaattaaggcggggcggaaggaaacaattgtccatccnaggaaaaacagccaggctttactganaaagggaaccatcatccttagtacaaagtcataatgaacactgactatagtttcatcatgcaaattgccatntaattgcatanaaagtccattggaaaggaanagtgagaggnntagagacctgaggcctnatntgctgncntaggaanctgcagttactccccaaattctttattnaataaaaaggaggtaatnanttngcntcccncnccggngnngtanttctnaanncnatnnngnnattntacaatcccccngttctnntnnagtnaccatngatttangaggaaattcctaaagtctactggcagttcanttgtgaagaacctaactacagtgtaataaatgatgc

SEQ ID NO: 18688 - DNA, 139 bp, Homo sapiens
  misc_feature 19, 37, 40, 61, 89, 114: n = A,T,C or G
agtacttctagaattaatnaaggcgggcaggatagtncanacggtttctatttcctgagcntctgagatgttagtttagggcatcttanagttgattgatggaaaaagcagacnggaactggtgggaggtcaagtgggg

SEQ ID NO: 18689 - DNA, 433 bp, Homo sapiens
  misc_feature 33, 41, 128, 197, 200, 216, 258, 265, 288, 290, 303, 314,323, 329: n = A,T,C or G
agtacttctagaattaattaaggcggggctttntggataanagagtgaagcataggcagtggattctcatgagtagtctcccgtgcttccacattaaggactaaatgttggccagtggctgtgctcangccccgtcttccacatgtggatgctagtgaggcaggggtgctttcttgctgtgtatattcacatttcanagnccctcatagcttccanaggactctgctgtgtgaacctcacatatctctattttatagnttttcanattactttgtaaataattattgnanctttaatctcctnttttatcatgnactgcattnaaccgnactaagtgaaaaggtcatagctgagatcctggttcgggtgttacgcacacgtcttaaatgaaagcatgtggcatgttcatcgtataacacaatatgaatacagg

SEQ ID NO: 18690 - DNA, 394 bp, Homo sapiens
  misc_feature 128, 131, 137, 144, 150, 155, 157, 162, 163, 175, 192, 199,211, 213, 223, 227, 241, 249, 253, 259, 277, 311, 340, 353,368: n = A,T,C or G
agtacttctagaattaattaaggcggggagaggaggctctcaataaataatcgtgtaaccttaaaaaaaaaaaaaaaaaaaaaaaaaaaaaaaaaaaaaaaaaaaaaaaaaaaaaaaaaaaaaaaaanaangcttanggggggntctcgnggagncnccttnnaagcaacattantcgctgttggatcccgncctaaangaaagggtggananattcaaccanttancgtgaaagttgganataaagtncttntcccanaatatggaggcaccaaantaattctagatgacaaggattatttcctatttanagatggtgacattcttggaaagtacgtanactgaaataagtnactatttaaatggcntcaacatgatgctgcccattccctga

SEQ ID NO: 18691 - DNA, 562 bp, Homo sapiens
  misc_feature 128, 141, 143, 145, 150, 152, 158, 159, 162, 172, 174, 178,179, 182, 183, 184, 187, 194, 197, 201, 208, 209, 210, 221,226, 230, 231, 235, 239, 240, 244, 251, 252, 260, 269, 275,277, 278, 292, 295, 302, 303, 314, 316, 326, 331, 332: n = A,T,C or G
  misc_feature 338, 341, 343, 346, 350, 352, 365, 367, 373, 379, 383, 395,397, 399, 401, 402, 407, 426, 427, 434, 454, 466, 475, 481,493, 500, 505, 508, 523, 527, 533, 534, 561: n = A,T,C or G
agtacttctagaattaattaaggcgggcggatcacgaggtcaggagatcgagaccgtcctggctaacacagtgaaaccctgtctctactaaaaatacaaaaaaaaaaaaaaaaaatttccccaaattngggggcggggccntntntcccnantttttnnggnggttaaaccngnaaannggnnnaancccgggnggnaaantttgcannnacccaaaatcnccccnttgnnttcnaccnngggnaaaaaannaaaatttnttttaaaanaaaaancnnaaaaaaaaaattanccnccccccnntttaaatggcntntaaaaaaaanttggnngggggnggnantcnaaantnttttaaaaaattntnttttgncattgnccantttttccccccngnantnnacagnaaactttgggatttgtccnnaaaagtntaaccccaattttaaaaccnaaggtttttggnctaaaaaanaaaaancctatttaactnggttttnaaccntantttttaaaaaaaccncacnttgaanncttgcccccttttccccaaaccctttnc

SEQ ID NO: 18692 - DNA, 490 bp, Homo sapiens
  misc_feature 8, 31, 37, 41, 62, 71, 76, 86, 106, 135, 137, 179, 199, 200,201, 202, 203, 204, 205, 206, 207, 208, 209, 210, 211, 212,213, 214, 215, 216, 217, 218, 219, 220, 221, 222, 223, 224,225, 226, 227, 228, 229, 230, 231, 232, 233, 234: n = A,T,C or G
  misc_feature 235, 236, 237, 238, 239, 240, 241, 242, 243, 244, 245, 246,247, 248, 249, 250, 251, 252, 253, 254, 255, 256, 257, 258,259, 260, 261, 262, 263, 264, 265, 266, 267, 268, 269, 270,271, 272, 273, 274, 275, 276, 277, 278, 279, 280, 281: n = A,T,C or G
  misc_feature 285, 286, 287, 288, 289, 290, 291, 292, 293, 294, 295, 296,297, 298, 299, 300, 301, 302, 303, 304, 305, 306, 307, 308,309, 310, 311, 312, 313, 314, 315, 316, 317, 318, 319, 320,321, 322, 323, 324, 325, 326, 327, 328, 329, 330, 331: n = A,T,C or G
  misc_feature 332, 333, 334, 335, 336, 337, 338, 339, 340, 341, 342, 343,344, 345, 346, 347, 348, 349, 350, 351, 352, 353, 354, 355,356, 357, 358, 359, 360, 361, 362, 363, 364, 365, 366, 367,368, 369, 370, 371, 372, 373, 374, 375, 376, 377, 378: n = A,T,C or G
  misc_feature 379, 380, 381, 382, 383, 384, 385, 386, 387, 388, 389, 390,391, 392, 393, 394, 395, 396, 397, 398, 399, 400, 401, 402,403, 404, 405, 406, 407, 408, 409, 410, 411, 412, 413, 414,415, 416, 417, 418, 419, 420, 421, 429, 430, 447, 452: n = A,T,C or G
  misc_feature 453, 454, 455, 477, 479: n = A,T,C or G
agtacttntagaattaattaaggcggggctngagganaccncagataagtatttttcccttngaaagatanagatnaatacaactncttaaaaaatatagtcaatnggttactaagatattgcttagcgttaagntnttaacgtaattttaatagcttaagattttaagaaaaaaaaanaaaaaaaaaaattaaaaaannnnnnnnnnnnnnnnnnnnnnnnnnnnnnnnnnnnnnnnnnnnnnnnnnnnnnnnnnnnnnnnnnnnnnnnnnnnnnnnnnntctnnnnnnnnnnnnnnnnnnnnnnnnnnnnnnnnnnnnnnnnnnnnnnnnnnnnnnnnnnnnnnnnnnnnnnnnnnnnnnnnnnnnnnnnnnnnnnnnnnnnnnnnnnnnnnnnnnnnnnnnnnnnnnnnnnnnnnnnnattgtaanncgttaatattttgtttnaaatnnnngtaaaaatttttgggtaaaatnanctcattttttt

SEQ ID NO: 18693 - DNA, 531 bp, Homo sapiens
  misc_feature 511: n = A,T,C or G
agtacttctagaattaattaaggcgggaagaatacataccacttgatcactcactggcctcatcatccgggccaggacattcagtaagtcttgtctcttgaggaactgaaaaaaatgagagaagtaagtaaatccaactgcaactcctacttagtataaaaaaaaaggccttgaaggagaatcaaatgcttcatcaaatatactttacgacacatttgccagttagtataaatatcacttttagacctcattttaagtcaaacatgaagggataagatgctgaattggggggctgggaatcacaactggacaaaattaagggaagatatatatcgtacaagaagtttcctacttaccctcagctggataagcatgccctcacagcacactcgaccagaacaccacaggttatagatgtgctcattctcctggttcaactttcctgtgcttgtggcttctttgttagttccatcatcccctaggggtaaaaccacttaatgtgactcaacanaaaatgtcaaggccgggccc

SEQ ID NO: 18694 - DNA, 453 bp, Homo sapiens
  misc_feature 40: n = A,T,C or G
agtacttctagaattaattaaggcgggcagacttcacatntaattcttctactgtcgttacaatttcctacactaatcctaaattccgtggagtttttattacattggttggtggcattagcctgtcaacagctggatgagatagaagttagaaaatggactttttgaggtcaggaagctaagcaaccagaagaaccaatttgtcaacttaaatcatctggggaatggaaaaaattattccacaatgtgggaaataaaagaccgcctggagctactggtttttgtttttattttctttttgttattcctctttgcacttcccttttccgagcagcattatgtgtgggttatagaaagcttacatgttgactttgttatgtggtcatttgatgtggtcgcgctaacgtttattgtaaatactgtgagtatttttcacccttctggcttaattac

SEQ ID NO: 18695 - DNA, 532 bp, Homo sapiens
  misc_feature 144, 212, 217, 218, 223, 225, 227, 235, 237, 243, 249, 268,273, 299, 368, 427, 438, 467, 476, 480, 485, 488, 517: n = A,T,C or G
agtacttctagaattaattaaggcggggataactgactagcaccattatgatcaccagtattgtggctggaatggaagaagatcaccttggtgttccttgtttggaagattatttcctctgaatttctgggcttggtcttccanttggcatttgcctgaagttgtattgaaacaatttaatgaaaatattaaatatttggtttcaaaaggcnaaacnnaaaanananacaaaaananaaaaantgacanaaatagaaaaaataagatnctttnttattttaaacattattttaaaggtnaattatttaaagcaaaaaaataccattctattttggtttttctaacatttgtgtatgtaaaagacatanaaaaatagcataaaggcaggaagaggagaaatggaaatatacagctttaaggtcattgngtgtgaaatangataattataccaaataaaaccagggagnagaaagatnaaanggaangtntccaaccaaataatatccaaataatatangaaaaagggaaaaaa

SEQ ID NO: 18696 - DNA, 427 bp, Homo sapiens
  misc_feature 32, 54, 55, 57, 83, 96, 102, 107, 134, 170, 174, 177, 179,183, 187, 188, 190, 194, 211, 214, 219, 221, 224, 226, 235,236, 237, 255, 259, 260, 261, 263, 265, 276, 278, 281, 282,289, 291, 293, 303, 314, 316, 329, 336, 337, 343, 344: n = A,T,C or G
  misc_feature 345, 346, 358, 359, 363, 366, 367, 372, 373, 374, 379, 396,399, 418: n = A,T,C or G
agtacttctagaattaattaaggcgggcgtgntggcgggctcctgtaatcccanntnctcgggagggtggggcaaataactgntcaaacctgggangtggangttgnattgagctcgatgagcgtaccacatgnattccagcctgggcgacataagtgagactccttctnatancanancaanacannanttgntgccgacccccccccgntgngctancngtntncctcctttnnnttcgaaacctggacctcnctannntnanactgtacaaantnttnnccccaanantngtcatttaantgttttatttngntgaaaaactaatnattgctnnctattnnnnggcatctttgannctcnaannaaaannntttgntgttttgtctacgttancanactttcctgccagtgtcanaaaatccta

SEQ ID NO: 18697 - DNA, 340 bp, Homo sapiens
  misc_feature 173, 178, 179, 182, 184, 194, 196, 200, 203, 207, 209, 212,215, 219, 222, 225, 238, 242, 244, 251, 259, 266, 280, 288,289, 292, 297, 301, 302, 304, 308, 310, 314, 323: n = A,T,C or G
agtacttctagaattaattaaggcgggtgcttgtagtcctggctactcgggaggctgaggcaggagaatggcgtgaacccaggaagcggagctggcagtgagccgagatcacgccattgcactccagcctgggagacagagcaagactctgtctcaaaaaaaaaaaaaaaaanttacnnggncntgggggcccntncctntantccnanttnctnaggnggntgnggcaaaaaaatcntttnancccgggngggggacnttgcatngacccaaaatcgcnccattgcnntcnacccngggnnanaaancnaaantttttttcnaaaaaaaaaaaaaaaaa

SEQ ID NO: 18698 - DNA, 371 bp, Homo sapiens
  misc_feature 68, 89, 99, 100, 124, 130, 145, 185, 186, 205, 207, 210,215, 216, 217, 220, 226, 228, 239, 242, 243, 244, 250, 255,265, 272, 275, 277, 279, 281, 286, 290, 291, 293, 297, 298,300, 301, 304, 305, 316, 318, 330, 337, 339, 343, 347: n = A,T,C or G
  misc_feature 348, 349, 371: n = A,T,C or G
agtacttctagaattaattaaggcgggttgggtgggattttttccctttttatgtgggatatagtagntacttgtgacaagaataattntggaataatnnctattaatatcaactctgaagctnattgtnctaatctgagattgngtttgttcataataaaagtgaagtgaatcttgtctaaatnntttctcaatcctggaacangnggnctccnnnctngggggngngcaaatgcccntcnnnatggtnctttnggcccccccncatcccnaangntnantcagnatanntnaccnncnngtnncaaatcctganantgttttaattgntggacancntatnctcnnnaatggctttccttacttaaaan

SEQ ID NO: 18699 - DNA, 480 bp, Homo sapiens
  misc_feature 190, 206, 214, 215, 220, 221, 226, 230, 231, 237, 243, 247,252, 253, 254, 256, 257, 259, 260, 266, 273, 274, 275, 276,277, 279, 282, 286, 289, 290, 293, 294, 295, 296, 299, 303,304, 316, 319, 330, 349, 350, 361, 365, 379, 384, 391: n = A,T,C or G
  misc_feature 393, 400, 404, 411, 415, 419, 420, 429, 431, 436, 439, 443,446, 447, 453, 462: n = A,T,C or G
agtacttctagaattaattaaggcgggtggctgtagtcccagctacttgagaggctgaggcaggagaatggcttgaatctgggaggcagagcttgcagtaagccgagattgtgccgctgcactctggcctgggcaacagagcaagactccgtctcaaaaaaaaaaaaaaaaaaaaaaaaaaaaaaaaaantttttttttttttttnaaaggggnnaaaannttttngggnnaaaaantttttncccnaaaannntnncnnaaaaanggggccnnnnngnggncccnttnnttnnnnaancccnntttttttttttnggnaaaaaaaaaanttttttttaaaaaaaaaannagggggttttntttntaaaaaaaaaaaanttttnggggaancncctaaancccnccttttngggncccnnggggggggnanttttnaancccnggnntttaanaccagggtngcccaaaaaaaaaaaccc

SEQ ID NO: 18700 - DNA, 492 bp, Homo sapiens
  misc_feature 4, 8, 14, 15, 21, 25, 26, 27, 41, 53, 75, 76, 120, 243, 371: n = A,T,C or G
gggnactnggcccnncctttngagnnnttttagaatttatnaaggcgggagangggggaaataagttatgaaacnntcataggctagcatcccagttactacagatgtataataaaccgncacacacttagttgccagtatttgtgttcacagattttgtgagtcaaggattcagaaagggcacagcaggaacagctttgtaactccatgatgtctggggtttcagttgggaaaactcaaggntggaatcaacagttggtcagtggggtcatttgaagcggccacactatgatagccacaagtggctactgagcagttgaagtgaggccagtctgaatggagactagtgtgttgattgaaaataggactgnaagtataaaatgtgcatcagatttggaagactttgtataaaaaaagaaactaaactatcttaatgggttttatattgattatattttaagataagattaaactcaatggtatttaaaaatt

SEQ ID NO: 18701 - DNA, 440 bp, Homo sapiens
  misc_feature 302, 330: n = A,T,C or G
agtacttctagaattaattaaggcggggatcttttattcctcttccctataaaataaaggccttggaaatcacaattttattttttttaaagaagttgttttagtgcctagagtaagaccgcatcaaatgttgttaaagaacctaatttagattgtgtggtatataccactgtttatctcaatacacagacacctcttacttcttgttataagtgagaactctaaagaaaaatcaaactcccaagttttctgtaaacatacgtggtcttaatagggtcactgtctgaggcaaaatgggttgncttaaagcaattgctacaaatttgcatnaaagaaactagatagcaaaatacaacaaccatgtaccacccaggcagaagagtcctcacctatacgcagttctgcatattgatcatcatgacaggaagtatttcgttttt

SEQ ID NO: 18702 - DNA, 433 bp, Homo sapiens
  misc_feature 31, 51, 52, 54, 62, 63, 68, 71, 72, 75, 76, 87, 91, 93, 95,97, 98, 103, 105, 117, 122, 153, 154, 161, 168, 174, 181,184, 188, 202, 204, 205, 207, 209, 213, 225, 228, 229, 256,283, 286, 298, 302, 307, 334, 338, 347, 348, 355, 360: n = A,T,C or G
  misc_feature 377, 379, 395, 400, 403, 408: n = A,T,C or G
agtacttctagaattaattaaggcggggaanggtgcatacctgtattaccnnanggacctgnngcctncgnnccnnaacctaactangctnantnannatcancnttccacggttgntaatnttgcatgatgaaacattcatttttaccttgnngatgctnatgctgnagagtnaaatgtngtncacngcctgatttctatntnntnanaaanactactgcatcnttnnatatttcttgatggtaataaatttgantaatcatatttcttactaacctggaanggnacccatacaaantgtnactantgacgctggaaattgctcccccccccncccngagggcctnncatgacncccanagagttgaactgcttgncncctactgtagattgangccancanctgangttgcctgccatttcaagaaaaatg

SEQ ID NO: 18703 - DNA, 674 bp, Homo sapiens
  misc_feature 31, 42, 54, 55, 69, 86, 119, 121, 147, 184, 192, 205, 224,229, 353, 472, 637, 671: n = A,T,C or G
agtacttctagaattaattaaggcgggaganatatgtatatncagatccaggannctctggagttccanatagattaaatccatcnggtcctctcctcgacatattataatcaaactgncngaagtcaaagagaattctaaaagcanaaaaagtgccttgtcacatgtaagggtatcttcattngattatcnacggatttctcancacaagccttgcaggttantacanaatggatggtatagtcaaaatgctgaaagaacaaaacctgtcagctaagaatactgtacccagcaaagctatccttcagaaatgaacgtgaaataaactctttcccagacaaggaaaagctganataattcatcaccactagattggcctaacaagaaatgattatgctgagtcctacagcaagaagtgaaaagcaggtaattactgtcatgaaaacatcagaaattataaaactcacagatngagataaatttgtaatcaaactcgtaatactccaatactatgatgatgctgtgtaaatctttcaaacctcactctgaaggttaaaagtcaaaatagtaataactacagccccaagtagttgttaaggagccccccataaattaggagatttttaccaaaatgttnctttgttgaaaaaaaggttgaaaaatgttgaaanaag

SEQ ID NO: 18704 - DNA, 431 bp, Homo sapiens
  misc_feature 28, 31, 32, 34, 35, 37, 46, 51, 52, 54, 57, 58, 60, 61, 62,71, 73, 74, 75, 79, 82, 119, 123, 125, 134, 165, 170, 175,186, 188, 193, 194, 204, 212, 234, 238: n = A,T,C or G
agtacttctagaattaattaaggcgggngannanngngggcctgancaggnncntgnngnnntccaaagangnnnaggngcnacaatgatggggaggaggccacactgttattgttggngaancnttattcatntaaaagacttcttgccaggatttcctgacanactgnatatngggtgtgagananccgcnngggtcaaggntgagtttnattgttactgaaattattaacncctnttaaaaaacactactgcctttcccaatcctaccaagtatgggatgctagattaaagaaatttcttcaggcccattgcagtggctcatgcctgtagtcccagctgtttggtaagcagaggtgggagtatcttttaagggcaggtgttcaagaccagcctggacatcacagcaagatctgctctttacaaaaata

SEQ ID NO: 18705 - DNA, 447 bp, Homo sapiens
agtacttctagaattaattaaggcgggaggtttattactgaatcatgagatctgttttaatatactgaggggcttatatttccagagtgattagatataaattactggtaggtaaaaaacagttaagtattaacttcagggagaaaaaaaaagctgcacaagaatgaaaataaaatcacagcatattccatggcttatctaaagctttaataatacttacacagccataataaaagtaattattgagccaatcaaaagttatataactacagtaaaaagatgtaagggatcattatttcatgttgaagtggtgagaggtggtaggaatgcaggcttttcaagaaggtatttctaagaatttttaagcatttgctcttaaatatgaggaacagtaaatgatcccaaggcatctgaagaaacatcaaaataaaacactaaactaagggg

SEQ ID NO: 18706 - DNA, 296 bp, Homo sapiens
  misc_feature 49, 52, 63, 131, 157, 167, 190, 211, 258: n = A,T,C or G
gcgggtgagtataagctaaatccacatctgttgctatacaagcgctcanaanatcaagatacnaactgaaggaaaagcagttgtcaactatgagggtggatgtgtgcagcacatgaaactctcaaatgctnaaaaggtaatgcttacatccttttanagtaagtcanattttctttccatatgtgtcatntttccagataatcatactggnttacctcataaggagatccttgggtaagaaagcagttgtggcacctntggtttcccaggtagttatttcatgcatataaatttca

SEQ ID NO: 18707 - DNA, 439 bp, Homo sapiens
agtacttctagaattaattaaggcaggagatttgggaggagccagggatggaatgatatggttgggctcagagttcccacccaactctcatcttgtagctcccataattcccatatgctgtggaagggacccagtgggagactgttgaatcatgagggctagtctttcccatgctattctcctgatggtgagtgggtctcatgaggtctgatggttttaaaaatgggagtttccctgcacaagctctctctctttgcctgctgccatccatgtaagacgtgacttgttccttcttgctttccaccatgattgtgaggcctctacaaccatgtggaactgttaagttcattaaacctctttcttttgtaaattgcccagtcctgcgtacatctttattagcaggatgaaaatagactaatatatgcacactaatccatca

SEQ ID NO: 18708 - DNA, 427 bp, Homo sapiens
  misc_feature 131, 132, 148, 326, 343, 367, 373, 385, 389, 392, 402, 410,425: n = A,T,C or G
ctcgagagtacttctagaattaattaaggcgggagaattgtttgaacccagtaggcagatgttttggtgagctgagatcgcgccattgcactccagcctgggcaacaagagcaaaatctgtctcaaaaaannaaaaaaaaaaaaaaancttgtgtaattgagttgtgagctgaactaggtccgtttttcatggaacactttttcttgaaagaatgaaagacatgcttttgttattcagacttcagtattttggcttgctgcactccagcctgggcgacagagcaagactgtctcaaaaaaaaaataccatgttttgagttttggtntaacataaaaaaagatnatccatattttttttaaaaggctngttaantaaagcagtggnagtnggngaaggacaangaaatgtntaactgggtatgatnga

SEQ ID NO: 18709 - DNA, 369 bp, Homo sapiens
  misc_feature 121, 124, 130, 133, 152, 155, 158, 159, 161, 171, 175, 191,194, 212, 223, 227, 244, 265, 270, 287, 288, 301, 308, 311,335, 343, 358: n = A,T,C or G
agtacttctagaattaattaaggcggggtaaggagggtggtaaaaagggaaggatgaggctcccccaatgtcacattaaattcatggttttcattcaaggcaaataaaaaaaaaaaaaaanaanaaaaanaanaaaaaaaaaaaaaaaaaanaanaannanttggcccctnaatnaaccaaaacacttaanaanaaatcatttaaatacctntggcttccaantttnttcatgcacactgttgnaatgtatgctaattgaacatncaatnggggaaaaaaaaatgtnnaatgattttgctntttttantanaaaaaaaatgtctgttttccaaanataatgtnatcatcctattttgnaatttttttta

SEQ ID NO: 18710 - DNA, 457 bp, Homo sapiens
  misc_feature 23, 244, 248, 250, 255, 263, 269, 272, 285, 288, 300, 314,317, 331, 346, 361, 380, 388, 395, 413: n = A,T,C or G
agtacttctagaattaattaaancagtgagaaacaggcacatgaagagagaactcatcaatggaagagtctggaacacacccaaataaacatatcagaaatttatatatttcacataagcctggaaaaactagatttaactaatgaacccaataggcttcctatttcactccttagaccaaataagttccacgtaaatttttaaaaaaatgaatgtgaagtcttcaaagaaaaaaaaaagcctnttantnttaanagttttanaaaaancangggaaaatgtttnttntctcaaattggngaaagcctttcaanctntaaaaaaagattanctggacaattaactnttattgtggaaaatncagcataaatgaaaattcntaaaaatntaagctntgagctaatttccaaatntacaaagagcccctgcattaagtaaaaaaaaaaaaaaaaaaaaa

SEQ ID NO: 18711 - DNA, 443 bp, Homo sapiens
  misc_feature 22, 28, 29, 31, 36, 38, 39, 42, 47, 49, 56, 58, 59, 63, 72,74, 86, 90, 93, 100, 107, 115, 118, 119, 120, 124, 126,130, 131, 132, 136, 140, 143, 144, 150, 160, 165, 169, 171,174, 180, 199, 230, 231, 278, 282, 302, 307, 402: n = A,T,C or G
agtacttctagaattaattaangcgggnncngatanannganctccntnaattctntnnaccnttgccttantnccatgctggtgnaagngtncaacacntgatggnaactttanacnnntcgntncatnnnaaanattntanntactancttctgggtnaatantatntnatncaaatnacattttcatgtttatacncaacatacatgattgaggcttccacaatgtnngtccacttgaggcgtccacgcggaacaaggtctgctgaccacagttncacncgtcgtgacaccactgtatnacggngaatgtcgaacactagagttacagacgacaggcaacaagaacatgcagagccggccgccagccagctcctacgccccgtgcccgccttaattaangcggggatcggggcaagagaggctgagtacggatgggaaac

SEQ ID NO: 18712 - DNA, 402 bp, Homo sapiens
  misc_feature 56, 241: n = A,T,C or G
gaattaattaaggcgggtggatcacaaggtcaagagatcgagaccatcctggccancatggtgaaaccccagctctgctaaaaatacaaaaattagccaggcgtggtggtgggcgcctgtagtcccagctactcgggagactgaggcaggagaatcacttgaacccaggaagcagaggttgcagtgagccaagatcgtgccgctgcactccagcctgggcgacagagcaagactccgtctnaataaacaaacaaacaaacaaacaaacacccgacagtgctccttatcatcaggaggaaactgctcaatggcaggaatcacccctggcagatagtctctcccaatgaagctcatgtttctctctcatttggtctgagaggctggaggaggatcaaccctatg

SEQ ID NO: 18713 - DNA, 592 bp, Homo sapiens
  misc_feature 302, 307, 309, 313, 320, 325, 327, 335, 341, 354, 361, 364,366, 389, 390, 393, 397, 402, 403, 414, 425, 426, 428, 432,433, 446, 449, 454, 460, 464, 480, 484, 487, 488, 493, 497,498, 501, 502, 505, 507, 512, 513, 514, 569, 577, 578: n = A,T,C or G
  misc_feature 585: n = A,T,C or G
agtacttctagaattaattaaggcgggagcagtttgcgtgtttgggttttttaattgagatgaaattcaaataacctaaaaatcaatcacttgaaagtgaacaatcagcggcatttagtacatccagaaagttgtgtaggcaccacctctgtcacgttctggaacattctgtcatcaccccgtgaagcaatcatttcccctcccgtcttcctcctcccctggcaactgctgatcgactttgtgtctctgttgtctaaaataggttttccctgttctggacatttcatataaatggaatcacncccgnangaanaaaaaantggananaaaaaaanaaagtnaaaaaaaaaaaanaaaaatnccngnccccccccggggggggaaccatnnccncccnatganngcttttttaangcccccccttnncngaannttaaaaaaaaganccnttggncctggncttnaaacccaccccctttncttncannctttnttgnnatnnatntncacannnccacccatccctgagccacactaaccaccttatgcaggccccaccttgccaatantaataaanncaatgtnctttttt

SEQ ID NO: 18714 - DNA, 441 bp, Homo sapiens
  misc_feature 30, 36, 43, 44, 47, 48, 49, 54, 55, 56, 60, 61, 67, 69, 70,71, 72, 73, 78, 83, 84, 87, 88, 90, 93, 97, 98, 101, 105,107, 115, 116, 127, 128, 138, 139, 179, 186, 205, 206, 208,219, 228: n = A,T,C or G
agtacttctagaattaattaaggcggggcngtgtgnctacctnntgnnnattgnnnaatnnaatacntnnnnncaggncctgnnccnntnatntgcnnacnatgntnccaagtcnnaaacccatgannttatcgcccnnggaaagcccgaaggggcctaacgtacccagcactgtaacntgcgtcntactaacacctctcatgtnntntatgtactaancaatgtctncctacctagatttgggatgaaatacttaatgatctttccattggaaataactggaagtgaagaggttttgttgcttgtacagtgtcagatgaggaacaccactatcttaattttgtgatacactgcatttgctggtgctatttttatacagtgaagcaacagctttgcagcaaaataataaaatacttcttcgttaaaaaaaaaaaaaaaaaa

SEQ ID NO: 18715 - DNA, 772 bp, Homo sapiens
  misc_feature 372, 388, 423, 438, 444, 455, 457, 498, 508, 509, 541, 546,558, 579, 583, 600, 611, 645, 660, 661, 675, 686, 691, 695,697, 698, 699, 708, 710, 712, 727, 729, 741, 743, 744, 748,750, 751, 756: n = A,T,C or G
agtacttctagaattaattaaggcggggggtgtaacagtatatataggaagattatcaaaaaactctttggctttagaaggaaaaccactagtctaataattgtctctaaatgtgcaggtgacaatcaggctgccatatctaaaatgttactgtctgacatcaaccaaaagatgccaggaaaccgttgatagttaaactcaaactgcaagaaaatattaatgctattcccaaaacacagcacagctcatcacaaaccagggtcacacgaaagccacagtcagctactggtgttattcagtctctttatgccaattaaaataaattgcctaggtttgttgtaatagttaagttctgggtttaaaaaaaaaaanccaggaagttgtcacnttaaggcgtaaaataggactgcaaaaatcagcatngtgcccaaatgaaanaaaaanatgccttaatntnttaaagggcagttcctttttgcctaaagaggaaataactantctaaatcannaggacacatttttcgtctttgggcaattgctnggganaataaaatcagngaatgaccccgggaattccanccgnaaaaaaaaaaaaagccnttgaaagggcnccaaaattgtcccttgggaaaaaaaaagggtttnaaaaaaacccccttnnaactttttttttanacccccctccnttttngccnannnaatgggggntntnacccctttttttttnanatttttaaaaananncccntnnaaaangcccccttttttttta

SEQ ID NO: 18716 - DNA, 476 bp, Homo sapiens
  misc_feature 80, 93, 95, 173, 221, 234, 264, 282, 293, 330, 331, 333,348, 353, 361, 369, 374, 394, 403, 408, 413, 440, 442, 444,455, 471, 476: n = A,T,C or G
agtacttctagaattaattaaggcggggggtgtgattccgtcctgcgcggttgttctctggagcagcgttcttttatctncgtccgccttctntnctacctaagtgctgtgccgccacccgatggaagattcgatggacatggacatgagccccctgaggccccagaactatnttttcggttgtgaactaaaggccgacaaaggattatcactttaaggtnggataatgatganaaattgagcacccagtttatctttttaagnaaccggttcagttttaangggggcttggntgccaaaaggaatgaaggtttgcaccatttgttttgnnangccaagaaagggccnattgnaaaattancgaaaagngccangttcccaaattttaaaaggntaaaccaancttgngccanaactttttgtaaaaaaatggttctttntnancaaggcacaanaccgggggtttttccnctttn

SEQ ID NO: 18717 - DNA, 428 bp, Homo sapiens
  misc_feature 31, 32, 38, 42, 48, 50, 52, 54, 57, 58, 59, 60, 62, 64, 67,70, 73, 74, 75, 77, 78, 81, 82, 85, 90, 96, 99, 100, 103,110, 111, 117, 118, 120, 122, 123, 128, 129, 131, 132, 133,140, 148, 156, 173, 182, 197, 202, 214, 227, 245, 260: n = A,T,C or G
  misc_feature 267, 291, 292, 310, 373: n = A,T,C or G
agtacttctagaattaattaaggcggggganncgaggnttgntaaagntnancnaannnntntnacnggnagnnnannttnnacncctcntgagangannatnatgctannggcaanncntnngcagnncnnntcctctnagcagaanatgcttgnagttgccacccgtgggngattatganaatgactgcaccagngaaantgggaacggctncgaagctatgctnctacattgaccgacttanacaaggaaaatgctnccgaaanttgaaaaaatccttgtgcaaattnngattgggccaacttctanaggcaccaatgccttcttagtgtggaatcatttttctgccctttagtcgtttttgttttgtanaaagtatctctcaaaatatattatagctagaattgtagaactatgttatagtcca

SEQ ID NO: 18718 - DNA, 319 bp, Homo sapiens
  misc_feature 5, 79, 80, 81, 83, 120, 139, 172, 176, 263, 297, 306: n = A,T,C or G
tcttnaactgaacacccatcagcacacgcatgtgaggaaactacctgaggccagggaaataattacctgaaaggacggnnnanaacaatattcagaccttcacaggaacaggaataattnctgttaccagcaaccatantaggaaacctcgttatttcaaggaaattgggtngagnactcagaaacatttacctctgtggtaaagaaaaataaccccagacttaacgctgtgccggtcccgcctaaaaatgcttaaaagcaanacccaaaaggatcaaactgtttccaagtaacccngtgttccanaacaaagttcaag

SEQ ID NO: 18719 - DNA, 264 bp, Homo sapiens
agtacttctagaattaattaaggcgggatcgggggtatgctgttcgaattcataagaacagggaggttagaaagaattactacaatgcagctagaacgtgaaaaggctcttgaacataagaatcgaatgtcacgaatgcttgaagacagagatttattcgtaatgcgactcaaagctgcacggcagtctgtttatgaggaaaaacttaaacagtttgaagagcgattagcagaagaaaggcataatcgattggaagaaccgaaa

SEQ ID NO: 18720 - DNA, 163 bp, Homo sapiens
  misc_feature 52, 75, 85, 95, 103, 122, 129, 135, 142: n = A,T,C or G
agtacttctagaattaattaaggcggggggagaggggaagggggccaatttnatcatgctcagatgggcaattcntggttagcantggtggaganaggctcantttgaactcctattagctntttgacntctganaacttgnctcaaccgctatgaccaaaag

SEQ ID NO: 18721 - DNA, 582 bp, Homo sapiens
  misc_feature 185, 189, 190, 191, 196, 198, 199, 201, 204, 206, 207, 208,209, 218, 219, 224, 232, 234, 242, 243, 250, 260, 261, 270,273, 274, 276, 277, 278, 285, 288, 294, 295, 296, 307, 308,309, 311, 316, 321, 322, 324, 327, 328, 330, 331, 332: n = A,T,C or G
  misc_feature 335, 336, 343, 347, 356, 365, 371, 372, 373, 378, 379, 384,385, 388, 393, 400, 401, 404, 409, 419, 426, 431, 433, 434,435, 436, 449, 456, 457, 463, 465, 468, 476, 479, 495, 513,516, 518, 521, 526, 532, 535, 536, 547, 550, 561, 562: n = A,T,C or G
  misc_feature 567: n = A,T,C or G
agtacttctagaattaattaaggcgggcgcctgtagtctcagctactcaggaggctgaggcaggagaatggcgtgaacctgaaaggtggagcttgcagtgagccgagatcacaccactgcactccagcctaggcgacagagcaagactccatctcaaaaaaaaaaaaaaaaaaaaattttttttncccnnntaaantnngnaantnnnngggcccttnnccccntttttttngnaaaatttnnccctttnggaaggggtnnttttccccnagnncnnnttttccnttngttttnnnaaaaaaaaaannngnttttnatttnncnggnntnnnggnnaaagggncttnctttttttnaaaaaaaantttggnnnggggnnttttnnatnaatgncaaaaannatnaaaanttttgggganttttggnaaggncnnnntgtttttaaaatnggaaaanntaaaantnggnaagggccnccngctaaaaaaattgggnggggtgggggcccccccnaananttnttttnaatttnccnntttttgggggnggnccttggggggnngaaantaaaatcccgggggg

SEQ ID NO: 18722 - DNA, 422 bp, Homo sapiens
  misc_feature 296, 297, 299, 301, 302, 308, 311, 312, 319, 320, 327, 336,349, 361, 362, 368, 371, 380, 381, 385, 388, 393, 400, 405,408, 409, 410, 411, 412: n = A,T,C or G
agtacttctagaattaattaaggcgggcagatcacgaggtcaagagatcaaaaccatcctggccaaaatggtgaaccctgtctctactaaaaatacaaaaattagctgggcatagtggcacgcgcctgcagtcccagctactcaggaggctgaggcaggagaatcgcttgaacccaggaggcagaggttgctgtgagccaagattgcgccactgcactccagcctgggcaacagagtgagactccatctcaaaaaaaaaaaaccccaaaaaacccggggcccctggccgggcccanngntnncccctntanngccaccnntttgggnggccaaaangggcaaatattgnggtcaaaaaatnnaaaccntcntgaccaaanngggnaanccccnttttttntaaangtnnnnnaaaaaaaaaa

SEQ ID NO: 18723 - DNA, 305 bp, Homo sapiens
  misc_feature 23, 29, 36, 43, 45, 53, 73, 81, 95, 99, 100, 106, 113, 122,125, 187, 203, 212, 227, 248, 250, 254, 273, 274, 277, 280,281, 282, 283, 289, 292, 304: n = A,T,C or G
agtacttctagaattaattaaanaggccnaattttngctgctnangtcatctnaaggctgatacttgagctgngtgcccanagatcatgcatttngatnnatattnttgccanaaaatacanggntataataaaactaagaactaccatttcaaaaaaaaaaaataaatttaaacctgaaaagtaanaagcagaagaaaaaanacaagctangaaacaaaacgctcncggcaaaatgtacaaacttanancaanattggaagaaaaaaaaaannccnccnnnngggggnttnggggcccccccng

SEQ ID NO: 18724 - DNA, 272 bp, Homo sapiens
  misc_feature 2, 18, 24, 25, 26, 28, 31, 32, 36, 37, 42, 43, 45, 48, 57,62, 66, 67, 68, 69, 70, 71, 72, 73, 74, 75, 76, 77, 78,79, 80, 81, 82, 83, 84, 85, 86, 87, 88, 89, 90, 91, 92,93, 94, 95, 96, 97, 98, 99, 100, 101, 102, 121, 134, 135,143: n = A,T,C or G
  misc_feature 151, 153, 166, 171, 186, 189, 196, 203, 244, 263: n = A,T,C or G
antatatatctcctagtnagcagnnngnatnncttnncgtanncnatnttctcattnccctncttnnnnnnnnnnnnnnnnnnnnnnnnnnnnnnnnnnnnnagtacttctagaatgaatnaaggcggggggtnnggttagantttttttntnttttttcagctgnttgcntttgcttgttatatnaancagaaancctgcantgaaaggtactatatttgctagactctatacaagatattgncataaaagaatttttttgnctttaaata

SEQ ID NO: 18725 - DNA, 302 bp, Homo sapiens
agtacttctagaattaattaaggcgggtgatggtggctatgatggtggggatgatgaggctattgttttttgtgaattcttcgataatgtgcattcctgtagttcattaacaaggtacatgcaatagtctaaagaaccagagtcactactatagtggcttaacatttaatctgtctccaatattttaaccaagtgacaccgaggtttttatcgaagcatttcacttaaatgaacaaatcatggctgttatattaacttgaaataaaatatatttaaacaaaaaaaaaaaaaaaaaaaaaaaa

SEQ ID NO: 18726 - DNA, 402 bp, Homo sapiens
  misc_feature 383: n = A,T,C or G
agtacttctagaattaattaaggtgggagcaaggtagataagtgaaggattttgattgtcatgtgaaggtcagtcttgttcttttcccatacagattgtgggacagaggaaggagtagtgcattaaaagttttaagcagagaaagggaacaatgaaaattggtatcactgaagcagattgttatggtagtatgtgagagattggtgcctgtgcctgtagcagggagacctgtagacctttttgctggaatgagcttgagcttgaaataaaaaggatctgaattagtcaatcgtcacaggaacagaaagaaaaaagatgccttaagataaaggcttattgttgagagagcaaggaataaagtataaattgcaggacagccaccngaatgctggaagaattgca

SEQ ID NO: 18727 - DNA, 270 bp, Homo sapiens
aggcggggaatgatggttgcatatgctagttgctggagacaatggtgacagacagaaatagatttaagattaatttagggcatggtgatagactttatgtgagggataagaaaaagcgaagtgttaatcctaaggttccttgaatgaaaaatggaatgggaggctgggcatggtggcttacgcctgtaatcccagcacattgggaggccgaggcaggcagatcacttgaggtcaggagttcaagaccagcctggccagcatggtgaaacc

SEQ ID NO: 18728 - DNA, 348 bp, Homo sapiens
  misc_feature 32, 86, 212: n = A,T,C or G
agtacttctagaattaattaaggcggggtttnaccatgttggccagttggtctcaaactcctgagctcaagtgatccacccacctncagcttccaaagtgctggaattacaggcatgagccacctggtcggcctagaggaggagttcttaaccctttttttgcaccatggatccttctagcagtctggtgaagcttatggagcccttctcanaatccgttaaaaatggattaaataaaatacataggattatgaagcaaaccaattatataatataaaattacaaaatatttttaaatgtaagatagtaatgttcatgctccccaatttgtgtgtgtgtatttttttc

SEQ ID NO: 18729 - DNA, 213 bp, Homo sapiens
  misc_feature 181: n = A,T,C or G
agtacttctagaattaattaaggcggggatgcttgcatgtgtaatcttactaagagctaatagaaaggctaggaccaaacctattccaccttactaccagacaaccttagccaaaccatttacccaaataaagtataggcgatagaaattgaaacctggcgcaatagatatagtaccgcangggaaaaaaaaaaaaaaaaaaaaaaaaaaaaa

SEQ ID NO: 18730 - DNA, 158 bp, Homo sapiens
  misc_feature 43, 49, 54, 68, 69, 74, 78, 83, 85, 89, 99, 104, 105, 147,157: n = A,T,C or G
agtacttctagaattaattaaggcgggggtggacagggaggcnccttgngaatntttgttttactggnnaactntatnaaaananaaanaaaaggagantaaanngttttgacccttcaaaggagaaaccccgaatctactaaaaanacaaaaaatna

SEQ ID NO: 18731 - DNA, 848 bp, Homo sapiens
  misc_feature 33, 38, 52, 63, 137, 160, 172, 187, 202, 220, 246, 250, 252,260, 263, 268, 297, 298, 309, 312, 313, 320, 322, 335, 340,344, 346, 350, 353, 362, 363, 371, 374, 375, 381, 383, 384,385, 386, 406, 441, 447, 448, 454, 460, 468, 475: n = A,T,C or G
  misc_feature 478, 481, 487, 490, 505, 525, 541, 550, 565, 575, 582, 583,584, 585, 590, 602, 634, 637, 646, 668, 672, 686, 722, 725,729, 731, 737, 739, 753, 756, 779, 782, 786, 807, 810, 815,824, 831, 836, 843: n = A,T,C or G
aaaaccaacaaggcggggctgaggggggaggancacangagcccgagaggangaggctacagngagccggcccgggtgacagaacgagaccctgtctcaaaaaaaaaggcatttgaaaataatttagtaaaaatcanacttaatacttgaaaatagtagntctcaacctttnttcctcaggaccccntaacatcttaaaaantgaggactccaaagaacntggggatttgacatatctactgaganttangnaaaaaagnagntattnaataattcattttagaaataaccccatgnnaaataaaaggnaannttaaatntnggacaaagggatntgganattntngganttntccaaaaannaaaaaaanagnngaaaanannnnaaaaagcggccgccacccgnggggggagcctccaaattcgccctaaaaggggggncggaannaccgcncccccncacagggnccgggcngtnttnacaaancgnccggggaccgggggnaaaaaacccccggggcgggnaccccaaaccttaaancggggcttnggcagaaaaaaaatncccccctttnggccaannnnggggngggaaaaaaacnaaaaaaagggccccgcaaccggaaccgccccnttnccaaaaaanagtgggggcaaaccccggaaangggngaaaaggggaaaangggaaagccggttaaaaaaatttggggggaaaaaanccngggngnaaaatntnggggtaaaaaacanccnccaaattttttaaacccaaaaanggnccgnaaaagcggggaaaaaaccccntanaaaanccaaaaagnaaaaaanacccngggaaanggggg

SEQ ID NO: 18732 - DNA, 232 bp, Homo sapiens
  misc_feature 30, 34, 36, 42, 44, 49, 50, 70, 76, 82, 86, 214: n = A,T,C or G
agtacttctagaattaattaaggcggggtnggtncnatctgnangctannggaaaatgtttcatgcctcnctcccngctttngganactgctggcactcttggactttccttggcttgtagacgcttcactccaatctctgcccctgtcaccacatggtggtcccctctgtgtcctctcctcttcttacagacacctgtcttttcttttctttncttttctttttttttttt

SEQ ID NO: 18733 - DNA, 457 bp, Homo sapiens
agtacttctagaattaattaaggcgggcgtctgtaatcccaactacttgggagactgaggcaggagaatcacttgaacccagggggcggaggttgcagtgaactaagaccacgccacttcactccagcctgggcgaaagtatgaaactccgtctcaaaaaataaaaataaaaacaaaaacagtaagccactgctcactttggcagcacatgtaccaaaattagaatgatacagacaaggtcaacatgggtcttgaggaattaaaaaacattgaaaaacaaagcaacgataagccaacaaacatatttaaagtgattttttttgttttgttttgtttttagcagttgaagagatggatttattagagggagagcaaaaggggatggtccaacagtgagcacagaggctaaactcccctgcctgccaagcaaggcacctaggtatgaaaattaaagtca

SEQ ID NO: 18734 - DNA, 610 bp, Homo sapiens
  misc_feature 465, 522, 574: n = A,T,C or G
agtacttctagaattaattaaggcgggtggagtcagtgtttccaaacttgaccatagatcagaatcacctgtagggcttcacaaaatacagattgctgagttctgcctccagagtttctgatttagtaggtctggagtagggcctgagaatttgagtatctgagttcccagataatgatgatgctctggatctgggaccacactgtgggattcattggtttaagaacctaaactgaagtctcatagcgggtaagctgaagaccttgccttaaacaggcatttatctacatatcctatgcttagctattatactacactattctacttctgcattgtagggttaaagtcttgggctttttgttcccgtgactacaatgttttcctgctcattactgaagaaaacatacaaagaatactgatgcgaagggtcctcaagaagtagaagaaataaattattttgactgntgattataatttattatattttaaataaaaaaagggtgtttctattaatacaaagcnagggccaggatgaaaacaagaattgctttggcattatttgggggaccataanaagtttatgtgttgtaagtttttttcccaaaaaaaa

SEQ ID NO: 18735 - DNA, 465 bp, Homo sapiens
  misc_feature 111, 132, 139, 141, 159, 160, 165, 167, 174, 175, 177, 178,182, 186, 188, 201, 203, 208, 211, 212, 216, 218, 222, 236,243, 245, 247, 251, 255, 258, 263, 270, 273, 289, 295, 299,317, 319, 331, 333, 335, 341, 342, 372, 375, 377, 382: n = A,T,C or G
  misc_feature 395, 399, 406, 412, 431, 433, 437, 446, 455: n = A,T,C or G
agtacttctagaattaattaaggcgggagggtgggctctatattttcattccaaataaaattctctttctaaaaaaaaaaaaaaaaaaaaaaaaaaaaaaaaaaaaaaaanaaaaaaaaaaaaaaaaaaaanaaaaaangnggccccccccccgggggnnccccnantcccccnntnngggnggcncnttacccccccccncnggccngcnntttncnaccnccggaccgggaaanccccggngntncccnactnaanccccntgcaccncanccccctttccccaggnggcctnatancccaaaaggccccccccnanccccctttccancnantgcccnnccttaatggggaatggaaaatggaaacggnaanantttgntaaaaatcccctnaaanttttganaaaacngcccaattttttaacccanangccnaaattggcnaaaaccccnaaaaaaaaaa

SEQ ID NO: 18736 - DNA, 479 bp, Homo sapiens
  misc_feature 18, 74: n = A,T,C or G
tccctgggtaccgggccnttcctcgagagtttttctagaatttattaaggcgggagaatggcgtgaacccggangttcttatgggaccactgtcatatatgtggtccgttgctgactgaaatgtggcataggactgtatctgatcagggttaatatccaaaatatataagaaacccctacaattcaacagtaaaaaatcaactaacttgattaaaaactgggccagggactggaagagacatttctcaaaagagggcttccaaatggctgacaggtatataaaaaaatgctcatcatcactaatcatcagagaaatacaaaccaaaaccacaaggtgtcacgtcacacctgttaggatggtcattatcaaaaaacaaaaaataacaaatgtgggcaaagaaagaaattggaacccctgtgcattgctggtggaaatgtaaaatggtgcaatcactatggaaaacagtatgaaagctcct

SEQ ID NO: 18737 - DNA, 435 bp, Homo sapiens
agtacttctagaattaattaaggcgggtcctatgagtcttaggcaggcctaggcacgtgttctctctttttgttgtttgattctcaatttacgacaaatgaagaacgaggcctttacctggtctggatcgacttgttatggagcccatgtgaaatgaaaatgattcataaacaaaactgattccatccccagcaacagcagagatgaccatgaacaattagccacctgagaatcctcaacaattcttggggaattcattaattacattttattaaagggcagggatatccaaggtgacatatgggttacaaaggcaaagtataatttctttatgggttttgttaatgtgaaatataaattaataagctttttgattttactaatacaaacatacccatcaattggtcttcttcaattcagaaataactagagttt

SEQ ID NO: 18738 - DNA, 514 bp, Homo sapiens
agtacttctagaattaattaaggcgggggagttgggctggcgagactgagggaaagcaaaaaaagaaagtggataagctgtaagtctgcctttctttatggtccaggacacatagccctcctgtgcaaataactcacaatcttcctgtgcaaagctatcaccagacacctcagctaatagaaaaatgcaagttagcttactgcaaccttagctttatcagtactgcacaaagccctcttcagcacacagcatgagcaccagcaactctttgtctccttgcagttagctcctctcttgctgacctgccctttgctttcttgcaatgtattttcctactttgtctaataaatctgcctttctttacccacaactgtcttggcaaattatttttaccactcagagcaacaccagccccagatagtcactgcccacaacagatctcttgagcccaggagtttggggcagtagtgtgctatgatcacgcctgtaaatagccaattgccttcaagcctgg

SEQ ID NO: 18739 - DNA, 428 bp, Homo sapiens
  misc_feature 28, 40, 58, 64, 66, 74, 79, 83, 85, 87, 95, 104, 115, 126,146, 148, 149, 160, 162, 166, 173, 252, 262, 263, 267, 271,272, 273, 274, 291, 294, 296, 300, 304, 305, 306, 307, 310,313, 318, 320, 322, 331, 332, 335, 336, 338, 339, 340: n = A,T,C or G
  misc_feature 345, 353, 354, 355, 356, 357, 358, 361, 363, 364, 366, 370,373, 374, 382, 384, 391, 404, 406, 407, 412, 415, 423: n = A,T,C or G
agtacttctagaattaattaaggcgggnggatcacttgangtcaggagttccagaccntcctgncnaacatggngaaanctcntntntactaaanatgcaaaanttacccaggcntcatggtgcgngcctgtaatcccacctactngnnaggtggaggcngnaaantcactcnaatccgggagacagaggttgcaggtgagctgacattgcactccagcctgggcgacagagggagactccgaaaaaaaaanaaaaaaaaannaaanatgnnnncccccccccgggggggnccncnaatncccnnnnaanggnggatntnanccccccccnnggnncnnnttttnaaaaaaannnnnnctntnntncttnttnnaacaaaangngtttaangatgaactaaatntnntaatngancatttatntggat

SEQ ID NO: 18740 - DNA, 208 bp, Homo sapiens
  misc_feature 148, 152, 161, 162, 165, 171, 176, 183, 185, 189, 197, 200: n = A,T,C or G
agtacttctagaattaattaaggcgggataccataaccagacacatgagttaaagaagacatggataccataaccaaagacattactaggaaagaaaactaataccaatatcccttttgaatacagaggcaaaaaaaaaaagtcctancaantgaaatccnncangatttnaaaanaattatncnctgngatcaatnggnatttatcc

SEQ ID NO: 18741 - DNA, 451 bp, Homo sapiens
  misc_feature 28, 51, 56, 65, 66, 82, 96, 99, 103, 121, 130, 131, 143,147, 153, 161, 164, 173, 204, 208, 210, 213, 216, 218, 223,224, 228, 231, 232, 247, 250, 251, 256, 265, 268, 279, 282,291, 301, 302, 309, 311, 319, 321, 322, 331, 352, 353: n = A,T,C or G
  misc_feature 354, 355, 381: n = A,T,C or G
agtacttctagaattaattaaggcgggnggatgagctgagtttaaggagtntaccnggagtttannaccaccctgactaacntggtgaaaccctgnctntatnaaaaatacaaaaaattanctgggtgcnntggcgcgcaccngtantcccanctactcanganactgaggcnggagaatctcttgaacccacgaggtggaggntgcngnganccnanattgnnccantgnnctcctagcctgggcnacnnatccngacttcatntcnaatcactactntgncaaaggttncctaacttcnnccccccncngggggagncnntgatctctnatttaatgggatattcatcgnnnnggaggagcaccatgtttaaaagcaanatgtggctgtgtttaaacaaaatttccaagtttgaattgagataatttcatttatataacagatactttt

SEQ ID NO: 18742 - DNA, 418 bp, Homo sapiens
agtacttctagaattaattaaggcgggatggtggtgagggtttaaacaaattatctactgagtacagtcaccgttcgggtggtgggtgcactagaagcccaaacctcactattatgcaagatactcatgcagcaaacctgcacacatgcctccgaatctaaaatttaaagaaattttaaaaagaattaccaaaaccctggggttcaaaccaccaccatctctctcaaggatttactggagaagcctcctaacttgcctcctccactctcccccttattatggactgaacgtttatgccctcccccaaattcatatgtggaagccctgaccctcagcgtgatgttctatggaggtggggccttggccccatgatggggttaatatctttatgaaaagaggaagaaacaccagaacattg

SEQ ID NO: 18743 - DNA, 724 bp, Homo sapiens
  misc_feature 95, 124, 126, 127, 128, 129, 130, 133, 161, 168, 169, 172,173, 174, 183, 185, 189, 194, 195, 204, 206, 207, 213, 214,221, 231, 232, 242, 245, 247, 250, 253, 258, 265, 266, 301,306, 307, 316, 319, 320, 323, 326, 328, 329, 331, 332: n = A,T,C or G
  misc_feature 334, 339, 342, 352, 356, 359, 360, 363, 372, 375, 376, 381,384, 396, 406, 408, 409, 416, 417, 418, 420, 421, 433, 434,436, 437, 439, 441, 445, 449, 451, 455, 457, 458, 464, 465,466, 470, 477, 483, 484, 486, 496, 502, 506, 508, 513: n = A,T,C or G
  misc_feature 517, 530, 537, 538, 554, 557, 558, 559, 561, 562, 564, 565,566, 567, 568, 569, 570, 571, 572, 573, 582, 586, 597, 613,617, 622, 623, 624, 625, 627, 628, 629, 631, 634, 635, 637,638, 639, 640, 648, 662, 664, 674, 675, 676, 678, 685: n = A,T,C or G
  misc_feature 686, 687, 689, 695, 697, 699, 702, 704, 705, 706: n = A,T,C or G
agtacttctagaattaattaaggcgggcagaaagcccatgagggaaaggtgaggcacctggggaaaagcaaaaaaacaaaacaaaacaacaacancaaaaaaaaaaaaaaaaaaaaaaaaaaangnnnnnccntttttttttttttttttttttttttttnaaaaaannggnnnttttttttntnaagnggggnngttaccccnanncccctnncttgggnttaccccccnncttattcccnctntnttnttnatttncagggtnnatatcccctacccccaaaatatttttttttttttnaaaanngactttttnttnnaanatncnntnntnttttnttnacaaataatntttnttnnttntgaatactnaanngccgnggngtgggctttttnttcttctgtncnntgttaannngnnaattttttaaannannantnttgnaaanancatncnnaaatcnnngttntgttttnttgccnngnaattttcttnttttgnaaantntaaanggcntgttggggggggngaaaaannccccccccaaaaaaanaannntnntnnnnnnnnnntttttatcngcgngtttttttttnccccgaaaaaaaaaantttntcccnnnncnnntnttnntnnnntttttttncccccccccccccnanaatttttgtnnngnttttttnnngnaaaaancnanccncnnnccaccttttttttttttt

SEQ ID NO: 18744 - DNA, 457 bp, Homo sapiens
agtacttctagaattaattaagcggggttcacatcattttcagaattgttgttatattattttatgaacctctgtgttttgattatatagttggtagctagctgctgcactaaactgtgagaaagaaaatgacacctaacatcctgaactaggtaaggttatgtgttactacaagctgacttgatgctcccagctagagaacactgttctcctggtgaacataaacaatctcacagagcataacaacatcaggtcacgttgaagggatgataaagtgagataaaacaaggtcaccatgtaccccatgaagtactcgaacatcctcctctctctgctaaaatgaattatggctgcttctttacctagtctatccttcctgtagataagatttgttgaggttctcaattatgaacttgtctgtcttcctgacagcatccaatcatgatcaaagcctgaa

SEQ ID NO: 18745 - DNA, 429 bp, Homo sapiens
agtacttctagaattaattaaggcggggtttcaccatctgggccaggccggtctcgaactcctgacttcatgatccacccatctcggcctcccaaagtgctgggattacaggtgtgagccactgcacctggccaaaaatattttttaaaagatagtttatctgcgtattacttcaataactaaaatttaaaagtaaaaacaaaactaatagtctcaattctccttctacagatgtgagaatcaggactcagtgagcctaaaatatttagtttatttcataattttgataaacgtaccacatttcacatttatgtaaatattatataaaatgtaagccttgcaattttcctctaaattttgaagtactcaaaaataaaatgtttatttaaaaacttcaaacacatagcctagtttctttttctttgtgta

SEQ ID NO: 18746 - DNA, 643 bp, Homo sapiens
  misc_feature 29, 35, 51, 77, 78, 89, 90, 167, 169, 171, 175, 176, 182,183, 193, 198, 199, 203, 204, 205, 208, 214, 215, 217, 218,220, 223, 224, 230, 238, 239, 242, 244, 246, 268, 272, 278,281, 290, 293, 299, 314, 328, 330, 336, 344, 346, 357: n = A,T,C or G
  misc_feature 366, 377, 382, 384, 388, 396, 400, 410, 436, 452, 464, 467,468, 469, 481, 487, 502, 509, 515, 517, 523, 550, 552, 553,554, 568, 569, 570, 572, 574, 579, 580, 584, 586, 595, 596,598, 600, 604, 605, 606, 607, 609, 621, 622: n = A,T,C or G
agtacttctagaattaattaaggcgggtnagtaanaggaatttgaaactcnaacgtttatagcaaaggaggaaagcnnaaaaggactcnnagagagatgagctgtatgcccagtggggaaaagggcttgcccagagccggcaacagcagcctaaaaaaaaaaaaaanananaaannaaggcnnccccccccgnggggnnaccnnnatngccccnntnngngtnnattttngccccccnncangncntcattttaaaaaaaaaaaaggnggcntgcggnggntcacccctntantcccanccctttgggaggccnaggcggggggaccncnaggtcnggaaatcnanaccaccctggntaatacatngaaaccccgtntttantnaaantcaaaaanttantccaaggtcnggaaaatcgaaaccatcctggttaanacggggaaaccccatntttcaaaataanccnnncttggtggcggncccctntcttccaaattttcnggagggnttaggncnggaaantggttttaacacgggaggcggactttncnnngagtggaaattaannntnanttggnnttcnanccttgggcnnananaaannnnanaatttttttttnnaaaaaaaaaaaaaaaaaaaaa

SEQ ID NO: 18747 - DNA, 673 bp, Homo sapiens
  misc_feature 523, 535, 568, 608, 615, 662: n = A,T,C or G
agtacttctagaattaattaaggcgggtgttaataagcagtaagaaatcatctgaaggcataaaactcactggtaacagtgagtacacagaaaaatacagaatattataacataattataacgtaattgtggtatgtaaactactcatatcttgaaaagggagactaaaatatgaacctatcaaaaataacaactacaacaactttttaagacatagaaagtataataagatataaatagaaacaacaaaaagttgactgggcatggtggttcacgcctgtaatcctagcactttgggaggccaaggtgctgggattacaggtgtgagccacagtgccctgccaaaacaatctttcaaacgtgaaggagaaataaagactttgccaaacaaaagcagagagatttcgtcaacaccacatctgtcctgcaaaacatgctaaggtgagttcttcaatctaaagcgggtgttaataagcagtaagaaatcatctgaaggcataaaactcactggttacagtgagtncccagaaaaatnccgaatattataacataattataccgtaattgngggatgtaaactctctatcttgaaaaggaagacttaaatntgacctntcaaaaatacaacttcccacactttttaagacattgaaagtttattngatttaattga

SEQ ID NO: 18748 - DNA, 142 bp, Homo sapiens
  misc_feature 32, 36, 49, 60, 62, 68, 95, 102, 104, 123, 124: n = A,T,C or G
agtacttctagaattaattaaggcgggaggantganaaggtgggaggcntaaagggtgangnggtganagggaaggacagatttttctggttctnaaatgtntntggaagttccttagggttnnctcctgcctcagcactta

SEQ ID NO: 18749 - DNA, 416 bp, Homo sapiens
  misc_feature 35, 47, 56, 57, 67, 103, 157, 181, 199, 209, 231, 241, 244,248, 249, 260, 261, 267, 268, 289, 307, 313, 315, 316, 324,325, 327, 328, 330, 336, 343, 350, 356, 363, 364, 367, 369,374, 375, 383: n = A,T,C or G
agtacttctagaattaattaaggcgggtgaagaanaaaaggaaagangaagaaganngaagaaggangaagaactaaaaataagaaggagaaggaagaaggangaatgaaaaagaacgaaggaggaggagaggaaggagaaggaagaagaaaaaganggagaaggaagaaggagaagaatnagaagaagaaaggagganaaggaagaanaagaaagaggaaagaagaagangaaaaagtanaangtannaataaagaagnngatgannaacgaggaagacgaatatggnctaagaagaattagaatnatgaanannagaaggannannangaacangaagacngaagaanaaggangaactannaanangattnnagaggacnaaaagaaaagaagattgaagatggaagaagaaa

SEQ ID NO: 18750 - DNA, 330 bp, Homo sapiens
agtacttctagaattaattaaggcgggaaatgtgtgatcagaggctttcccaggcacacactgctctacagccctaccacacaggcttaaccgagaatttgaccccggaaggtgacggatgaacatgtgtcctggtattctgatctacagaaatcctgccctctcttaatgatccatccagagctctaggatcgtttctagatttatttactacacacagactggaagtttttgacagaagctttgaactgggaaccctaccctgttccaccagcttctctagaagtacaatgttctaattactcctgagagactccatctgagggtaac

SEQ ID NO: 18751 - DNA, 463 bp, Homo sapiens
  misc_feature 30, 31, 34, 37, 39, 42, 43, 44, 48, 55, 56, 57, 75, 100,107, 118, 119, 124, 128, 137, 150, 151, 159, 177, 180, 193,194, 199, 204, 207, 208, 209, 213, 219, 225, 226, 227, 228,232, 233, 255, 268, 274, 286, 289, 290, 291, 292, 293: n = A,T,C or G
  misc_feature 300, 333, 336, 343, 364, 382, 406, 426, 431, 435, 449: n = A,T,C or G
agtacttctagaattaattaaggcggggtnnganttncngannncctnacacttnnnttaacctttccttatgancatgcctggtgtatgggttgacagngagggtnataatgacttnntggtngatngtagatgtngggctgttaattnncagctcantgttttaatctgacgcangcntgctcacatttgnnaatgnaaaanaannnaaanggggancccccnnnngggnnaacccggtttccccctaggggnggcttatttcccncccccnctggtctttcanatnnnnncttttcnactttatactctgagttattacttactgtaagnggngtatatnaaacctccatgcattttccantatggatctgctaatatncacagtaaatccatgtctttgttngtttttctattaaaaagcantcaanaaanataatgtgaaaaanaaaggaatttaaag

SEQ ID NO: 18752 - DNA, 408 bp, Homo sapiens
  misc_feature 175, 181, 186, 199, 201, 204, 206, 214, 221, 225, 230, 255,275, 312, 354, 385, 386, 387, 388, 398: n = A,T,C or G
agtacttctagaattaattaaggcgggaaagaatcaaacgaggaatcttcataatattgagaaaacaaactagcatgagtaaattattacttatcagtagtaaccttgaatgtaagtggattaaattccccaattaaaaaatatagagcagctggatggattgaaaaaaaaaaanacccanctgtntgttgcctacaananacncncctcatcnttaaatntaancatanactgaaagtgaaggaatggacaaanatatcccatgcaaattcaanccaaaaatgagcagaagcagccatacttgtctagatncaatagactttaagtcaaaaactgtaaaaagagacaaagtcnttatgtaataataaaataatcaattcccccnnnnaaaaaaaaanaaaaaaaaaa

SEQ ID NO: 18753 - DNA, 337 bp, Homo sapiens
  misc_feature 28, 33, 35, 37, 40, 41, 42, 43, 50, 55, 63, 66, 68, 69, 77,80, 81, 83, 85, 86, 94, 97, 98, 105, 114, 115, 116, 125,128, 136, 137, 162, 164, 165, 172, 180, 192, 197, 198, 205,222, 228, 230, 253, 257, 258, 297, 301: n = A,T,C or G
agtacttctagaattaattaaggggggnttgtncncncannnnctcacgnggctnacgctggncantnncttgaacntgnnangnngaggctgnatnnatcatgncattgtgcnnntgccctggnatntaggctannctatgaaactctgtctcagaacaantnnaaaagtnataaaatnagacgctcacangacanntacaccnaggagaacgattggaanaaattntnaactccccgacctggacgatagntttnngcctgttgctgcacccctaggtcatccaagagagctgcngaantactccagtgattctgagagccccaaaggaactggc

SEQ ID NO: 18754 - DNA, 185 bp, Homo sapiens
  misc_feature 31, 32, 43, 58, 60, 66, 74, 85, 118, 128, 130, 164, 178: n = A,T,C or G
agtacttctagaattaattaaggcggggaanncataccaaaanggaaataagataagncngacgantatggatnaaagagaattnttaaagacaattggaatctataaaaagaatcanatggaagttntnaaatgtcacaatacaatactggatttaacagaanacacgattgataancttgaag

SEQ ID NO: 18755 - DNA, 455 bp, Homo sapiens
agtacttctagaattaattaaggcggggagggaagacatcaattatgaatgtgcctaataacagagcctcaaaatactggaagcaaaagcaacagaattaaagggagaaatagacaatctcacaaccatagtaggagattttaacctctctctctccaattcttagaacaacagaccaaaaacatcaatagacaaccgacaatcatagtcggagattttaacctctctctttccaattcttagaacaatagaccaaaaacatcaatagacaacccacaatcatagttggagattttaacctctctctctctccaattcttagagcaatagaccaaaaacatcagtagataacccacaatcacagtcggagattttaacctctgtctctccaattcttagaacaatagaccaaaaacatcaatagacaacccacaatcatagtaggagattttaac

SEQ ID NO: 18756 - DNA, 525 bp, Homo sapiens
  misc_feature 228, 310, 321, 347, 365, 389, 400, 403, 436, 457, 458, 484: n = A,T,C or G
agtacttctagaattaattaaggcgggtagccctgccgcactttgtcacgggagcccagggtacccgcctccttttcgtaacactgttccccccggtcagcccatctagccctgtcctccattcctcacgccatctccatccccatcttgagtcctggaacggccctgggtgcctgcccctcactgtgcaactctgggagcagcccggcaggttggggcgtcttccanaacctctcccttctggagccactctgcactgcggggctaaacatgtttccagtgtgaattcccttccagtgaagccaaaacnccgggtgggcntgcttcatgaagcccctggacttgcncttcttcgcctggctctnagcaagggaaaggggaaccccctngggaggccaangcntggccccggggggtgggtggaaagttaatcctnggaagccccggaatcaaccannttcccccgccgggttttttggtcaangggggggcccccacccctttcttaagaattgaaccccccct

SEQ ID NO: 18757 - DNA, 399 bp, Homo sapiens
agtacttctagaattaattaaggcgggaataggaacaaagaacaggggccacacacagaaacctgtaataaatatgatagatactagtccagactatatcaataatcactgtggttaaatataccaattaaaagacagagattagtagagtgaattaaaaagcaagacccaactatatgttatcaactagaaacccactttaagtttaaagacacaaagattaaaagtaaaggaatggagaaagatatatcatgctaacattaaccaaaataaactgagggtagctatattaatagtagacttcagagcactgtacgttatcagggataaataggacgtaatgacaaagggtaagtaatccaagaagatacaacaattcttaatatctatatgcctaac

SEQ ID NO: 18758 - DNA, 359 bp, Homo sapiens
agtacttctagaattaattaaggcgggtaggcctaggattgtgggggcaatgaatgaagcgaacagattttcgttcattttggttctcagggtttgttataattttttatttttatgggctttgtggaattctttgtgtagtaatgttttaaaaaaagatgtttactgatagttacatgtaggattagaatatgtaatataatataaggctcatgttccagacctacgatagcttgtagtctatgttacgtatttctttatatcacatttttaatcattggattaaagtatcaaggaaagcttaaaaaaaaaaaaaaaaaaaaaaaaaaaaaaaaaaaaaaaaaaaaaaaaaaaaaaaa

SEQ ID NO: 18759 - DNA, 406 bp, Homo sapiens
  misc_feature 22, 28, 30, 42, 69, 85, 106, 138, 145, 155, 159, 170, 177,185, 194, 195, 200, 201, 206, 209, 226, 235, 245, 247, 260,263, 265, 277, 282, 284, 296, 299, 302, 306, 307, 309, 310,311, 320, 322, 324, 325, 328, 329, 330, 335, 355, 368: n = A,T,C or G
  misc_feature 387, 399: n = A,T,C or G
agtacttctagaattaattaangcgggngnatcacgaggtcnggatattgagaccatcctggcctacanggtgcaaccctgtctntactaaaaatacaaaaattanctggacgtggtggtgcatgcctgtaatcccanctactcnggaggctgangcangagaatcgctngaaccanggagtcanagtttgcanngagcnnaaatngcnccactgccctccagccngggcaacanagcgagactntntctcacaaccaangcncntcaaaaaaagcnaaaantnaaaactgcgagnggnccncccnncnnngggcccccntntnnccnnnaacancgctggccatgacccccgangagaacaattttnaatggggttgagtgtgcanatctctgctcancttccct

SEQ ID NO: 18760 - DNA, 398 bp, Homo sapiens
agtacttctagaattaattaaggcagggaatacagtacagtatagtggttctcaaactttagcatatgtgagaatcacctggaaatgctgataaaacgtacattcctggaccctaccctaatcacctggggttactgataaaatgtacattcctgggccctcccttagccctatatcataactcagctcagaactcttagaggttctgatctaagagccatgatgtagggctaagaaaaatgatatttttgcaatcacatccctcttaggagattctgatgaaggtgggttgctgctacatttggaagcacactgttttatctgaacaagcacttatgagccaagtgtgtgctttcctaaatttaacagggtcaaaaaaaaaaaaaaaaaaaaaaaaa

SEQ ID NO: 18761 - DNA, 383 bp, Homo sapiens
  misc_feature 66, 77, 219: n = A,T,C or G
agtacttctagaattaattaaggcttctatagggtagtatgcattataaaatctgaaatgatccancctggatttanattatgcaagtttctttgcttgtatcttctcttttggtaagaaagaacatacctagaaagtagacagcctcctttagggaggaaatagtatttgacatggatatgtcttgggaattgcgtttcttttgctaggtaatctaanaatttgtgtaggcttttagtatggagtagttttagggtgactgctttaaaacttcaaagctatagaaatgaccctctaaattgagagaataaagtcacttttaaagactgttaagccgtaattcatggtagtatgtaaaagtaaaattttatttcattttagca

SEQ ID NO: 18762 - DNA, 148 bp, Homo sapiens
  misc_feature 24, 28, 39, 58, 82, 88, 98: n = A,T,C or G
agtacttctagaattaattaatgnaggngggtctaggcngccgtccttgctgagaatntggacagggaccaccggggctgancgtgtngcactgcctncagactcattctggcctggacctcctttctggggagcctgctgctgtctg

SEQ ID NO: 18763 - DNA, 303 bp, Homo sapiens
  misc_feature 216, 246, 273: n = A,T,C or G
agtcttctagaattaattaaggcgggatccccttttttttcccttccatggccagttgttttatagaatatcctacagtttggacttgtttgatttctcatgaatggattcaggttacatttaaacattttggtaagaataagacataggtgacattttgattaccttttaagagtaaaacaattcacatgtcaaactatttggatactgtctcantccatttgtgtgggtataaaagattacccnacgccgagtcatttatcaaagataaancaaaaaattaaaattgtaagcggccgccac

SEQ ID NO: 18764 - DNA, 736 bp, Homo sapiens
  misc_feature 29, 38, 39, 41, 45, 49, 54, 55, 62, 63, 64, 77, 84, 86, 87,90, 95, 98, 99, 100, 101, 103, 104, 105, 107, 108, 109,111, 129, 135, 138, 139, 144, 147, 176, 178, 186, 187, 188,190, 192, 193, 197, 198, 199, 200, 204, 208, 212, 213: n = A,T,C or G
  misc_feature 214, 215, 269, 271, 302, 307, 319, 566, 633, 659, 660, 670,700, 706, 707, 711, 714: n = A,T,C or G
agtacttctagaattaattaaggcggggnatgcatggnncnttgncgcnagctnnccaaatnnnaaactccagctcnctatttngnnttntctgnttnnnncnnnannngnttaactgaggtttccctntgactntgnncacgnctncagactttgctgaacgggttaagactaangnacctactnnntnanntgcnnnnctgnaatnaaannnncattatctgcaaaatttttctcttataaaggctgtcctttcctcatcctttggntncagaaagcaagcttttgttggagcatttctntctgngcccattgctgnctctagattgccagcttattcacctccaagtttgggatatatgaaacaaaaagaaaatccagggagcttaccaccatgttgttcgtcaggtcccaagttccctagttagtctgcctcttctcttccccatttagagtcttcttatatttgtttgataggtgatgtctgggattttagcagtacttaatggaggtaataggaaaaagtatgcctattctatcttcctcaaagtacaagtttgtcatanagttttaaaagacactgaaaactcttgaatgcccaacattgtaataatgtcattttgaattcccaanggtttttaaaaaattttcatctttcnntaaaataacngaaccgattttgaattttttaaatttcaanattggnncctnttngttttttaaaaaaaaaaaaaaa

SEQ ID NO: 18765 - DNA, 441 bp, Homo sapiens
  misc_feature 39, 54, 58, 106, 272, 274, 276, 282, 285, 297, 307, 312,320, 326, 341, 342, 344, 345, 354, 356, 360, 363, 364, 371,381, 396, 407, 408, 414: n = A,T,C or G
agtacttctagaattaattaaggcgggcagatcacctgnggtcgggagtttganaccngcctgactaacatggagaaacccatctctactaaaaatacaaagttanctgggcatggtggctcattcctgtaatccaagctactcgggaggctgaggcaggagaatcacttgaacctgggaggcggaggttgcagtgagccgagaccgcaccattgcactccagcctgggcaacaagagcaaaactccgtctcaaaaaaaaaaaaaaattttntntnccccanaantataaatccctnttttgcccantaaangtaaaaantaaaangtttcatttgtttcnnanntttaaaaantntccncannggcttgnggaaattttnttttgcccccacaanccatttttatnntttttnaaaaggggactttcaaaaaacaaaagg

SEQ ID NO: 18766 - DNA, 460 bp, Homo sapiens
agtacttctagaattaattaaggcgggagttgggaaggattcaccatacttgtgttctcctccctttataaattttattcataggacttttaaaaggcttgtgctatctttccagtgaaaactgaaagtgcattattatggaagaatgtatttgcaggtagtaatagcattaaaaatatactcgtgtgtaaacacatactaattttgaccttgaaagatgaattccttcaagaaaaataaaataatgcttaagataatgtgtacgaaattaaataaaggactttatttacatactacataaggtagcaaactgttgaatgagtttgaaggtatcacttatttttttatgcatgtggttttagctttagaaagaaatgcgttatagaaacaagtaatagcaagaaaattgatgtatattttaatgatacattaaaattcccttttaatcataatagttaac

SEQ ID NO: 18767 - DNA, 395 bp, Homo sapiens
  misc_feature 37, 50, 58, 66, 67, 83, 86, 98, 110, 113, 130, 146, 162,163, 164, 166, 175, 189, 197, 201, 210, 212, 213, 223, 227,238, 240, 246, 253, 280, 301, 341, 381: n = A,T,C or G
agtacttctagaattaattaaggcgggaggccaaggncaagtttgaaganagatacangacaggcnngaacaagtggttcttncanaaactgcggatntagatgctttgnttngatcatttgaagttgtnacgaaacttttttaancaaaaaaatcaaattnnngngtcccactngggggggctcccantccccccnattngggttttgntnncccccccccntggngtgggcttttnancttttnaaacctnaaaggaattctgttaaaagaaccttcncaaaataaattctcttaattngtaaatagagactcaaaaaaagttatgactgaaaataatncctttacatttacatccaatttctctccatatctcaaatnagtcaacttaattt

SEQ ID NO: 18768 - DNA, 468 bp, Homo sapiens
aaagctgggtccgggccccccctcgagagtacttctagaattaattaaatcaggttgacagaagccaatatctcaatgtttttaaattaaaatttatttaaaggaataagtatgggtgcattaatgagatgttcagtttacagaatttgaagtttgagttctattttaatagtctgccgtgtcccccaaatcccatttagataaattgaggttcatttttcacatagacttgcaatttttagacaccacatttttttatagtaacagcctcatttgcctgtacaataactaataatacagtatttcataggtacattgtatgtgcacaggaaatttttctttaaatcttaagagcctttaataaacgggatattttaatattttaatgttactacatttaaaaaatagtgttttcctacaaaattttctgtattcagtataccgttaactatgaaaatgtcaaaaaaa

SEQ ID NO: 18769 - DNA, 622 bp, Homo sapiens
  misc_feature 29, 31, 34, 35, 48, 50, 53, 62, 73, 77, 78, 89, 90, 97, 102,103, 104, 105, 107, 111, 125, 130, 134, 139, 161, 166, 181,188, 197, 201, 232, 242, 246, 249, 255, 262, 265, 266, 268,271, 274, 275, 278, 327, 333, 338, 352, 354, 358: n = A,T,C or G
  misc_feature 373, 381, 392, 399, 436, 468, 471, 505, 510, 544, 585, 603,605, 622: n = A,T,C or G
agtacttctagaattaattaaggcgggananttnnttgaacctgcacngnggnagttgcgcngagcctatatntcgnnactgccctttnncctggcnacatnnnnanactnctttcgacctgcanctatnagangcctnctacttattgacttgatctccnctttncacacaatgctagcntgacctntctaccctnattnccaagtgaatgagaaaactgatgccgctganataattgaantggngantggatnaacaggnganncnttncanngtnaccttcgtctcactggaagagtctacaatgctacccagcatgctggggncctccnggggngcaaacaaattaangncaangattcttgccaaganaacccctntgccgtatggngcacatnaaagcactctaagagcccgagatagcttcctgaaacntgtgaaggaaaatgatcagaaaaagaaagaanccnaagagaaaggtacctgggttcaactaaagcgccncctgntccacccagaagaagcacacttttgggagaaccnatggggaaggaacctgagctgcttggaacctattccctatnaattcatggcattaatangngttaaaaaaaaaaaaan

SEQ ID NO: 18770 - DNA, 449 bp, Homo sapiens
  misc_feature 23, 24, 30, 31, 45, 48, 53, 54, 59, 65, 70, 71, 72, 84, 87,88, 90, 93, 95, 96, 99, 101, 103, 106, 107, 113, 117, 122,124, 125, 128, 129, 130, 133, 139, 143, 146, 149, 150, 151,152, 157, 167, 169, 170, 172, 175, 176, 178, 181, 184: n = A,T,C or G
  misc_feature 186, 194, 204, 211, 218, 224, 227, 229, 235, 240, 260, 264,266, 267, 270, 277, 363, 369, 387, 390: n = A,T,C or G
agtacttctagaattaattaagnnggctgnngtgaatgggcttgnaanccagnncatgnttgatngcacnnnaaaacatggtgnatnntnaananngcnantntannttgccngccntgcgnanngannntgnactccntacnacntgnnnnggtcnagccatatantnncnctnncnctngangncataggtnagcggccggntagctantgcacancatganatncnttctgntgganccaactagacttcctttctntatnannttnccctctntcattgctgcacctgggaccataagatgggaggatcgggagcccctcatgactgaaggcagaagaaattgctagaagtcagaacangatggntgggtcttcccctacctnttncagcttccacaattttcccatgatgaggtagcttctccctgggctctccttcttgcctg

SEQ ID NO: 18771 - DNA, 546 bp, Homo sapiens
  misc_feature 387, 484: n = A,T,C or G
agtacttctagaattaattaaggcggggatttcccacatacaattaaggcatggttccctgtttttcttcttggtctttttaccaaaactactgcacttttaacaaatatgatcatgaagccaaccccatccccaaagtgtgtgtccttaacatttttcaaggcccgtgtatagctgttatcttgtgtgaacctcagatggcccaataaggatgtaaggcaagttcaagtacagtctccgcactagagataagaaaacagagatagcgcctgtaatcccagcactttgagaggccgaggagggcggatcatgaggtcaggagatggcgaccatcctggctaacacggtgaaaccccatctcttctaaaaaaaatacaaaaaacttanctgggcatggtggcaggcgcccgtagtcccagctactcgggacgctgaggcaggaaaatggcgtgaacccaggaggcggaacttgcagttagctganatcgagccacgggacttcaacctgggcgactgagtgagactctgtcttcaaaaaaaaaaaaa

SEQ ID NO: 18772 - DNA, 411 bp, Homo sapiens
  misc_feature 33, 35, 45, 54, 62, 76, 96, 104, 127, 132, 137, 139, 141,163, 170, 172, 174, 175, 176, 177, 183, 191, 192, 193, 194,209, 215, 225, 232, 233, 238, 244, 247, 250, 261, 269, 272,293, 363: n = A,T,C or G
agtacttctagaattaattaaggcgggaggatngnctgagctcangaggttgangttgcagngatctgtgattgcncccctgcactccaacctggnctacatanagagaaactctgtctcaaaacanaacangacanancnaaaaaaatagaccctgtctcanaaaaaanantnnnnacaaanaaagccgnnnncccccccctgggggncccccncatgcccctnatactgnncaccnttgccnccncanatgcgggacanttgcattntanttttattttgtggaggtgcanaatatttactctttctgtccaacccttgattctgccgaggaagacactgatggtttgatgagtgattcanctgtttttggctaagggcttttggagctgatggcaggggtttgatgaa

SEQ ID NO: 18773 - DNA, 635 bp, Homo sapiens
  misc_feature 64, 117, 187, 252, 284, 307, 337, 378, 404, 581, 582, 606,612, 620: n = A,T,C or G
agtacttctagaattaattaaggcgggtggattacctgaggtcaggagttcaagatcagactgnccaacatagtgaaacccaatctctattatatacaaaaaattagccgggttggnggtgcatgcctgtaatcccagctacttgggaggctgaggcagtagaatcacttgaacccgggaagcgganattgcagtgagccatgatcgcaccattgcactccagcctgggcaacaagggcgaaaccccgtctnaattaaaaaaaaaaaaaacggcagatcatatntttgatacaagattaatatccanaatatatttaaaaactcaacaaaaacatancccaatttaaaaatgggcaaaggacttgaatagacattgcnccaaagaagataaaccaatgttcaanaagcctatgaaaagatgctcaacatcactaatcattaggaaatgcaagtcaaaacccaatgagatgccattttcacatccatttcaaatggctattaagaaacaagaacaggcaagcactagcatgggtgtggaaaactggaacacttgtgcactgttcttgggaaatgtaaaatanntacagctgctatgggaaaacagtntggcgntttgctcngaaaaattaaatttt

SEQ ID NO: 18774 - DNA, 365 bp, Homo sapiens
agtacttctagaattaattaaggcggggacaaataagggaataaaagctggccaccccagccagcagcatcaacctgctctggtccctttccacactgtggaaactttgttctttcactcttcacaataaatcttgctgctactcactctttgggtctgtgccacctttaagagctataacactcaccgcgaaggtctatggcttcattcttcaagtcagagagaccaaaaacccaccggaaggaaccaactccagacacactcttccttcagtctatcacaacaatgtagtcaagaacgatcctattacgccattaagtcacatcatgtcactcttctgctccaatgatttcccatctcaaaaa

SEQ ID NO: 18775 - DNA, 322 bp, Homo sapiens
  misc_feature 180, 181, 192, 209, 216, 217, 220, 232, 233, 234, 244, 245,247, 251, 252, 253, 267, 268, 273, 276, 279, 282, 284, 288,294, 301, 313, 321: n = A,T,C or G
agtacttctagaattaattaaggcgggggtctgctggaggattccaacagagagtatttcctccactgtacaatgtcacagactatctctatcatcattgctttgtggctgtttctgttttttactgtatgtaactggtagctgattgtactaggattaaaaacaataaactttcatgannaagccgatganattcatgggctatacanctaaaannganaaaaaaatttannnagacttaaannanaaannnaaaaaaacaaaaannttttnccnacnaananaaanaaaaanttttttncccccccccccngggggggnc

SEQ ID NO: 18776 - DNA, 722 bp, Homo sapiens
  misc_feature 22, 55, 102, 413, 588, 590, 598, 652, 672, 693: n = A,T,C or G
agtacttctagaattaattaangcggggtgcggtggctcacgtctgcaatgtcancactttgggaggccgaggtgggtggatcacctgaggtcgggagttcnagaccagcctgaccaacatggagaaaccctgtctctactaaaaaaatacaaaattagccggggtggtggtgcatgcctgtaatcccagctactcgggaggctgaggcaggagaattgcttgaacccaggagacggaggttgcaaaactccgtttcaaaaaaataaagttaggtgaaacaaaatttttactcttctgaaagtcaaatttttaattggggctggttctgccttgcttgatttcattttgttcttagtgttttaagactgatttctggaaaacagtttttgaaagaagagtagcaaaacttcangtctgtggctttctaaagcataattctccattttctaaaagtattgatcccccttgggctctttgtcagttttatgcacttttgtaatactctttgcgttttcaagatggatagcccaatggtgttttgataaacttggtcaatttctttactaccctaaaaatgcaagtaaccngncttttaanctttaaatatattcatcttattcaaatagtatttcaacagatttctccctatancatctcaatttttgtccctnttaaatggctatgatcctggncttaaataaaaatttttatcttaaatttt

SEQ ID NO: 18777 - DNA, 397 bp, Homo sapiens
  misc_feature 35, 42, 59, 96, 133, 164, 257, 269, 270, 271, 272, 273, 278,285, 288, 289, 290, 293, 306, 307, 315, 317, 318, 322, 326,331, 332, 341, 343, 344, 352, 353, 360, 364, 365, 366, 367,369, 371, 374, 380: n = A,T,C or G
agtacttctagaattaattaaggcgggtggatcanctgtggncaggagtttgagatcanccaggccaacctggtgaaaccccgtctctactaaaantacaaaaattagctgggcgtgatggtgggcgcctgtnatcccagccacttgggaggctgaggcagganaatcacttgaacccgggaggcggaggttgcagtgagccgagatcgcaccattgcactccagtctgggcaacagagtgagattccgtcttaaanaaaaaaaaattnnnnnaatcnaaaaganggnnnccnccggggggggacnncatccccncnnatgnagantgttnnacccccccncnntgggcccnntttaaanaatnnnngntnttncctggntggtcacgttccttttc

SEQ ID NO: 18778 - DNA, 448 bp, Homo sapiens
  misc_feature 329, 330, 331, 332, 333, 334, 335, 336, 337, 338, 339, 340,341, 342, 343, 344, 345, 346, 347, 348, 349, 350, 351, 352,353, 354, 355, 356, 357, 358, 359, 360, 361, 362, 363, 364,365, 366, 367, 368, 369, 370, 371, 372, 373, 374, 378: n = A,T,C or G
  misc_feature 383: n = A,T,C or G
agtacttctagaattaattaaggcgggggtaaggttatagattaacagaatctcaaggcagaagaatttttcttagtacataacaaaatggagtctcctatgtctacttctttctacacagacacagtaacaatctgatctctcttgcttttccccacatgggcgtggtggccactgcctgtaatccagctacttgggagggtgaggcaggagaatcacttgaacccaggaggcagaagttgcagtgagccaagattgtgccattgcactccagccttggcaacaagagcgagactctcataaaaaaaaataataaaaaaaaaaaaaannnnnnnnnnnnnnnnnnnnnnnnnnnnnnnnnnnnnnnnnnnnnncgtnttacncgccgctcactggccgtcgtttttacaacgtcgtggactgggaaaaacccctggcgttacccaaa

SEQ ID NO: 18779 - DNA, 200 bp, Homo sapiens
  misc_feature 58, 110, 122, 136, 138, 139, 166: n = A,T,C or G
agtacttctagaattaattaaggcgggggtatgtaagtgcttaagactgaaattgtangatctaaggttagtatgtacttaactctgtaagaaaatattcatgtcttacntcacatctctanggaatgaaagattntnnatcagaatggtagggtagaggaaaatncattggggaaattgttcctttggtatttacttaa

SEQ ID NO: 18780 - DNA, 616 bp, Homo sapiens
agtacttctagaattaattaatccaagatttacaatagcacaacgctaaatcacacagtaactacaaaaggttacatagatatgaaaagattggcagaggccattgcaggatgaatcacttgtcacttttcttctgtgctgggaaaaataatcaacaatgtgggtctttcatgagcagtgacggatagtttagcttactatgtttcccccccaattcaatgatctataacaacagagcaaagtctatgctcatttgcagactggaatcattaagtaatttaataaaaagattgtgaaacagcatattacaagtttgaaaattcagggctggtgaaaaaaatcaactctaaatgatgataattttgtacagttttatataaaactctgagaactagaagaaattattaactttttttcttttttaattctaattcacttgtttattttgggggaggaagactttggtatggagcaaagaaataccaaaactactttaaatggaatcaaaccaactttattctttttttcccccatactggtagataaagcaaactttataagtgggctattgaaagaaaagttacaagcttaagatacagaagcatttgttcaaagg

SEQ ID NO: 18781 - DNA, 181 bp, Homo sapiens
  misc_feature 24, 27, 40, 44, 46, 56, 65, 84, 86, 120, 129: n = A,T,C or G
gaacaaaagctgggttaccgggcnccncctttgaggagtncttntnataaattaanttaaggcgngggggcggacaaaaaaaancnagcctggtgatagctggttggccaagataggaantattatccncaactttaaatttgcccacagaaccctctaaaatccccttgggaaaatttaa

SEQ ID NO: 18782 - DNA, 272 bp, Homo sapiens
  misc_feature 264, 266: n = A,T,C or G
agtacttctagaattaattaaggcgggcggatcacgaggtgaggagatcgagagcatcccggctaacacagtgaaaccctgtctctactaaaaatacaaaaaattagccgggcacggttgcgggtgcctgtagtcccagctacttgggaggctgaggcaggagaatggcatgaacccgggaggcggagtttgcagtgagcccagatcacgccactgcactccagcctgggcgatagagtgatactctgtctcaaaaaaaaaaananaaaaaa

SEQ ID NO: 18783 - DNA, 139 bp, Homo sapiens
  misc_feature 3, 8, 49, 50, 61, 64, 77, 81, 89, 121: n = A,T,C or G
gtnccggnccccccctcgagagtacttctagaattaattaaggcggggnnggaattttttnaantatggcaggagangganagaaacancaacactgaacatggagaacacatagaaatcnttagtaagatgctagttt

SEQ ID NO: 18784 - DNA, 168 bp, Homo sapiens
  misc_feature 101, 168: n = A,T,C or G
aacaaaagctgggtccgggccccccctcgagagtacttctagaattaattaaggcggggttgggggaacttggctgtcccacgtctttcaaataaagctgntttgtctaactcaaaaaaacaaaaaaaaaaaaaaaaaaaaaaaaaaaaaaaaaaaaaaaaaaaaaan

SEQ ID NO: 18785 - DNA, 441 bp, Homo sapiens
  misc_feature 293, 294, 298, 299, 301, 303, 313, 318, 319, 322, 323, 325,326, 332, 334, 345, 347, 358, 359, 360, 361, 362, 365, 371,378, 379, 389, 390, 391, 392, 394, 399, 412, 414, 417, 418,425, 428, 429, 430, 431: n = A,T,C or G
gtgccgggccccccctcgagagtacttctagaattaattaaggcgggcagatcacaaggtcaggagatcgagaccatcttggctaacacggtgaaaccccgtctctactaaaaatacaaaaaaattagccaggcatggcagcgcgcgcctgtagtcccagctgctggggaggctgaggcaggagaatggcgtgaacccgggaggcggagcttgcagtgagccgagattgcgccactacattccagcctgggtaacagaggaagattccgactcaaaaaaaaaaaaaaaacccnncccnngncngggggggggntttannccnntnnttcccncnttttgggaaancnagggggggggnnnnnttnggggcngggattnnaaaacccccnnnncnaaatnggaaaaccccctncnttnntcaaatnccnnnnaaaaaaaaaa

SEQ ID NO: 18786 - DNA, 355 bp, Homo sapiens
  misc_feature 24, 25, 26, 31, 38, 40, 42, 79, 93, 104, 114, 206, 217, 219,236, 237, 241, 252, 263, 266, 275, 277, 283, 305, 313, 316,323, 324, 327, 338, 342, 343, 345: n = A,T,C or G
agtacttctagaattaattaatgnnnaggangtaaaanancnaagatattcatggcctaaactgagtactggatcaaanggacctgatagatntctacaaaatnctccacccanaaacagacagtaatagacattcttctcatcaccccatgagcactttactctaaaattgatcacataattagcgaaagtaaaacactcctcanaaaaaaaaatnanaaggcaaaaggccttannctgncctcccccctnggggggacacngangcccgcctngntggggncaggacttccccccccatgccngggacctnttnaaaaaannctncttggggaccntaanncncctggggacc

SEQ ID NO: 18787 - DNA, 427 bp, Homo sapiens
  misc_feature 220, 267, 348, 363, 379, 410, 412: n = A,T,C or G
agtacttctagaattaattaaggcggggtatttagagcctgtaatctaaatgctggctcaaatttattccccagctacttcttataccactattcttttaatgtttgcataatcataagcacctcaacacttgaatacataatctaaaaattatatagtaaagctggtagccttgaaaatgtcagtgtgatatctattatgtagataaatatatatagtnggcctttcagggactgtcacagtaacactttatttacaggagctaanggtttgtcctaaattttcagggaccctaggagggaagaagctttatacaattacccgatgtgaaattttctctaaagtggnatattttttgtgtcncagtgtatattatttnaaaaaaaggtgttaccttttggaaaaaaaantngtatattaaaaagaa

SEQ ID NO: 18788 - DNA, 255 bp, Homo sapiens
agtacttctagaattaattaaggcggggaccccccacaggaactaggtctcaggctgtggaaagggagctgccccagggcccaggagggccggctctgcattccgcatgttcccagagtgaaagagaatgagaaggagacacacaagtgctgttatgacctgggttgttggttggcaaatacagcatctaatagaaactttcttccatcccagaataccctctaccatctgctttggtcagggtgccgctcgagg

SEQ ID NO: 18789 - DNA, 356 bp, Homo sapiens
  misc_feature 2, 48, 50, 54, 55, 58, 65, 66, 68, 70, 73, 81, 82, 83, 85,90, 95, 96, 98, 104, 108, 110, 114, 115, 116, 117, 118,119, 125, 127, 136, 138, 139, 143, 149, 170, 173, 183, 210,223, 224, 228, 236, 267, 269, 297, 313, 316, 318, 320: n = A,T,C or G
anactggccgtcgttttacactggccgtcgttttacacccgggaaccngntatnnccntgattanngncngtngttttccnnncngaaanagganntncctttntttntngccnnnnnntttccntngaaaaaaananntganttttgnttgtttgagagatttcccatnttnccatcagagnaataaatatacttgctttaattcttangcctaagcaaacnngatntaaaaatntatgctgaattacttgtgaagaatgcgtttnangctattttaaatgtgtttttttttgttngacattacttattaanaantngnttattatgcttactgttctaatctggtggtaaaggt

SEQ ID NO: 18790 - DNA, 426 bp, Homo sapiens
  misc_feature 388, 390, 401, 403, 410, 412: n = A,T,C or G
agtacttctagaattaattaaggcggggatgtaagggagataagcaaggaaggaaggaaggataaactgtctattaacagataaatatttggtcatgtccataatgatcatttacatgttttcttttttttttctttttcttttttttaagaaatagagacaaggtcccactatgttgcccaggctagtcttgaactcctgagctcaagtgatcctcccatctcagcctcccaaagtgctaggattacaggcatgagccagcaaacctggccactacaaatttttcatcctatacaagggctatatggtcaatttaagaatatgacaaatgtggcatatcgcacactactgtgatacaccagaaagctaggattaacactctgtcccnanaaaaaaaaaananaaaaaananaaagcggccgccac

SEQ ID NO: 18791 - DNA, 414 bp, Homo sapiens
  misc_feature 30, 33, 34, 36, 38, 54, 56, 70, 76, 78, 87, 98, 111, 130,137, 144, 146, 147, 149, 161, 179, 180, 200, 203, 207, 208,228, 244, 247, 275, 304, 312, 323, 351, 357: n = A,T,C or G
agtacttctagaattaattaaggcgggganacnnangntggcttagtggttatncnatacaaacaaacanaacccnanttaccttcntgcgggataancattatggaaaanaatacggggaatgtttacngaatgcnccatggnanncntttttcaaattnacataagatactgacatnntgaaaaaataaatgatgtcnttnacannaaatgttttacagattacanttggctataacttagnttnttatgaataaaatttatggcacatcatncatttttacatcacagattctgtgtttcngaattcanacatgataaancttagacttggcaagaatgatgtaatanaatgangcaactgaaactgaaatggcatgtgtaagtaaaattaatccccaaattaaaggattc

SEQ ID NO: 18792 - DNA, 547 bp, Homo sapiens
  misc_feature 454, 461, 463, 477, 482, 492, 494, 499, 504, 506, 529, 530,535: n = A,T,C or G
agtacttctagaattaattaaggcgggtgcctgtaatctcagctacttgggaggctgaggtgggtggatcacctgaggtcaggagcgcgagaccagcacagccaacatggtgaaactccatctcctaaaaatgcaaaaaattagctgggcatggtggcgcacgcctatattcccaactattcaggaggctgaggcaggagaatggcttgaacccaggaggtggaggttgcagtgagccaagatcgtgccactgcactcaagcctgggcaacaagagtgagactccatctcaaatcaaaataaaataaaaaaaaaaacctttccagtttttttaatagttcatatatgtatacatacatttatatttatatacgtatgtaattatatatacgtacacagacatatacgtataaatgtgtatctatatgtatatattgatggtttttttttttaanggtgaantngcattgaagcggtncttgnaaaaatcccnanattgntcatnanggaaaaattttgtgatgttttannaaaanattaatgtttta

SEQ ID NO: 18793 - DNA, 390 bp, Homo sapiens
  misc_feature 15, 37, 43, 72, 122, 124, 136, 145, 149, 155, 156, 164, 168,184, 185, 195, 196, 197, 201, 208, 221, 229, 238, 259, 290,300: n = A,T,C or G
gcaggccaacatgangatggccctgtattgattgttncctttntataaaacgtctgcaggctcctcaccacnttccaagcagattttctcctttaaacctccagagatcctgcccatttgtntncacttggcccgngtgggtatntggngtacanntgcttgtnacangaacactgaattctgnncctgtacccnnngctngtcacanctggacagaaagnatggactnaaaagggtncaataatccatctcttcattnagtaaatatttattcatcactttctttttgncagactctgngggaggcactgctataaaaagataatgaaggctgaggcgggtggattacatgaggtcaggagcttgagaccaacctggcaaacatggtga

SEQ ID NO: 18794 - DNA, 422 bp, Homo sapiens
  misc_feature 28, 30, 37, 38, 47, 63, 64, 65, 118, 127, 128, 129, 130,135, 137, 140, 141, 142, 146, 149, 150, 152, 153, 160, 165,169, 173, 204, 205, 212, 213, 223: n = A,T,C or G
agtacttctagaattaattaaggcgggngngctcttnnacctcttcntcccactctgggggtnnntatcactgtgacaacactaaaataataaaccaaaacactacctgacaaaaagnaaaaatatnnnnaaaananaannnaaangcnncnnctgctgnggggnttanccantacaccaccaaaatgtcattttcaacccccnntgagtgnnagagtttatngactctgttatgatacttttcaagacctgggaaatatttgtatcctttagtgaaaaggggaagaatcaattactgaaagccataagcctacagtaacggagccaattaatcctttgtcatctttgttgagtttagttttcttctgttcttagcacgtcagctagtagatctttgatgaactgttgctcctctttaaatg

SEQ ID NO: 18795 - DNA, 299 bp, Homo sapiens
  misc_feature 113, 161, 182, 228, 230, 234, 252, 259, 275, 280, 281, 283,284, 285, 286, 287, 288: n = A,T,C or G
tcgagagtacttctagaattaattaaggcgggggagaatgttttcatgttacttatactaacattagttcttctatagggtgatagattggtcagtaggagagcaccgttcanagggaagagccatctcaacacgaatcagcaccaaactatactttcagngatgaatttcttctttctgcntcttttggaataaatattttcctcctttctatggaaaaaaaaaaananaaanaaaaaaaaaaaaaaaaanacccccntaaaaaaaaaaaaaanaaaannannnnnnccccccccccc

SEQ ID NO: 18796 - DNA, 399 bp, Homo sapiens
  misc_feature 286: n = A,T,C or G
agtacttctagaattaattaaggcgggctgttaacgatagaataggttattacaggaaacgaaagattgatgctgtggtttgaacgtattccccaaatttcacgtgttggaaacttaatccccaataaaacagtgttgagatgtgggacctttaaaaggtgattaggtcatgagggctctgccctcatgaatgatgctggtttcaagagagtgggtaagttattacaggagtggactcttgataaaaggatgtgtttcgccactctcactattttttaaataatanaaacaaggtctcactatgttgcccaggctggtcttaaactcccaagctcaatccatccttccccctcagcctcctgaaaagctggggccacaggcatgtaccatcatgccagg

SEQ ID NO: 18797 - DNA, 553 bp, Homo sapiens
  misc_feature 397, 412, 439, 519, 531, 545: n = A,T,C or G
agtacttctagaattaattaaggcgggaggagctaaaaaaaaaaaaaagattgggtactaagcttagtacctaggtaatgaaataatctgtacaaccaaccctgtgatacgaatttccctatataacaaaactgcacatgtacccctgaacctaataaaaaagttaaaacaattaccaatttgttaagttaaaaaagcaaaaacaaacaaaaaacaacatctgaggcgtatctttttacaagagattctagggagtgatgatttgaccaacacaatggggatccacaacaacatgaaaagtccctcaacactagcaagtggtgctgatgttggctggccaggctcaaaagaataactcaaaggctaacagagagtagccctgccacagcctacattnttcaacgtatctgtnaaaatcttgggtttatatgtgttttanagtccagtagttgaggacatatatgagttcatatatgtggtctgataaggggtggatataacatttccatggggaggaanattacactctgnggttcttaccacancaaaaact

SEQ ID NO: 18798 - DNA, 435 bp, Homo sapiens
  misc_feature 54, 215, 322, 393, 402, 420: n = A,T,C or G
aaagggaacaaaagctgggtccgggcccccctcgagagtcttctagaattaatnaaggcggggatgcttgcatgtgtaatcttactaaccaagcataatatagcaaggactaacccctataccttctgcataatgaattaactagaaataactttgcaaggagagccaaagctaagacccccgaaaccaggactgagctaccctaagaacagctnaaagagcacacccgtctatgtagcaaaatagtgggaagatttataggtagaggcgacaaacctaccgagcctggtgatagctgggttgtcccaagaataggaatctnagtttcaactttaaatttgcccacagaaccctctaaatccccttgtaaaattttaactgttagtcccaaanagggaacancttctttttgggacaccnaagggaaaaaaaacc

SEQ ID NO: 18799 - DNA, 320 bp, Homo sapiens
  misc_feature 118: n = A,T,C or G
agtacttctagaattaattaaggcggggcaactcgtcgtgggcacacgtgcaggaacgccaggttccccttctttcttctgaggttccccgcacctccttgggtgtcttgaagcccanaccgatgttcttgtagtaccgcgggagcttctccttgcctggaccccgcctcagctcagaaagccaattccctagattccaaaggccttcccagaccaattagcatgtcctgcagctgtcagctccctgtgcctagcctggacctcagctcatgtctagcacccagtctcccaaccccacacatattcacaaataaaagaaa

SEQ ID NO: 18800 - DNA, 438 bp, Homo sapiens
  misc_feature 37, 417: n = A,T,C or G
agtacttctagaattaattaaggcgggaggatgctangaacgggtctctgcaggatgaagcatgtggaagagatccctgggggtgtttgtctttctttattctccttttccttcccttctctccctttttccaccccagccctgccttatggcaatagcagccacacatccagataaaacataattcactttttactcgctttcaaaatgtcaacagtaaagatgaacaggatgcaagatgaaagaacattgaaaaataaagattaacaagaaagtagtttaaataaaagagagaaaaaaaaatcaccaataaaaggtagaaggctaaagataaatgaaggtagtaaaaatggctttaaaaaatcttacccaatcttacccaattcttatttagaataagttccaaaaaaaaaaaanaaaaataaaaaaaaaaaagcc

SEQ ID NO: 18801 - DNA, 304 bp, Homo sapiens
  misc_feature 280, 290: n = A,T,C or G
agtacttctagaattaattaaggcgggagcattgcctgaagccagaaatttgagatcagtctggaagataaagtgagactctatctctacaaaaaattgtaaaataaataaatcaataaataaggtattgttttgctacattatcctattttaagtgtcagaaattgaatattaccttgggttttttttttttacattttttttcattgaattctaatttcataggtagatcagtgactcagagagtctagagaaaaaagactgctcttagaagcaaaanaaaaaaaaanaaaaaaaaaaaaaa

SEQ ID NO: 18802 - DNA, 444 bp, Homo sapiens
  misc_feature 422: n = A,T,C or G
agtacttctagaattaattaagggcgggggcggcaggcttagggctggctagtttgaacaatttcagcaggctctgggtcacaggttgtctggtacttggctctagggttgactagggcatgggactagtggcccggcatgtaagcaccaaataaaggaggtgactgggagtgcagactctggatgggttggtgttcctattacaggcacacttgcaggagaatcgcttgaacccgggaggcagaggttgcagtgagctgagatcacgccactgtactccagcccaggtgacagagtgagaccctgcctcaaaaaaaaaaaaaaaaatgaaagtaagtaaacatatctatatggcacagtggggtaaatttgagggattttagggacatcttacatgggcctaggctaaaataagtcattgngttttctttatattatataata

SEQ ID NO: 18803 - DNA, 577 bp, Homo sapiens
  misc_feature 1, 31, 43, 45, 49, 53, 65, 66, 76, 104, 106, 118, 121, 125,131, 145, 146, 147, 155, 160, 229, 252, 296, 350, 354, 356,358, 365, 367, 369, 370, 375, 376, 378, 385, 392, 396, 397,398, 399, 408, 412, 415, 426, 429, 438, 442, 447, 452: n = A,T,C or G
  misc_feature 462, 505, 521, 523, 544: n = A,T,C or G
naatgattctggccgtcgttttacaccccgnaataaggggtancnatgntggntggccgggcccnncctcgagagnacttctagaattaattaaggcgggcggntnacctgaggtcanganttcnagaccngcctgaccaacatnnntaaacccnatctntactaaaaatacaaaattatctgaacatggtggcgcatgcctataatcctagctacttgggaggctaangcaggagaatcgcttgaacccangacatggaggttgcagtgaactgagatcatgccactgcactcanagcctgggtgacacagcaaaaatctgcctcaaaataacatttaaaaaaaaaatntatnancnaaacatngncnnccccnngnggggggnccccccncccnnnnttggggaanattntancccccccaccnggnccgattttntaanccagnccctnatagcctggngaatgacccccagcctgagcaccccgcttcgggcttgacctanctgaagaatactcttnangaccgtaaaaaaattcttgtnagaatgcttgaaaaagtttacaaaagaaatatt

SEQ ID NO: 18804 - DNA, 419 bp, Homo sapiens
  misc_feature 30, 35, 39, 41, 44, 50, 52, 54, 57, 58, 59, 63, 64, 66, 67,68, 76, 77, 81, 83, 89, 93, 116, 294, 295, 299, 300, 318,324, 330, 332, 333, 335, 349, 350, 351, 353, 372, 387, 391,392, 394, 413: n = A,T,C or G
gatactggccgtcgttttacacccgggaanaaganatancnatnattatngncngtnnntttnntnnnagaaaaannaaananctttangctnggggagggcggtccgtgccctgnaatagaaagacacacccaggcttgatttggatccacaggcagagccaagggaaggtgtgattctctgaggaaagagtgattctgatatatgtacttgtcacattggtgttggacacatttgcgccaaaagtatggtaattctattattaaataattctctgagaaaaaaaaaggaaanngaannaaaaaaaaaaaaaaaagncccccncccctnanntnaaaaaaaaaaaaannngncccccccccccgggggggnccccccccccccccnttannanaaaaaaaaccccccccccngggggg

SEQ ID NO: 18805 - DNA, 612 bp, Homo sapiens
agtacttctagaattaattaaggcgggcattcaaaaggattccagagccagacggttacagagctaacctttaaagaaggaaaactgtctgtctgtctgtccattcatctgtctgtctgtctatctatctatctatctatctatctatctatctatctatctatctatctatctaatcaatcatctgttttctagctttattgagggatagttgtcaaataaaatttgtatgtatttaaggtgtgcaacatcatgatttggtatatgtatacaccgtgaaatgaccaccacaactgagctaattaacacatccatcactgcaaatgcagtgagaacacttaagatctactctcctagcaaatttcaagtatacaatacagtgttattaactatagtcaccatcctgcatgttatgtcctcagaatttatacatcttattactgattatgcccttttgaccaacatttccctatttcccacagcccctggcaaccccaattctactctctgcttctgtgagttcagttgactttaaaattccacaaggtgacagcccggggcgcagtgggctcacacctgtaatcccagcactttggggagggccaaggcggg

SEQ ID NO: 18806 - DNA, 431 bp, Homo sapiens
agtacttctagaattaattaaggcgggcaaatgctcacaaagacctacgaagctgttatctctcatgtctgctttacctccaagcactgcacaagcaggaagaaaagaaaacagcaaagttgtaatctttctggctaagtaaacccaactgcaagaactagtagatttatatttgatgtgagcaggcatttgagaaaatctctgtcaaatagctagctcacatgaagctaataaagcagagatttttattgctaaacacgacaaaaggatgatattttaaaaataattttgaaaactcaccaaacaaacaagtaaaatttacaataagcaacaaaaaaaacccaacgggatgagagagaatattatttcagggttgttgtaatagaaaaagtctagttttcagcaacagcaatgaaatacaaagtgtgcaa

SEQ ID NO: 18807 - DNA, 591 bp, Homo sapiens
  misc_feature 32, 33, 34, 40, 41, 42, 44, 46, 48, 49, 52, 55, 57, 60, 62,63, 65, 72, 78, 84, 85, 91, 93, 98, 99, 101, 103, 105, 110,111, 114, 117, 118, 120, 123, 124, 126, 127, 132, 136, 140,141, 147, 153, 154, 158, 162, 166, 168, 172, 174, 175: n = A,T,C or G
  misc_feature 178, 182, 184, 187, 193, 197, 201, 210, 212, 213, 222, 245,246, 248, 250, 251, 278, 282, 284, 287, 321, 342, 365, 390,396, 398, 399, 414, 419, 420, 436, 444, 446, 447, 453, 454,456, 468, 486, 501, 525, 529, 531, 546, 576, 580: n = A,T,C or G
agtacttctagaattaattaaggcgggcgctnnnattgannnancntnntgnaantnacncnngntaatatnttgaanccatgnngctgcncnagctnnangnanaaagnncgnctnngnacnnanngctgngctnccanncattantgatgnnaaanaatnaacncncctnannganatcncnatncttganattngacnaaagcaatntnncatttctantgcctttcttacataaaattacnncntnntatcaatatgaatcaatttatcccttnattngnaantgcaacctaatgcatgccatgccccctggctaangctcattaatgaaataacatntgcattgaaaggcataacctggntccccttggccttataaatgtcccnccgccntnnggtttcccaaaaccncttcnntgggggcttccaaaanggcctttntnntttctnnanttttaaaccctnctttcctgcttccatacncccaagggttgtttnttcccctgtaaaaaccactgcctnaatntntggttcactcactantcaccatgtccttgaggcatgaacctcctnactnttggaattgct

SEQ ID NO: 18808 - DNA, 414 bp, Homo sapiens
  misc_feature 105, 359: n = A,T,C or G
aaacactgaaaagtcaagataataatttaggtacaatattttttaagataaacattaatgcaatatgatggacaaaatatcaacattttaaattaacgctgctgntgtttgataatcctccactattatgcaatgagaatggtcatttctacttaactggtggagtcccccacttggaaggacacaatggtgtccaacaggtcgggcattgtggatctttctatatagtcaattttttttattgtagagcttttattaacttttttcatttggtacaaaatatgaggggatatactgataagtgcatatacaggcatactttcttctatatttttgcctcgggctctagtatgattcancaggatactggatttaaggattcagtctgtcagctgatacagcatgaagatactt

SEQ ID NO: 18809 - DNA, 288 bp, Homo sapiens
  misc_feature 31, 33, 45, 50, 57, 63, 147, 159, 175, 181, 183, 186, 192,193, 196, 197, 198, 200, 207, 217, 220, 230, 233, 242, 244,245, 249, 250, 252, 262, 263, 267, 268, 269, 272, 277: n = A,T,C or G
agtacttctagaattaattaaggcgggatgngnttatttatctgncaatncttagangaaatnaatggacaaagcagagaattcttttactctagtaacagaatacaaatgttattatctttaattatccaaaaatattagaatagncaacagaggtangagggcacaaaaaaanaaaatnanaanttgaanntgnnncnccccacnggggggcacntcntaacccccgnggngataaaatntnnacgnntnggaaggaatnntttnnngcnaaaantggtttcaagc

SEQ ID NO: 18810 - DNA, 398 bp, Homo sapiens
  misc_feature 29, 30, 37, 39, 40, 42, 43, 47, 59, 61, 70, 78, 83, 94, 104,107, 152, 160, 172, 176, 179, 205, 211, 213, 220, 221, 227,238, 248, 253, 259, 261, 366: n = A,T,C or G
agtacttctagaattaattaaggcggggnnatactgngnntnnttanaaggctcaaggntnaaaaaatanttaaagangttgnctaaaaggaanaaacagtganctnacatgaatggagcaggcagagtctgacatagaactgaatggggtntctttctnttaaaaatcaanatcnaangccatgcttggtggctcacacctgtnaccccntnactttgnnaggccnaggctggcggntcacttgatngcttnagtctntnaccaacctggctaacatggcaaaacccatctccattaaaaatagcaaaattagccaggtatgtggtgcacgtctgtagtcacagctactcgggaggctgaggctngagaatcgcttgaacctgggaagtggaggttg

SEQ ID NO: 18811 - DNA, 108 bp, Homo sapiens
  misc_feature 61: n = A,T,C or G
agtacttctagaattaattaaggcggggtttatatgcactttcttccgatctgtacctganaggtttgtggaaaagatggcaaatggggaataaaaagattttgtgtc

SEQ ID NO: 18812 - DNA, 293 bp, Homo sapiens
  misc_feature 22, 284, 285: n = A,T,C or G
agtacttctagaattaattaangcgggggaaggaaagcgaaacaggaagggttgagagaaagaaaaagaaaaagaaaacacacaattaaggtagtgctacctgataagtctgtccagtgaggggcaggtggaaagctgacctgcgctgagattacgggtttgaggcacgcaggccttcccctttctgaaatgaaatacttttatctttattagaatttaatagtgatgataggctggaattgcatgtgccgtctggcctaaaaaaaaaaaaaaaaaaaaagtcnnaaaaaaag

SEQ ID NO: 18813 - DNA, 428 bp, Homo sapiens
  misc_feature 7, 34, 251, 253, 256, 258, 260, 263, 275, 277, 287, 400: n = A,T,C or G
agtactnctagaattaattaaggcggggtacagnggctcatgcctgtaatcccagcactttgggaggccaaggcaggtggatcacttaaggccaggagttcaagaccagcctgggcaacatggcaaaatcccatctctactaaaaatacaaaaatgagctggatatggtggtgcatgcctacatgggaggctgaggtgggaggatggaacgagcctggaaggtggaggctgcaatgagctgagatcacatnantgnantncancctgggcaacananaccccatttnaaaaataacaacaacaacaaattctagcgagctatccagagtgggaatgtgataaattgatgttagtcccctttggtacctaaaagtgttttgagtttctttaatattctttncatgacctagtcaatctgacttcattaa

SEQ ID NO: 18814 - DNA, 519 bp, Homo sapiens
  misc_feature 53, 62, 66, 71, 129, 152, 165, 184, 187, 197, 199, 205, 207,208, 209, 219, 220, 222, 225, 234, 242, 245, 249, 250, 253,257, 262, 452, 464, 469, 474, 476, 477, 478, 487, 491, 492,493, 494, 495, 496, 504, 505, 506: n = A,T,C or G
ggtaccgggccccccctcgagagtacttctagaattaattaaggcgggtaaangggtgcagnacancaacntggcacatgtatacatatgtaacagaggctgcacagttgtgcacatgtaccctaaaanttaaagtataataaaaaaaaaancagctcccctttnaaattaaaaaaaaaaagantcnggggcccccncngggggntnnncaatgacccnntnctngggaggatnttcccccnccntatnnggncctnttttntacttggaaatccgtctagttaacatttcaagggcaataccgtgttggttttgactgggatattcatataaactttttaaagagttgagtgatagagctaacccttatctgtaagttttgaatttatattgtttcatcccatgtacaaaaccattttttcctacaaatagtttgggttttgttgttggtncttttttttggnttggnttttngnnnttttttttnggcnnnnnngggggttnnnaaaaaaaaaaaaa

SEQ ID NO: 18815 - DNA, 743 bp, Homo sapiens
  misc_feature 87, 280, 283, 287, 289, 291, 301, 306, 307, 310, 334, 347,359, 364, 372, 376, 383, 390, 422, 425, 426, 429, 450, 460,491, 518, 519, 541, 555, 615, 617, 624, 625, 657, 665, 672,685, 697, 698, 699, 700, 701, 702, 703, 704, 705, 706: n = A,T,C or G
  misc_feature 707, 708, 709, 710, 711, 712, 713, 714, 715, 716, 717, 719,720, 721, 722, 723, 724, 725: n = A,T,C or G
gccgggccccccctcgagagtacttctagaattaattaaggcgggcggatcacaaggtcagatcgagaccatcctggctaacacggngaaaccccatctctactaaaaatacaaaaaaattagccgggcatggtagcgggcgcctgtagtcccagctactcgggaggccgaggcagtgaatggcgtgaacccgggaggtggagcttgcagtgagctgagatcacgccactgcactccagcctgggcaacagagcgagactccgtctcaaaaaaaaaaaanccntttntnanaaacccacanccagnnttnttttgaacagggaaaagttgaaanctttccctttganaactgaaacaanacaanattcccantttnccacttntgttcancataatacaggatgtcctagccagagcattcnccnnganaaagaattaaggggtaaaaantcagtaaagnggaagtcaaactgtggcttttcccaatgatntgatcgttttcctaaaaaaccctaaannactttttccaaaaagcccctanataaatgaatttcncccaagtttcaagaatgccaaaatcaaattttcctcaaaattaaatagcccctttttttntnacccacnngcaacccaagcctggaaaattcaaatttaagnaacctcanccctggntttttacaacaanttggcaaaaaannnnnnnnnnnnnnnnnnnnnannnnnnnggggcgcgcccccccccc

SEQ ID NO: 18816 - DNA, 725 bp, Homo sapiens
  misc_feature 487, 532, 537, 578, 592, 601, 621, 626, 641, 662, 671, 696,699, 707, 718, 725: n = A,T,C or G
agtacttctagaattaattaaggcgggaggattgcttgagtctgggaggtcgaggctgcagtgagccactgcactccagcgagtgatggagtgagaccctgtctcagaaaaaaaaaaaaaaaagaagaaaaaatatattaattcacaaaattgtcaaccacatgttgagaaatacatttttatacttgctgtatatttttcaataggtaatggttcaaaaattttaaagtacaaagggtatacagtagatggtagatttctgccacaactgtgcccacccaaccttttgtatttttccagaaacattctatacatatataaggaaatgcatataaatatatacatatataaaaacatatgcattttacatatgtgttaataccattggcacaaccacagacattatgcatgccggtttttttcacttgatgtatctgggttcttctttcctatacatttatctttttggtttcttttgagtcagaanaagttattgaagggggaaggaaggacatgcttgagctcttttaanaaaancttggaaatgtttctatgttggtgcaataagaaatattttnttgcccaatggatnaaaatgacnggctccaagaatggtttctntttcnagaactattcaattngaaaatttggttttaaacccnttattttgntaaaatttaaaattctcttaataantcntaagtaantcatgtttaanaaaaaan

SEQ ID NO: 18817 - DNA, 402 bp, Homo sapiens
  misc_feature 377: n = A,T,C or G
agtacttctagaattaattaaggcggggatgacattattcaagactattgtaatagggttcaagactgttgcaataggagaaagaagctgaactcaactctgctgatgcaaatggtggaaggatttttaagggctagggtaagctaacagaaaagtactggagtgcattatggagaaaattggtcaatgtgattcgaccatctgcttgttaattagcacttatctaagttagattacttcccctcctcaaaggcttgaatatggggtcgctatctcctttcctgcttacatttctaagacatggctttcaaatccttaagaaagacattcctgggttgtaaaactggcaagagtctgggaaaagatttacatctcanaaaaaaaaaaaaaaaaaaaaaaaaa

SEQ ID NO: 18818 - DNA, 387 bp, Homo sapiens
  misc_feature 139, 146, 149, 150, 158: n = A,T,C or G
agtacttctagaattaattaagccggggatggatcttttctaaatgttattacttgtaaataaagtctatttttctcccgtgaaaaaaaaaaaaagagaaaaaaaaaaaaaaaaaaaaaaaaaaaaaaaaaaaactatnttaaaanagnnaaaaacanttttagaaatggtgacttctgtggatttcctagcatttgtctctaacaaatggtgaaataattactcatggccctctctgccattgtctttcattttttcacagtgaaattagacccctttacttcaccattctgccactgcaaattaagtataaagaaaatagcaagagtgtccacaccagtagacagtaagcttctctacctgtaaagtgatgaaatcatagctaat

SEQ ID NO: 18819 - DNA, 718 bp, Homo sapiens
  misc_feature 300, 390, 408, 410, 448, 455, 456, 457, 467, 472, 477, 478,487, 495, 499, 508, 510, 518, 522, 523, 533, 534, 538, 539,540, 564, 571, 577, 580, 585, 589, 594, 595, 596, 597, 598,600, 601, 602, 603, 604, 605, 606, 607, 608, 614, 615: n = A,T,C or G
  misc_feature 616, 617, 618, 620, 621, 624, 625, 628, 630, 632, 633, 648,655, 657, 666, 667, 668, 669, 670, 671, 673, 674, 675, 676,677, 678, 679, 683, 684, 685, 686, 690, 693, 694, 695, 696,697, 698, 699, 700, 701, 703: n = A,T,C or G
agttcttctagaattaattaaggcggagctacagtgagctgtgatcgcatcactgccctccagcttgggcaacagagtgagaccctgccacaaattaaaaaaaataataatgacaaagtctataatatttaaatttctgaaaatgaaagactgttgaaagtcttaagagctgccagataatagcatcaccttatctatgatgggaaatgcaattagaatgacagtggatttcccatcagaaactactgcctgagaaaataacaatatttttcaagtcctggggaaaatgaaatctgtatnctcagaaattaagactttcttaaatgaaggaaacctaagagaatttatttgcagattgattctaaaaaatggctaaaggggcctgtaatnccacattttgggaggccnangtgggccgatcagggaaatcaaaagtttggaaccaccnggctaannngggaaaaacnccttnttctnnaaaaaaaanaaaaaatngggnggggggggngnaaaaaccnccgnnggggggctcnntttnnnggggggggggggggaaaaaataantttttcncccccnccncgggngggnggggnnnnngnnnnnnnnnaaaaannnnncnnttnnctncntnnggggggggggggggngggaatntnttttttttnnnnnnannnnnnnaatnnnncccnaannnnnnnnntnttttttttttttttt

SEQ ID NO: 18820 - DNA, 243 bp, Homo sapiens
  misc_feature 25, 29, 34, 72, 98, 142, 153, 179, 193, 199, 207: n = A,T,C or G
taaacgcaattagtcaaacctagantgtngaaanccacacaaactatttcagctttaggttttataaccaantgaatttcaaagaaaaaaaatatcantgggatgggattacctaggaggcatatctaccaattgccatatnaggactacttnggatcccaatttaaatgaaaaactgngtatgtgtgtgtgngccaanctgaaatnttggaacaatgaatatttcataatattaaggaatta

SEQ ID NO: 18821 - DNA, 192 bp, Homo sapiens
agtacttctagaattaattaaggcggggctaaaatagcggttttatactacagccattaagtatggtggaagcaggcagggattccctgttatgtctcttgagtttacctgacaggcctttcttctgatgatgcctaatgatggcaagttaccgttctactacagttttcccacttaaacaattatttctaa

SEQ ID NO: 18822 - DNA, 211 bp, Homo sapiens
  misc_feature 39, 43, 61, 64, 66, 102, 127, 135, 147, 150, 152, 157, 174,176, 178, 181, 192: n = A,T,C or G
agtacttctagaattaattaaggcggggagaggagtggnattngatgctttctgtggacantgnanccctaaacacatcatgtattttaaatgccacctacntaaataaaacataagcttattgctnaaatttgnacaaaaaaatcnaananaacangagaaaatggactctanangncanatgaaattcanggaacaaaaaccaaaccta

SEQ ID NO: 18823 - DNA, 325 bp, Homo sapiens
  misc_feature 68, 85, 91, 100, 154, 159, 160, 174, 186, 195, 217, 245,248, 249, 250, 257, 285, 297: n = A,T,C or G
agtacttctagaattaattaaggcggggtaaggggtggtgatcctgccaaataggctaggaacactgntaaacatactacaatgnataaancagcctttncaccaccaccaccactcagttgtaatgatacaaaatgccctgaggggtgaattnactcnnttgagaaccattgnattagagtgtanacttctggnaatgaaattccatcagattatncacatttttaaaaaccttaatatctcanctnnntttgatncttatatctcaaacttcaatgttcttgncaagaataccangtaaagcccttgtgggcttcttattgtt

SEQ ID NO: 18824 - DNA, 733 bp, Homo sapiens
  misc_feature 16, 33, 44, 60, 83, 92, 95, 96, 99, 100, 102, 104, 117, 120,121, 129, 134, 182, 185, 288, 297, 300, 307, 310, 312, 337,344, 347, 352, 357, 360, 384, 386, 450, 485, 486, 489, 490,499, 507, 512, 514, 559, 603, 611, 619, 645, 649: n = A,T,C or G
  misc_feature 654, 673, 676, 677, 693, 711, 712, 716, 721: n = A,T,C or G
gggagtcgacgcgtantacgtgttctgcgaccnggaaccaccgntgggttttacgccccnccctcgagagtacttttagaatnaatcacggnggnnagnngntnacaaagacctacnaanntgttttangccanggctgctttacctccaagcactgcacaagcaggaagaaaagaaaacancanagttgtacatctttctggctaagtaaacccaactgcaagaactagtagatttatatttgatgtgagcaggcatttgagaaaatctctgtcaaatagctagctnacatgacgnttnttggtgnctngncttttattgctaaacacgacaaaangatgatnctnaaaantaatnttnaaaactcaccaaacaaacaagtanantttacaataagcaacaaaaaaaacccaacgggatgagagagaatattatttcagggttgttggnaatagaaaaagtctagttttcagcatctagcctgnnganncaaagccgngccctatnaattnangaaaaaataatggcccctaataaagataaccagatttttttaccnggaaacaggccctagaggaatcgttaggccatttgaaaaaattnttagaaanaaagggcnttttaaaattacccttgtcttaaaantgtngctgncaaaagaattaaattaacnatnnaaaaagggaaaaaacntttttcaaaaaaaaatanngggntcttnatttccaaaatt

SEQ ID NO: 18825 - DNA, 226 bp, Homo sapiens
  misc_feature 29, 31, 32, 36, 44, 54, 56, 60, 64, 74, 79, 102, 151, 155,163, 190, 209, 213, 217, 221, 223, 224, 226: n = A,T,C or G
agtacttctagaattaattaaggcggggnannaggnagattcanttggcttacnanagantggnaagaaaaganttggncacatggaatagggccaacttgntgaacaactagctagtgtatatacaaaagatacttttaaaagataaaantacntttaaaanaatatgtaaaaatggaaaaggcaaaangtcagaatgaaataaaaanaagnaatngatnannan

SEQ ID NO: 18826 - DNA, 207 bp, Homo sapiens
  misc_feature 36, 182: n = A,T,C or G
agttcttctagaattaattaaggcgggtaggcctangattgtgggggcaatgaatgaagcgaacagattttcgttcattttggttctcagggtttggtggaaattttttgttatgatgtctgtgtggaaagcggctgtgcagacattcaattgttattattatgtcctacaagcataaaaanaaaaaaaaaaaaaaaaaaaaaaagg

SEQ ID NO: 18827 - DNA, 298 bp, Homo sapiens
  misc_feature 37, 43, 50, 56, 59, 60, 74, 75, 76, 79, 80, 81, 82, 87, 90,91, 92, 95, 104, 105, 110, 111, 112, 113, 114, 122, 131,133, 289: n = A,T,C or G
agtacttctagaattaattaaggcgggggggggttanaaaatnacacctnaaactntannaaataaaactacgnnnccnnnnccganggnnnctnacttttccnnataannnnntccacctnggacccccncnagaggactagtttaaacatttgagctggagaggcttatgggcaatatgaagtgggccaaattcttgcaatacaccctattcaattgaaagtcagtgtctaaggataagaatacttctttaaagaccaacaattgttttaatgcaatcttaaattantaaatggtt

SEQ ID NO: 18828 - DNA, 426 bp, Homo sapiens
ggtaccgggccccccctcgagagtacttctagaattaattaaggcggggtgatcaggaatgccttggagaaggatcaggagggaatgaaggggcaaatcctgcagatgagggagagaaggacattgcaggcaaagggaactgcaaatgagaaaactctgaagcagatgcatgtctgggatattccaagaacatcaaggatgttagttgggctaaaatgagtgagaagatgcttggttgaagatgtggaaaaagagtgggagtgaccctcaaggccagaaacagaaagttctttttctgggtgagcagggagccattggaagggtctgaaggagaggagaatgttgtaatctgactggtgattttagaagatcactctggctgctgtgttgagaacatgccttgctgaagtaagagagtaagggaga

SEQ ID NO: 18829 - DNA, 304 bp, Homo sapiens
  misc_feature 6, 26, 34, 90, 98, 122, 126, 135, 136, 143, 225, 244, 255,286, 290, 295: n = A,T,C or G
taagtngggcggggggtacaatatanactctatncacataaaaaagataatacagaaatgttatgaacaaatccatgtcaataaattcangaatttanatgaaatggacaaactccatgaangacnaactaccannggttacncaagaacaaatagataacctgaatagccctaacctattaaagcaaatataatccatagttaaaaattagatattttccagtnaaggaaattccaggtctanatggattcacngatgaatgctaggaaacatctaaggaagacntaanaccanacttacaaa

SEQ ID NO: 18830 - DNA, 165 bp, Homo sapiens
agtacttctagaattaattaaggcggggtaatttttaaattcatatcaatcatggatgagtctcgatgtgtaggcctttccattccatttattcacactgagtgtcctacaataaacttccgtatttttaaaaaaaaaaaaaaaaaaaaaaaaaaaaaaaaaaaa

SEQ ID NO: 18831 - DNA, 688 bp, Homo sapiens
  misc_feature 457, 487, 521, 544, 552, 578, 587, 596, 599, 605, 607, 614,625, 630, 634, 654, 655, 659, 667, 675, 683: n = A,T,C or G
agtacttctagaattaattaaggcgggcagatcacgaggtcaggagttcaagaccagcccggccaacatggtgaaaccccatctctactaaaaatacaaaaattagtcgggcatggtggcggacacctataatcccagctacttgggaggctgaggcagtagaatcgcatgaacccaggaggcagaggttgcagtgagccgagatcgcgccactgcagtccagcttgggtgacagagcgagactctgtctcaaaaaaaaacaacaaatcagttgccttttacatactgggtccacataaggactgtgctatagttagattgtcaacatcacatatagtgtcctggtcaggctgcaactctctccaaagcatgctcttcacatgctttagttcaaaatgagtcattatatcttgattgctgcgtggcaggctattctgctagtccttcctttcacatnccatttcagtaatggtgcttggaaaattgngctttcagtgtgtcttataaacttttggtctganagtcacttaaaaaaaaagggctnacttgtantggcttttcacccagtaattcccacncttgggggngacttgaanccnggaaanantgctttnaaaccaagaanttttngaanccccccctgggcaaatttannaaanaaacccgntctttttntaaaaaanttaaa

SEQ ID NO: 18832 - DNA, 269 bp, Homo sapiens
  misc_feature 87, 99, 106, 169, 174, 175, 176, 188, 191: n = A,T,C or G
agtacttctagaattaattaaggcgggaattctaccactggtggttcagtggtagaattctcgcctcacacgcgggagacccgggtncaattcccggtnaaggcangaggaaagagaaagccaagatccaccaccggaagaagaaacagctcatgaggctacggaaacnggccnnnaagaacgtgganaanaaaattgacaaatacacagaggtcctcaagacccacggactcctggtctgagcccaataaagactgttaattcctcaa

SEQ ID NO: 18833 - DNA, 745 bp, Homo sapiens
  misc_feature 526, 572, 622, 649, 663, 672, 675, 681, 686, 709, 711, 719,723, 734: n = A,T,C or G
agtacttctagaattaattaaggcgggggttttctagttccttagagaaatattaaacagtggagaattgaaggtagagatgaatccttgaagtgcatgaaacgagcactgatagtttcataacttctctaattgctaagtaacctgaagtgtgtcccaaaggttgcacgttttactttaaagctcattttgacttttaaaaatgtcagttttctctgctaaacagacttagccatttaagatctcataaatagtcctgtttttcaaaaaaattatgacagtatagtcagcttatagtcagcttattgttatcagtctgaattaagagatatactcttccttcttttgctaattatgtattattttctccttattctgcagcctgtgactgtcatcctgagggatctctttcacttcagtgcaaagatgatggtcgctgtgaatgcagagaaggctttgtgggaaatcgctgtgaccagtggtgaagaaaaactatttctacaatcggtcttggcctggctgccangaatgtccagctttgtacccggctgggtaaaaggaataagggtaangctgtcaatagtgcatttcatttcattccatccagccagaccgttgagtnggcaacttactgggccactaatctctntagaaaaaagtggnggaaccaanggnagattntgggncccctgttcttaaaaagaccttntngtttccantttngggggggccanttttttaaaaa

SEQ ID NO: 18834 - DNA, 565 bp, Homo sapiens
  misc_feature 171, 174, 175, 178, 179, 182, 183, 190, 226, 228, 231, 246,252, 255, 258, 259, 280, 292, 318, 319, 327, 328, 329, 332,333, 343, 351, 353, 354, 361, 363, 368, 372, 391, 399, 407,420, 423, 431, 432, 433, 439, 440, 441, 442, 450, 466: n = A,T,C or G
  misc_feature 470, 472, 475, 483, 484, 485, 490, 495, 498, 508, 512, 517,525, 532, 536, 537, 543, 550: n = A,T,C or G
agtacttctagaattaattaaggcgggggcatcagtaaacattttgaaaagttgagtttgaaaccaggctttactagcatttgaaaagggtggtcctggtagggcaatttggcttcaggaactgttgtaaacaaaggcaatgtgacacatataaaccagtttgggctgganctnnctnnatnngaaaaantttctacaaggtttcctcccatttaaaacaaaaggncnaantcgtcaagtgtaacncttatnttnttnngggttttattccaaactaaantatgtgcctttnttccctcaaaatctacattttctgtnnaaaaaacnnntanncccggggccncaaccctngnncataatncnatgtntccnccatagcctttgctcatcntattaaanaattaaanaaaagtgggcttnttncccccccnnnggtgannnncccccccntttgttcccccacccntttntnggnatggttgnnngccgncttanttncccgggtcgngggnggttnttttgaancaacccntttnntcaaancaatgtnccccccctttttttt

SEQ ID NO: 18835 - DNA, 381 bp, Homo sapiens
  misc_feature 147, 149, 150, 151, 152, 161, 169, 170, 173, 174, 175, 176,177, 182, 183, 184, 185, 186, 188, 189, 191, 192, 193, 194,197, 198, 199, 209, 210, 211, 215, 216, 218, 222, 223, 230,231, 232, 233, 234, 235, 236, 237, 238, 239, 240, 241: n = A,T,C or G
  misc_feature 242, 243, 244, 245, 246, 247, 248, 249, 250, 251, 252, 253,254, 255, 256, 257, 258, 259, 260, 261, 262, 263, 264, 265,266, 267, 268, 269, 270, 271, 272, 273, 274, 275, 276, 277,278, 279, 280, 281, 282, 283, 284, 285, 286, 287, 288: n = A,T,C or G
  misc_feature 289, 290, 291, 306, 309, 312, 321, 328: n = A,T,C or G
agtacttctagaattaattaaggcggggcaggaatcaaagacagatactgcgacatagggtgctccggctccagcgtctcgcaatgctatcaaaaaaaaaaaaaaaaaaaaaaaaaaaaaaaaaaaaaaaaaaaaaaaaaaaaaaangnnnnccccccccngggggggnnccnnnnnccccnnnnnanngnnnnttnnncccccccccnnngggnngntttnnaaaaaannnnnnnnnnnnnnnnnnnnnnnnnnnnnnnnnnnnnnnnnnnnnnnnnnnnnnnnnnnnnntgtgtcactgcactncancangggtgacanaaatctnatctcttaaataaaattaaaaaaaaaataaaaaatactcttaaataaaattaa

SEQ ID NO: 18836 - DNA, 443 bp, Homo sapiens
agtacttctagaattaattaaggcgggggaagctcttggaagttctacatgtaaaatcacataatttgtgaacaggaaaaaatttccttcttcctgtccaattctgatatcttttctttttcttgtctaattactctgactagaacatccggtactatggcgaatagtagtggtaaaagttaactaagtctcaatagatttttttaaatagaataaaaaataatagtaagttaaaatataaaatgattgtataacacacattcaacatacgaatatacatttacactgttaatatataaatacaaaataaagtaaaatataaaataatattagctcggtgcagtggctcacacctgtaatcctaacactttaggaggcaaagacaggaggactgcttaatgccaaggagtttaagaccagcctggacaacatagtgaaatcct

SEQ ID NO: 18837 - DNA, 208 bp, Homo sapiens
agtacttctagaattaattaaggcgggtgatggtggctatgatggtggggatgatgaggctattgttttttgtgaattcttcgataatggcccatttggccaaacacagaatcagcaaagaggaggccatgcgctggttccagcagaagtatgatgggatcatccttcctggcaaataaattcccgtttctatccaaaagagcaataa

SEQ ID NO: 18838 - DNA, 384 bp, Homo sapiens
  misc_feature 68, 92, 110, 120, 136, 189, 222, 233, 252, 255, 340, 352: n = A,T,C or G
agtacttctagaattaattaaggcggggagaggaaagaaggaaggaaggaaggaaggaaaagaagggnattagattataactcaaaacattnaaaaaaaatccttgggtncacgttgatntaaataaatgactaantaagaacttccaataatttatataaatcctctgtcttaaagagatgggctgtnagtccctcctccttaagtgtgggccatgcatancaacttccttncaaagagcactgaacagangtnttgggggggggagcggggtcactttacagcattagaagcctgactaacacaatctcagccaggtgatcaaggtaaaagcagccantgataatccatnttgatagtattgtacccttggcatgatgtgat

SEQ ID NO: 18839 - DNA, 457 bp, Homo sapiens
  misc_feature 22, 23, 24, 27, 96, 101, 102, 185, 236, 256, 309, 310, 349,357, 363, 381, 401, 409: n = A,T,C or G
aaaagctgggtaccgggccccnnntcnagagtacttctagaattagattaaggcgggcatgcgtggtgggcgcctgtagtcccagctactcaggangctgnngcaggagagtggcagtgaacccgggaggcggagcttgcagtgagccgagatcgcaccactgcactcccccctgggcaacagancgagactccatcttttaaaaaaaaaaaaaagaattagtgaagattcaccangggttgagctcaaggattgngtgggggacctgacaattctttaggcaaagggaatgacctggataaagatacnnaggcaagcaaacattgctaaaaatagtatcctttgtaanctctattncttggncctgagaaaataaaatgnatagctttatttatttctgngaaatganttaccaatgggtactgctattcaaaaaagcaaaacagtgcaattcttt

SEQ ID NO: 18840 - DNA, 496 bp, Homo sapiens
agtacttctagaattaattaaggcgggcgcctgtagtcccagctactcgggagactgaagcaggagaatggcgtaaaccctggagacagagcttgcagtgagccgagatcccaccattgcactccagcctgggtgacagagcaagactctgcctcaaaaaaacaaaaaaaacaaaaaaaaaaacaccagagaaaactcctaaattcactctgagaaagaaaaaggtgaatgagaattttcaacaaataaaatatacagatattattttctgaaactcacctttttatgctctttgtaaatattttcttacctttcaagccctactaataaaatgcaatttacagttaaaaaactgaggtcagccgggcacagtggctcacacctgcaatcccagcactttgggaggccaaggtgggcagattacttgaggtcagaattttgagctcaaacagcctggtcaacatggcaaacccccatcttttactaaaaatacaaa

SEQ ID NO: 18841 - DNA, 296 bp, Homo sapiens
  misc_feature 35, 38, 39, 41, 44, 50, 53, 54, 57, 59, 73, 76, 80, 81, 84,209, 210, 237, 252, 259, 260, 273, 274, 275, 277, 278, 279,280, 281, 282: n = A,T,C or G
atactggccgtcgtttccacttttcaccccggaanaanngnaanccatgntgnntgncnggccccccctcganagnactnntanaattaattaaggcgggtgttgggtttgttatgggttaaagtgcttttgaaataagtaaattattagtttgattttcaaaaaaaaaaaaaaaaaaaaaaaaaaaaaaaaaaaaaaaaaaaaaaaannaaaaaaaaaaaaaaaaaaaaaaaaaanccccccccccccccnggggggnnccccccccccccnnnannnnnntttttccccccccc

SEQ ID NO: 18842 - DNA, 433 bp, Homo sapiens
  misc_feature 396, 415: n = A,T,C or G
agtacttctagaattaattaaggcggggccgcgaagttaaaacttccaggatctttgaaagaaaagagaacaaagctgaagatatcatgtgcatcaaagtaaattccagatgaagaatgaatgtaaaatatgaaataattcaaagcactgtggaaacacaggtaggatttatctgagcttcaaggtggagaaagccttttcaagtgcaatagtaaaagaaccaatcaaaagggaaaataatgcattaattatataaaaatgaaaaacaatgcaaaattaaaaagaaaagaaaaaccaagtaacaaatgggaaatatttgtaatacagcaactaagttaatatccttaatacatgaagggacatacataaggaaaaaaataaatatcaataaaatgngcaaaagacacaaataggncactcaccaaagtagaaa

SEQ ID NO: 18843 - DNA, 260 bp, Homo sapiens
agtacttctagaattaattaattatccacaagtgtgttgactcaaagcctttgttattaaatctgtgctgaataaatgcccacagggccagctagtcaggttatatggctgctacaactctttctgtgagtggcctggttccctagccactctttcactttatatcggtgtctgagtatgttattcatccaccgtgcagcctgggtctgcaggtcagaccccagcatttactcaaaaaaaaaaaaaaaaaaaaaaaaaaa

SEQ ID NO: 18844 - DNA, 420 bp, Homo sapiens
  misc_feature 39, 45, 49, 87, 171, 182, 187, 188, 220, 232, 235, 271, 281,298, 299, 302, 303, 306, 308, 309, 323, 348, 351, 353, 358,359, 365, 373, 374, 375, 376, 382: n = A,T,C or G
agtacttctagaattaattaaggcgggggagggaaactnattttnattngcctgatttaagtgtctgataaacaaatctttgttctnttaggctgcaatggaacaactttaccagggttttggcatttcctttcctttcctttataaaacatgctcagcaaactgcaccanttaactacagnttggnnaattgttatgttaacaattatgacatctgcantgttttataaancanctaatttaataaaatcactgttgtgaggacgctccntaaaaactantcctgttgggctagtcnnccnncancnngggggactctcctncacccattggaagggcttaaaaccnccncnccacnntcaccntttttaannnntacttntacctacgcctaatctactccacctcaatcacactact

SEQ ID NO: 18845 - DNA, 102 bp, Homo sapiens
  misc_feature 27, 70: n = A,T,C or G
gtgaagatctttgtaagtagcacctantgcagtgattaactgctgctggaaggccttccatatgccctgntaaaatcataaactcctcctgcccccaaataa

SEQ ID NO: 18846 - DNA, 435 bp, Homo sapiens
agtacttctagaattaattaaggcgggttatgcagttctctaaatgacgtcattgaaagtacatctctccctccaagcacaagcactcaattagttgagctaatagctctgacaataacacttaaattaaacaatggaaaggtagctaacatttacactgactccaagtatgctttcctggttttccatgctcatgctgtcatctggaagggaagacattttcttaccactaatggatctcctgtaaaatatcaccaggaaattatcaggttattatcttcagttttccttccatgagaaatagaagttatgcatttcaggggacatcaaaagggaacagatgaggtagcctaaggaaatagactagatgatcaggccgctaagtcagcagcaaggaagcctcaagacatcaacacacttcaaaaccctctaatc

SEQ ID NO: 18847 - DNA, 531 bp, Homo sapiens
  misc_feature 25, 35, 38, 41, 44, 49, 50, 64: n = A,T,C or G
atactggccgtcgttttcaacccgnaaaaaagggnaanctntgntggtnncgggccccccctcnagagtacttctagaattaattaaggcgggcgcctgtagtcccagctacttgggaggctgaggcaggagaatggtgtgaacccaggaggcggagcttgcagcgagctgagatcactccactgcactccagcctgggtgacagagcgagactccgtctcaaaaaaataaaataaaataaaataaaataattttaaaaagtgttgtatatatttacatatatacacatagatacataaaggaaagacaggcaggaaccacatgccatgctcaagatctagggctttctcttctaagcaaacagtgaagctccagagacacatttttaggcaggtaggtgagatcagagcttccttctggaaggaaataaggtaggtcagaagcgaggcccactttcccttcccctggttcacagagaggtaacagtaccagcaactacccaatctttccatctgtaaggattggaccaag

SEQ ID NO: 18848 - DNA, 329 bp, Homo sapiens
  misc_feature 30, 33, 36, 38, 41, 42, 43, 44, 49, 66, 69, 75, 78, 86, 97,98, 100, 106, 112, 114, 115, 116, 118, 122, 147, 168, 187,215, 231, 238: n = A,T,C or G
agtacttctagaattaattaaggcgggggnggngtntngannnnctacntacaaccctcacatttnatnattttntantccaactnacacaaataannanctgttntactgngnnngntggngcacacctgtaatcccaacttctcnggaggctgaagcaagaaaatnacttgaaccctggaggcanaggttgcaaatgagccgagatcacaccnctacactccagcctangcaacanatcaagactctgtctcaaaaaaaacaaaacaaaaaggaggcacaaaaccccaggcttcaagtctctgcagcctgctccacatttgggcaca

SEQ ID NO: 18849 - DNA, 335 bp, Homo sapiens
  misc_feature 233: n = A,T,C or G
agtacttctagaattaattaaaagctgatattcaggcttttttttttttaagaaaaaatacctttctgctttttctcatttggagcctgtttctgggaatttttttttttttctgttgactgaaacccctttttacatatgtttagtccctttgtttgcttcttttcttgttagtatgatgtaaagttttattggccttctgaaaaacttaaaatctccccaaattggcttanagctctcccattttcttctactttttcttcctttagctatctttgataccacataaagaaatctagaggagtcttctaatatctctgagaccctttgaggaa

SEQ ID NO: 18850 - DNA, 362 bp, Homo sapiens
  misc_feature 334, 336, 343, 351: n = A,T,C or G
agtacttctagaattaattaaggcggggaggagaaatagaagcagtaaaggagccttcgaagaggtaagcaagtaaatacggatgaaaaccagaagaggataatgtgctatgagcccagtgaagaagtcctctggaaaatggatcaagtgcttcagaagactgagaattgaaccttggattcagtaacatggaggtcagtaatgacttttatgagaagagttttggtggaacagtcagggaaaaagtaagatacaattggcttacgagagaatgggaagaaaagaattggacacatagaatagggccaacttgatgaacaactagctagttatntnctaaaanaaaaaaanaaaaaaaaaaa

SEQ ID NO: 18851 - DNA, 392 bp, Homo sapiens
  misc_feature 47, 86, 89, 101, 109, 114, 115, 207, 244, 319, 344: n = A,T,C or G
agtacttctagaattaattaaggcgggggttattaaagaggaaattngagccacctgattacaaacacataatcaaagcttctgancantcacaaaatganataaaggnttcanngttttcaccaaaaactgatatactaattcctgtgagtaaatgagatcttcaagaaagagaatgtaaaaattgaagaacttaggacatgttgntcaatcttagggaatagacatttgaaagaaaaggaangaacatgaggaatgaagggaacaaatgagaaacatgtgcctgctatcaacttaaagttggtgaagcaaattggtnaacattggcgaattttattgggggnattgatgacccaaactctaagcttctttggaaattgggaatttttcca

SEQ ID NO: 18852 - DNA, 693 bp, Homo sapiens
  misc_feature 28, 29, 30, 34, 37, 39, 40, 46, 49, 57, 59, 70, 74, 77, 81,106, 141, 160, 171, 184, 188, 191, 192, 202, 252, 256, 272,291, 315, 326, 328, 337, 357, 429, 442, 452, 461, 510, 513,515, 542, 544, 548, 556, 576, 580, 633, 653, 654, 667: n = A,T,C or G
  misc_feature 678: n = A,T,C or G
agtacttctagaattaattaagggggannnaatnggnannaagtgntanttgagaancnctggctgatantatnttncaangctgatgaaaaacatcacaccaganaattcagaacctgtccaaaccataagcaagataanatgatgaaaagccacttangccccataccnattgctggaaatnaaanacnnagagaaaatnttaaaagtttccagagattatggctgacttctcatcaaacaatggtatcntatntacaacgtgtaaatanaaaataactgccaacctanaattctatactcatcacaaatatnccttgaaaatnantgtaaaatnaagatttttttacaaaagcncaaactaagagaattcattacaagcatactaaagaaattcattaccagtccactaaagaatatattacccangctaaaaaaaaanctgaaagaanattctttgngcaaaaggaaaattatcctggctggaagccctctgatttctttacgaanttnanagcctctaaagggtacttttgtgggtnantccnaaccactnttggacatgttatttacccncctntttaccccattataattccttatgggtataaaaaaaaaccttggatttaaaangcctgacattttgcccccanntgaaagggggggngtactgggatnaaagtttttttcccc

SEQ ID NO: 18853 - DNA, 211 bp, Homo sapiens
  misc_feature 98, 99, 100, 101, 126, 128, 129, 130, 131, 133, 139, 141,148, 149, 150, 151, 152, 154, 156, 157, 159, 162, 163, 164,166, 172, 173, 175, 179, 180, 192, 193, 195, 201: n = A,T,C or G
agtacttctagaattaattaaggcgggggacgggacttaaataaaggcagacgctgtttttctaaaaaaaaaaaaaaaaaaaaaaaaaaaaaaaaaannnnaaaaaaaaaaaaaaaaaaaaaaaancnnnncncccccncnggggggnnnnnancnncnccnnntntagggnntntttnnccccccccttgnntngcgttnaaaaaaaaac

SEQ ID NO: 18854 - DNA, 116 bp, Homo sapiens
  misc_feature 28, 37, 46, 49, 50, 53, 55, 56, 61, 76, 82, 86, 89: n = A,T,C or G
agtacttctagaattaattaaggcgggngaacagggncgataaatnacnnccntnnacacngtaaattattgacangaggtnactntancctgcttaaaaagagattttggggcaa

SEQ ID NO: 18855 - DNA, 271 bp, Homo sapiens
  misc_feature 26, 30, 33, 35, 41, 44, 45, 48, 56, 144, 163: n = A,T,C or G
ctggccgtcgttttacaccccggaanaagnggnanccatgntgnntgncgggcccnccctcgagagtacttctagaattaattaaggcgggtgtggtggtgcatgcctgtaattccagctactcgggaggctcccgggaggcanaggttgtggtgagctgganatcgtgccattgccctgggcaacaggagcaaaactccatctcgagaatagaatataatagaatagaatagaatagaatagaatagaatagaatagaatagaatagaat

SEQ ID NO: 18856 - DNA, 738 bp, Homo sapiens
  misc_feature 498, 524, 551, 558, 608, 618, 633, 645, 649, 683, 691, 702,718, 720, 730, 731: n = A,T,C or G
agtacttctagaattaattaaggcgggagttttttcctaaaattgtaatataacttagtgatttagatcccaaactctagagtcagataggtccaggttccaattctagcttagcctctgcctagttgtatgaccattagcctcagtctcttaatctgtaaaatggggacaataatggtacctttctcataaggaaaattaatccaggtttatgaaatagccaggacaagtaagcagccaagagatgttagctattattattatcttatgattatgcaattcttgttccctgatctatttgtcatccactttcagacttccttgtggatgagaagtttggactaatctctatactctttctcccccagcctcctttgaaaaaggcacattctcagctgggtgtggtggctcacgcctgtaatcccagcactttcggaggccgaggcaggcggatgacaaggtcaagagatcctggccaacatggggaaaccccgtctntactaaaaatccaaaaaattaagctnggtgtgaatggcaccatgcccttgtantccccancttacttcgggaagggcttgagggcagggagaatcaccttggaattccanggaaggccanaaggttgccagtgancccaaaaatttngcanccacttggtacttccaagccctgggcggacaagnaccagganctttcattttnaaaaaaaaaaaaaaananggaaaaatgnnaaaaaaa

SEQ ID NO: 18857 - DNA, 175 bp, Homo sapiens
  misc_feature 132, 133, 143, 144, 145, 146, 147, 148, 173, 175: n = A,T,C or G
agtacttctagaattaattaaggcgggagcggctatttttcctaaatgagaattgttacattgcaaattgttgaataaaatattttgcgctccttcaaaaaaaaaaaaaaaaaaaaaaaaaaaaaaaaaatnnaaaaaaaaannnnnnaaaaaaaaaaaaaaaaaaaaaaaangn

SEQ ID NO: 18858 - DNA, 773 bp, Homo sapiens
  misc_feature 273, 274, 275, 276, 277, 278, 279, 280, 281, 282, 283, 284,285, 286, 287, 288, 289, 290, 291, 292, 293, 294, 295, 296,297, 298, 299, 300, 301, 302, 303, 304, 305, 306, 307, 308,309, 310, 311, 312, 313, 314, 315, 316, 317, 318, 319: n = A,T,C or G
  misc_feature 320, 321, 322, 323, 324, 325, 326, 327, 328, 329, 330, 331,332, 333, 334, 335, 336, 337, 338, 339, 340, 341, 342, 343,344, 345, 346, 347, 348, 349, 350, 351, 352, 353, 354, 355,356, 357, 358, 359, 360, 361, 362, 363, 364, 365, 366: n = A,T,C or G
  misc_feature 367, 368, 369, 370, 371, 372, 373, 374, 375, 376, 377, 378,379, 380, 381, 382, 383, 384, 385, 386, 387, 388, 389, 390,391, 392, 393, 394, 395, 396, 397, 398, 403, 417, 418, 421,427, 429, 430, 435, 451, 453, 480, 485, 490, 491, 494: n = A,T,C or G
  misc_feature 502, 506, 532, 540, 541, 547, 554, 562, 576, 590, 591, 603,604, 608, 622, 624, 632, 646, 649, 656, 657, 667, 668, 669,672, 675, 676, 677, 680, 685, 686, 687, 691, 696, 701, 702,718, 722, 725, 727, 728, 737, 739, 741, 747, 756: n = A,T,C or G
agtacttctagaattaattaaggcgggtggatcacaaggtcaagagatcgagaccatcctggccaacatagtgaaaccccatctctactaaaaatacaaaaattagctgggggtggtggtgcgtgcctgtagtcccagctactggggaggctgaggccggaaaatcgcttgaacctgggaagcagaggttgcagtgaaccgagatggcgccactgcactctagcctggtgacagagcgagactgtctcaaaaaaaaaaaaaaaaaaaaaaaannnnnnnnnnnnnnnnnnnnnnnnnnnnnnnnnnnnnnnnnnnnnnnnnnnnnnnnnnnnnnnnnnnnnnnnnnnnnnnnnnnnnnnnnnnnnnnnnnnnnnnnnnnnnnnnnnnnnnnnnnnnnnaaaanatttccccttttcnncanttgggntnnatacnaaaaaggccccaaccnantttccccttttccaaaaaattttgccnacccnttaannggngaaatggnaaantttttaagcccttaaaattttttttnttaaaaannccccgnttaaaantttttttntgaaaaaaaaaccncttttttttttaannaaaaaagggccnnaaanatggggaaaaaatncntttttttnaataaaaaaaaaanatnacccccnnaaaaaggggnnnggnttnnntcnccccnnngggnaaaanaaaannccctttttttaaaaanaaanggngnnttccccctnanangggggngaaaaaaantttttttttgggggggg

SEQ ID NO: 18859 - DNA, 260 bp, Homo sapiens
  misc_feature 22, 34, 37, 43, 51, 61, 62, 67, 72, 76, 77, 236, 238: n = A,T,C or G
atatactggccgtcgttttcancccggaaaaaanggnaacctntattggtncccgggcccnncctcnaaagnactnntagaattaattaaggcgggaggggggggtttgtttaaaatagtaaatcagtaagtcacttctaaatttaaagaaaacaaaattggagttgaagaataagtaggtttccaattggctattgccgttttctttgaaaaaataaacattttttaaaaaaccnantaaaaaaaaaaaaaaaaaaaaa

SEQ ID NO: 18860 - DNA, 568 bp, Homo sapiens
  misc_feature 20, 21, 37, 38, 44, 45, 75, 86, 115, 117, 130, 138, 153,160, 188, 189, 190, 191, 192, 193, 194, 195, 196, 197, 198,199, 200, 201, 202, 203, 204, 205, 206, 207, 208, 209, 210,211, 212, 213, 214, 215, 216, 217, 218, 219, 220, 221: n = A,T,C or G
  misc_feature 222, 223, 224, 225, 226, 227, 228, 229, 230, 231, 232, 233,234, 235, 236, 237, 238, 239, 240, 241, 242, 243, 244, 245,246, 247, 248, 249, 250, 251, 252, 253, 254, 255, 256, 257,258, 259, 260, 261, 262, 263, 264, 265, 266, 267, 268: n = A,T,C or G
  misc_feature 269, 270, 271, 272, 273, 274, 275, 276, 277, 278, 279, 280,281, 282, 283, 284, 285, 286, 287, 288, 289, 290, 291, 292,293, 294, 295, 296, 297, 298, 299, 300, 301, 302, 303, 304,305, 306, 307, 308, 309, 310, 311, 312, 313, 314, 315: n = A,T,C or G
  misc_feature 316, 317, 318, 319, 320, 321, 322, 323, 324, 325, 326, 327,328, 329, 330, 331, 332, 333, 334, 341, 349, 354, 387, 390,394, 398, 406, 418, 419, 429, 436, 440, 449, 453, 461, 462,473, 482, 484, 486, 508, 509, 513, 526, 528, 552, 553: n = A,T,C or G
  misc_feature 559: n = A,T,C or G
agcagggttccgggcccccnntccagaggttttaaannaccaannaaggcgggagggaatgctcgggaagggggncatttttaggnaagcgggggggggagcaccattggaaggngnaaaaaacggagancaaaaagnaaaagggggcaaacncgggccnaaaaaaaaaaaaaaaaaaaaaaaaaaannnnnnnnnnnnnnnnnnnnnnnnnnnnnnnnnnnnnnnnnnnnnnnnnnnnnnnnnnnnnnnnnnnnnnnnnnnnnnnnnnnnnnnnnnnnnnnnnnnnnnnnnnnnnnnnnnnnnnnnnnnnnnnnnnnnnnnnnnnnnnnnnnnagcgggncggaaaancgaanaggcccgcacccgaaccgccccttcccaacagnagngcancccnaaagggcnaaaagggaaaannggaaggcggnaaaaatngggnaaaaaaacnccgngaaaaatnngggggaaaaanaagcccaantntntaaaccaaaaaggcccgaaaanngggnaaaaaaccccccnanaaaaccaaaaaaaaaaaagaaccnnaaaaangggggggga

SEQ ID NO: 18861 - DNA, 423 bp, Homo sapiens
  misc_feature 294, 311, 394: n = A,T,C or G
agtacttctagaattaattaaggcgggcttcaccctgttagccaggatggtctcgatctcctggccttgtgatccgcccgcttctgcctcccaaagtgctgggattacaggcgtgagccgctgcgcccagcctctaaagctttttgataaactttcactcactcctgctctgggtgggggagaaagagtgtttaaaagcagattgtgctctgttttctaaaaatcttagcctgtgatcttccagtatagaaacttaaataatctcttacatgatataaaatatattaaatattntgaaaaagtaatctttnttcaacaaaagaaagtcccatcaggcaaacttgaaatatttaatctacataaacaccatctacatagcgctttaatatcctancttggtaactgaaagatgctgaaaatagt

SEQ ID NO: 18862 - DNA, 307 bp, Homo sapiens
  misc_feature 18, 50, 55, 136, 169, 170, 174, 215, 251, 255, 289: n = A,T,C or G
ttggtcaggctgatctcnaactcctgacctcaagtgatccacccacctcngcctnccaaggtactgggagccaccatgtgtggcccactgcagggttttgagcacagaaataaaacattggttttatggtatcttnacattttaagtattatttctgtctccattatgnnttancctcttttttgactcatgagcaagtaatcaaaatgattcantattctatgaaatgtactactagtgaaaagtatctnatanataatttaagctcaaatccccactaatttacttnatgtgggtaggaatacta

SEQ ID NO: 18863 - DNA, 211 bp, Homo sapiens
  misc_feature 18, 27, 28, 40, 45, 47, 49, 73, 80, 85, 89, 107, 121, 146,152, 168, 178, 182, 192: n = A,T,C or G
agtcttctagaattaatnaaggcgggnncaggtgacttangcatntngnatcctattatttaacaaagacccncgggttnagtcnagtnaaagcaaaactacttctnattatttcctggtnttatgaaagggtagccctattttgnagtatnacactaaattataaangaaaaacttnattnttactatcanacagtagataacttacaca

SEQ ID NO: 18864 - DNA, 757 bp, Homo sapiens
  misc_feature 545, 551, 617, 648, 666, 701, 706: n = A,T,C or G
agtacttctagaattaattaaggcggggacattactacaaaccttacagaaatgaaaaggattataagaaaacaccatgaggagggtgaagcaagatggctgaatagatgctttcaccgattgttcccctgctaaccttgcaggaacaccaatttaacaaccatctacacacacaaaaaagcacctacataagaaccaaaaatcaggtaagcaatcacagtacctggttttaacttcatatagctgaaaaaggcattgaagacggtaggaaagacagacttgaattgctgacgccgccccttccccactccttcagcagcggccatgagatacagagcatctgtgctcttgagggagggagagcacagcgattgtggtactttgcattcaactcagtgctgctctgtcacagtgggaaacaaaactggactaaactcagccaatgcccatccatggaggcagcatttagatcagccctagtcagaggggaatcgcccatcccagtggttagaactttgagttttgggcaaaaactttctaccacngaaaanggtgctctggggtttctaaaataatcttgaaagacagtctaggctgtgaagactgccaattcctangtaagtcctagtgctagtgctggccttaaangccaatggacattggganactaacccgggggtgggcttaaggaagttttttgngacanccctttacccaaccttaaggcaggcgcaagcctggagccaaaaaaaaaaaa

SEQ ID NO: 18865 - DNA, 804 bp, Homo sapiens
  misc_feature 2, 23, 25, 28, 30, 32, 37, 39, 42, 48, 50, 52, 55, 56, 60,63, 65, 66, 73, 74, 75, 79, 80, 81, 84, 87, 88, 90, 96,109, 116, 126, 146, 164, 186, 188, 196, 198, 200, 204, 206,215, 240, 297, 303, 466, 475, 497, 507, 510, 520, 527, 532: n = A,T,C or G
  misc_feature 537, 538, 543, 545, 559, 560, 562, 567, 571, 576, 577, 584,585, 589, 593, 616, 620, 633, 651, 658, 664, 682, 719, 722,761, 767, 773, 774, 781: n = A,T,C or G
anactggccgtcgttttcacccngnaanangntatancnatnattatngncngtnntttnccncnnagaaaannnaaannncantanntntgggcngggcgtcactctngcacatnagataacatngagaaatcacatagattagnaatgattttcccaaaccntaacaatcattgtagagatacnantaatttantntnactntnagaaagtanatactatgatcaattagtcatgcanagtgatctcttgatatgtcaacatgttgagttaaaagtttgagaagagatactttanaaagtngtagacccactcctcttgtctcatttcccttcctataatttagtggtagtacatttatgaatccaaccctgtatgtttgcaaaccctgaggtagacaatttggcagtgaatttctatagtacaataaagttcaaatagcccatttggagaacatgccagcctnttatttacnattcctttaaaaataactgggncatttttcanacnctttttcttnttaaaanatacntaacnngcgtngnaaaaaatttttaanngnccccngggnccccnnctttttnncttnggcnattttcaagaaaaaaaccccagntttngggacagcccagnaaaacctttcatggtagnagagttnaagctngaaaacattgccctcctntccccttggtcattcccttcacgattcattgatatcnganatgggccatggttcttctttctgggttagcaaaacttgnattggnggtaannagtactngatgggaaatgtggtcatttttt

SEQ ID NO: 18866 - DNA, 697 bp, Homo sapiens
  misc_feature 39, 40, 48, 63, 73, 321, 332, 333, 411, 444, 541, 596, 600,619, 621, 639, 652, 663, 672, 679, 687: n = A,T,C or G
agtacttctagaattaattaaggcgggcattcaggaaanngctatccnaagatggaagaaatnacttacacangggtaatttatattatggaaaggtgaaactgccccttgagataacctgaaaggcagatcatctaccctttactaaagaaaacagacagaaaaacaaaatattttgtagttgctgttcactgcacttgacaaaacgtacagaagagatgaactcaaaaaagactggtcagtttgcaggcaaaaatgaaaaggaagagaatccaaattcaagtacttactgggtaggatgaggcaacattttaatatcanaaagaaagatnnaaatgggaaatccttttaaaaataaataaagagagaaatcctttagccaaaaggttgattaaaagccagttttgccgncgggtgcagaggctcacacgtataacaccaacnttttgggagcccgaggcgggcggactgcttgagtccaggagttcgagactagcctgggggaatacagcaagaccctgcctcccataaaaatacaaanaattagctgggtgtacctcgtggtataccctgaattccccagctaaatttttggnattnttttatgtgggagacccantnctgggttgacagagccancaccctttttttntaaagggaatnggggactgncccccanccaattanaaaaagaaaa

SEQ ID NO: 18867 - DNA, 314 bp, Homo sapiens
  misc_feature 19, 22, 33, 42, 47, 49, 51, 54, 56, 62, 64, 65, 66, 74, 75,81, 82, 90, 94, 100, 104, 115, 116, 123: n = A,T,C or G
actggccgtcgttttacanccnggaaaaagctntaaccttgnttctngncngcncnttttcnannnagaaaaannaaaaanntttattgntggnctcccntttncgatctctttnnctgactnggaggtgaaaagtcatatctgagaaaatgtttgcagtgacccctagtctggggtacacagaccagtgttccttattgacagtgttcaataaggccccgtcattctcgccagtctgttgttgttcttaatgggctcctccttgaaatgtgtgtgtgtttgtgtcaagaggagttgtgttctttgtaaataaa

SEQ ID NO: 18868 - DNA, 158 bp, Homo sapiens
  misc_feature 158: n = A,T,C or G
agtacttctagaattaattaaggcgggggaatttatcctcacaaattggtgttctaaatgtcttaagaacctaattaaatagctgactacaaaaaaaaaaaaaaaaaaaaaaaaaaaaaaaaaaaaaccaaaaaaaaaaaaaaaaaaaaaaaaaaggn

SEQ ID NO: 18869 - DNA, 295 bp, Homo sapiens
  misc_feature 22, 24, 27, 31, 36, 38, 41, 44, 47, 49, 51, 54, 56, 62, 63,65, 74, 80, 86, 89, 120, 126, 197, 206, 222, 233: n = A,T,C or G
aactggccgtcgttttcacccngnaanaagntatancnatnatnatngncngtncnttcccnnanagaaaaaanaaaatncattangcnggggcccgggatgctttaaaatcaccacggnctttanccatgcacaaacggtagttttgtgtgttggctgctccactgtcctctgccagcctacaggaggaaaagcanggcttacanaaggatgttccttcangaggaagcagnactaaaagcactctgagtcaagatgagtgggaaaccatctcaataaacacattttggataaa

SEQ ID NO: 18870 - DNA, 133 bp, Homo sapiens
  misc_feature 31, 45, 47, 78, 120: n = A,T,C or G
agtacttctagaattaattaaggcggggtgntgcctgttgggttncnctctcaaccctcctaatgacctccggcctanccatgtgatttcacttccactccataacgctcctaatactangcctactaaccaa

SEQ ID NO: 18871 - DNA, 449 bp, Homo sapiens
agtacttctagaattaattaatagatataattgattactggtcagaatagcaaaaagaactagaaaacttgaacaacactaaataccaagtatacttcaccagatatctatagaacattccactcagcaacagcagaatccagcagaatatatattcttctgaagtgtatgtggaacattctccgggatagaccatatgttaagtcataaaacgagtttcaataaatttaaaaggactgagatcataccaagtatgctctctgaccagaatggaatgaaattagaaatcaatacaagaagaaaatttgggaaattcacaaatatgtagaaattaaaaaacacactccttaaacaaccagtgggtcagaaaagaaatcacaagggaaactagaaaatactttgagctgaatgaaaatgaaaatgtaatataccaaaacttattgaatgca

SEQ ID NO: 18872 - DNA, 398 bp, Homo sapiens
  misc_feature 39, 41, 49, 56, 86, 107, 170, 190, 193, 194, 204, 205, 212,213, 216, 217, 236, 248, 251, 256, 268, 269, 271, 272, 275,277, 278, 280, 281, 283, 284, 288, 289, 292, 293, 294, 295,298, 308, 315, 325, 327, 333, 346, 347, 350, 352, 354: n = A,T,C or G
  misc_feature 357, 361, 368, 376, 378, 381: n = A,T,C or G
agtacttctagaattaattaaggcgggaggagggagaanancaggaaanataactnatgagtactacgcttaacacctgattgatnaaataactgatacaacaaacntacatgacacaagttttcctatgcaacaaacctgcacttttatccctgaacttaaaagctaanaaaaaaaaaaaaaaaaaaanttnncccccccccnnttttttnnaanntttttgttaaaaaaaaagnctttaaaaaaanttnggaantttttaaaaaannannggncnngnncnntttnnttnnnnccngaaaaaaccnttttttntaaaaaaaantnaaaggntttttttttttannaancntnaanaccnttttaanttttaaantnttnaaaaaaaaaaaaaaaaa

SEQ ID NO: 18873 - DNA, 395 bp, Homo sapiens
  misc_feature 18, 27, 49, 173, 354, 359, 363, 371, 373, 380: n = A,T,C or G
agtcttctagaattaatnaaggcgggnggggtgtagctgaaaaccatanagagtgagaaatacaggcagtaagattctcagagccatgtttgcgtatctacattgcctgtactttatggaattctggttcttggtgatatttggagttcagatagtggatttatagtgggaangaggattttgaatatagagatagtagaactagggaatgattttttaaaaataaaaggtaaagaacagaataggcccgggtgcaagtggctcatgccctataatccccggtgctttgggaggcccaagagggggaattgcttgaggccagggagttttgaagaacagcctgggcccaaccanaaaanaganccccatcntnttacaanaaggttaaaaaattt

SEQ ID NO: 18874 - DNA, 269 bp, Homo sapiens
  misc_feature 22, 27, 31, 33, 36, 39, 47, 52, 57, 58, 59, 61, 63, 68, 72,73, 81: n = A,T,C or G
actggccgtcgttttacacccnggaanaagngntanctntgatggtngccgntcccnnncncnagagnactnntagaattnattaaggcgggaaaatgggaagtccctctgcctaaagtacgtgcccagggagaaacagaagtattaaaagttattcgaacaggaaagagaaagaagaaggcatggaagagaaattagaagataaaaacatacttttagaagaaaaaagataaatttaaacctgaaaagtaggaagcagaaaaaaaaaa

SEQ ID NO: 18875 - DNA, 426 bp, Homo sapiens
agtacttctagaattaattaaggcgggctgaattgttgataaaatggaaaaagtagtatattgttatataagcttctgaggtgtgttttgttgtataagccctggaggttaaaaagtcatcccttatgtatagtagttaaaggcataaaactgtgacttttagatattccacagaaccagacttatttgatgtggataataaccaatgatttagcattttgtttgcttttgttttattttatccgggttcattttttactcttcccatgtacatgaaacaggtggtggcgtgtagagatcagctgatccttgttttatggttaattgaactactttgtatccagggtttctgcaaatccaaaagtgatttttcatctaggatctattcctaacagtctactccaatcccctttagttttccacaat

SEQ ID NO: 18876 - DNA, 497 bp, Homo sapiens
  misc_feature 25, 28, 30, 33, 41, 42, 44, 48, 53, 58, 59, 60, 65, 70, 85,247, 332, 333, 334, 335, 339, 344, 346, 347, 348, 350, 355,357, 359, 361, 366, 367, 370, 371, 388, 392, 396, 402, 404,410, 411, 412, 421, 423, 424, 427, 428, 432, 438, 440: n = A,T,C or G
  misc_feature 450, 452, 457, 458, 461, 462, 467, 472: n = A,T,C or G
tggccgtcgttttcaccccggaacnagntntanccatgatnntnggcngtccntttcnnnagagnactantagaattactttaangcgggcagatcacctgaggtcaggagttcgagaccagtctggctaacatggctgaaaccccatctctactaaaaatacaaaaattagccaggtgaggtggtgcatgcctgtagtcctagctacttgggaggctgaagtaggagaatcacttgaatccagganagggaggttgtggtgagccaagatcacaccactgtgctccagcctgggcgacagagcgagactctgtcaaaaaaaaaaaaaaaannnntttngaaancnnntnggggnantntnttttnncanntttttaaggggaccccntaantttncccccnanattttnnnaatttttangnnttnnttcntttttncngggggttttncnttttnnccnnaaaanttttnccaaaaaaaaaaaaaaaaaaaaaaa

SEQ ID NO: 18877 - DNA, 319 bp, Homo sapiens
  misc_feature 81, 292, 303: n = A,T,C or G
agtacttctagaattaattaaggcgggggaggggagctggtttcctggtgaactttctaaaaggaaaaataattttaagtnaagaaaaaagaaaaaaaaggaagactaaacagaaaccagaactgaaacattcacctggtagcaaatgacacatgcacgcacacacatacacgcacaagcgccagtgcgcacgtgtacacagaaaaacaaaaggacaagctttctgtgaaacaaaatatttacttagggataatgtggggattcacatgaattaaatagctgcaattggganaagagtttcanattgaaaatgaaaaac

SEQ ID NO: 18878 - DNA, 274 bp, Homo sapiens
  misc_feature 136, 145, 148, 150, 160, 162, 163, 171, 177, 181, 185, 194,197, 198, 204, 206, 207, 209, 211, 213, 214, 215, 218, 219,235, 238, 240, 241, 246, 256, 261: n = A,T,C or G
agtacttctagaattaattaaggcgggagaatcgattgaacccgggaggcagaggttgcagtgagcagagatcgagccactgcactccagcctgggtgacagaacgagactcatcttaaaaaaaaaaaaaaaaatnttttttccnggntngcccgggggntnncccctttnatcccnaccntttngggggcccnggnngggggntnncnangnnnggnntttaaaacccgcctgnccnannttttnaaacccagcnttttnttaaaaaaaaaaa

SEQ ID NO: 18879 - DNA, 111 bp, Homo sapiens
  misc_feature 79: n = A,T,C or G
agtacttctagaattaattaaggcgggagttgagtaccactgttagaagataccttatgcctctgtcctcattaggatncctatgatcatcctctagataccacatatagg

SEQ ID NO: 18880 - DNA, 207 bp, Homo sapiens
  misc_feature 77, 97, 101, 102, 115, 144, 151, 157, 158, 161, 162, 175,190: n = A,T,C or G
agtacttctagaattaattaaggcgggtgatggtggctatgatggtggggatgatgaggctattgttttttgtgtantgctacacacctaacttatngagnnaaaatatcatgtnctaatgcttgctgctgatttaaaacatanttttggnacattnnagnnaaatttaaacctnaaaagtaggaagcanaagaaaaaagaccagct

SEQ ID NO: 18881 - DNA, 159 bp, Homo sapiens
  misc_feature 69: n = A,T,C or G
agtacttctagaattaattaaggcggggaaaaatactatttggatagctattcactaaagaacaactcnggtaagctgcatggtactcttgcttgctatcaggatgggggtaaacttttagatattagttattttactctgttacattgctaacagggt

SEQ ID NO: 18882 - DNA, 369 bp, Homo sapiens
agtacttctagaattaattaaggcaggaagtgtctctaagatattgtagccaatccatagatcttgaactccactttctatttaaagcatacacacacatgcatgcatgcgtgttctctctctctctctccccccccaccaacctttcactctctctaggattggcagaagatggtgcggcaagaagcataggaattgtctccccatctagacaacaattacactggcagaataggtcttacataattattttggaactctgatgtctattgaaggcttacgactaagaatgcttggatggtcaatgagggttaattctggtcaatgtcagctctttacacagtaacaactactcatttcccacaccca

SEQ ID NO: 18883 - DNA, 405 bp, Homo sapiens
agtacttctagaattaattaaggcgggtggatcacaaggtcaggagatcaagaccatcctggctaacacagtgaaaccctgtctctactaaaaaatacaaaaaaaaaattagccgggcgtggtggcgggcgcctgtagtcccagctactcgggaggctgaggcaggagaatggcgtgaacccgggaggcggagcttgcagtgagcccagatcgcaccactgcactccagcctgggtgacagagcgagactctgtctcaaaaaaaaaaaaaaaaaattaaaaaattaaaataaaaaaataaatgctacaggtgaccaataaaggctgcaataataagggaaatgtttataaataagtagatatttaagtcaggccttgaagcaccatttctcaaaagtactatttc

SEQ ID NO: 18884 - DNA, 268 bp, Homo sapiens
  misc_feature 4, 16, 21, 23, 25, 45, 47, 68, 83, 84, 86, 92, 99, 135, 186,209: n = A,T,C or G
cggntcacaagctcangagtncnanaccagcctgactaacatgcntnggacagatgtggttggatgtnactttggagattcanntncaaaangactgcngctttgctcactctgagagaaggcagcatccatgtnttgaggacactcaggcagcctgggacaggcttggggaggacccaggactgngtggggtttcttacctgcctganccacctcaagggaatcttccagcctaatgcaaggcattatctgcacctttggggtcatg

SEQ ID NO: 18885 - DNA, 445 bp, Homo sapiens
  misc_feature 4, 27, 30, 32, 35, 44, 46, 51, 56, 61, 73, 88, 91, 102: n = A,T,C or G
aacngccgtcgttttacccccggaacnagngntanccatgatgntnggcgngtccntttcncgagagaactantaaaattactttaangcnggccgcctgtntcccagctactcgggaggctgaggcaggagaatgccgtgaacccgggaggcagagcttgcagtgagccaagatcgcgccactgccctccaggctaggcgagaatgcgagactccgtctcaaaaaaacaaacaaaaaagctattggtgatctaaagatctaaagaaacaacattccagtagcaatgagcacttccagtaccccagatcctggttttcaatatcattctctactaaaaggaaccagggcccccttggagacatggctgcttctaggacgaagggcagaaatacacaagataggcctgcagcattttgtgttgccacaaagtttaaggaactgctt

SEQ ID NO: 18886 - DNA, 503 bp, Homo sapiens
  misc_feature 2, 25, 28, 32, 37, 42, 46, 52, 53, 54, 58, 63, 67, 70, 72,74, 75, 115, 121, 145, 170, 192, 215, 217, 226, 231, 233,248, 258, 265, 272, 304, 312, 337, 342, 348, 352, 356, 358,362, 363, 374, 377, 386, 388, 393, 394, 395, 399, 400: n = A,T,C or G
  misc_feature 403, 408, 422, 426, 428, 429, 431, 433, 435, 441, 442, 443,450, 452, 459, 460, 461, 467, 471, 481, 485, 491: n = A,T,C or G
anactggccgtcgttttcaccccgnaanaagntatanctatnatgnttggcnnntccnttccnccanagnananntaaaattaattaaggcggggggatcctttgaggtcaagantttaanaccaaactgaccaacatggtgaanccctgtctctactaaaaatacaaanaaatgagccaggcatggtggcncatgcctgtaatcccagccactnangaggctgangcacnanaattgcttgaacccnggaggcaganactgcantcagccnaaatcacgccactgcattccagcctgggtaanagactganagcctgtctcaaaaaaaaaaaaaanttagntgggcntggnggcncncccnngtattcccatntantcggaaggntnaggcnnnaaannccnttgancctggaaaccccangttncnntnancnaaaatnnncccgttnanctccttnnnccgggncaanaaagtgaaantttncctccnaaaaaaaaaaaa

SEQ ID NO: 18887 - DNA, 394 bp, Homo sapiens
  misc_feature 1, 2, 131: n = A,T,C or G
nngagtacttctagaattaattaaggcgggaaggacagcttgagacacttaattctccaagtgaggtgtcagtgcagttcccaaagcaaccccagccttgtcaccatgcctgccaatacctcagctagcanaattcgtcgaaaagcattggcaatggctgcgtcaattcccaccatgtcaaactccagtgagttttcatccatgtgtactacatccacacggaaattctagagggacaggaaaaaaacatttaagtgaaatctgctctctgtgtaatatctcttcatacctcccccttaaaataattccctcaagtattatcctctcatccaaaaacctccctttgcccaaatgtctcttattaaatattctatctcgcccagtgttttaaaaa

SEQ ID NO: 18888 - DNA, 367 bp, Homo sapiens
  misc_feature 27, 41, 61, 82, 89, 95, 111, 116, 160, 187, 203, 235, 275,292, 300, 310, 311, 333: n = A,T,C or G
agtacttctagaattaattaaggcggnaaaaaaaagactcnttatgaacacaggaacaccngttagaataacaactgacttntcattantaacantagaggcaagaaggcngtganagcatatattctaagtgctgaaagtggaaaaactgtcaaccaanaatctcctatccatcaaaattactatncatgatcaaggctaantaaagactttctcagatgaacaaaaactaacngaattcacccaacctgacttataagaaataatagacatantaaaggatgttcttaangctgaaanaggtaccatnnaataataatttgaataacatgnaaaaattacaagaagagagtgtaattgaatattt

SEQ ID NO: 18889 - DNA, 404 bp, Homo sapiens
  misc_feature 29, 33, 38, 46, 48, 49, 51, 53, 56, 57, 58, 59, 64, 67, 80,81, 83, 86, 244, 248, 280, 282, 319, 332, 339, 350, 352,353, 354, 358, 359, 360, 364, 365, 368, 369, 370, 381, 382,383, 390: n = A,T,C or G
atactggccgtcgttttacaccccggaanaagntatanccatgatnanngncngtnnnnttccntanagaaaaaaaaaannanttnatgcgggtgcctgtttcccagctactaaagaggctgaggcaggagaatcgctcgaacccaggaggctgaggttgcagtaagctgagaccatgccattgcactccagcctgggcaacaagaatgaaactgtgtcacacacacacacacacacaacgtcntatnaaaaaaaaaaaaaaaaaaaaaaaaaagctcantntgggtttttttaaaaaaaaaaaaaaaaaaaaaaaaanccccccccccccnggggggnccccccccccncnnntaannngggnnaannnccccccccccnnngggggtntttttaaaaaaaaa

SEQ ID NO: 18890 - DNA, 384 bp, Homo sapiens
agtacttctagaattaattaaggcggggaaaaacaccttataaaaccatcagatcttttgaaaactcactaactatcatgagaacagcatagaggtaactgcccccatgattcaattacctcccaccggatccctcctgtgacatgtggggattatgggaactacagttcaaaatgagatttgagtggggacactgccaaaccatgtcactatctttgttaacttttctctaaacctaaatctattttaaagtagatttttaggagacacacatggctttggagttctctgcctttagccctctcatgacattagagattcactgaatatttctgacctcaagctcctactttatcaaaaaaaaaaaaaaaaaaaaaaaaaaaa

SEQ ID NO: 18891 - DNA, 135 bp, Homo sapiens
  misc_feature 84, 97, 112, 126: n = A,T,C or G
agtacttctagaattaattaaggcgggctaatttaactagtcactcacagatgacttttctttaataaagtcccttttcctaanaaaaaaaaaaaanaaaaaaaaattgaanaaaaaaaaaaaaanaaaaaaaaa

SEQ ID NO: 18892 - DNA, 307 bp, Homo sapiens
agtacttctagaattaattaaggcgggaagaaattaggaactgcagtacatcatcaccccaggtgtaagagttatttctctcccagtgcagaaaggggagtgtggcccctggctgtacctgagcttcctcttctccatccctgagacatcacagaatcacccgggttctgacctctccacttctagctctcactgacatctggatatcttgatgcactgcctgtttgtaacaacatatacttctttgctgaatgctaataaacttctgggttcaagagggaacccctcagaccaaaaaaaaaaaaaa

SEQ ID NO: 18893 - DNA, 326 bp, Homo sapiens
  misc_feature 1, 26, 124: n = A,T,C or G
nccgggccccccctcgagagtacttntagaattaattaaggcggggaactaatactttatgggatttggattgctacaggtttaatcatgctatctatccttgctggtgggacatttgacttanaattgtatataagtaaaatatagatgaaaaattgtataatttatagctatctgaaaacaacttttttttaatatttgaacactttgaaatgccttacacttccttgttaaaaatcttaaagggatattaaaattaaatggcacttaattactattagtaattcctaatataatatttaattcataaaagaaaaaaaaaaaaa

SEQ ID NO: 18894 - DNA, 402 bp, Homo sapiens
  misc_feature 32, 34, 38, 41, 53, 228, 273, 280, 292, 344, 347: n = A,T,C or G
ggccgtcgttttcaccccggaataagaggtancnatgntgngtggcgggcccnccctcgagagtacttctagaattaattaaggcgggtggaatagagggtcaaactccttggcgagttcagtctaacagaggacacattactgccctacaaagcagctctggaaaatgacaaccagtggcactaactccaagcaatatctttgtgaggcttgtgggctgtaatatantctgctcaggctgccataaaaaaaaaatcacaatcaggccaggcnctatggntcacacctgtantcccagcaccttgggaggccaaggagggcaaatcacctgaggttaggagttnaanaccaggctggccaacatggcaaaaccccgtctctactaaaaatacaaaaattacc

SEQ ID NO: 18895 - DNA, 416 bp, Homo sapiens
  misc_feature 30, 68, 76, 77, 82, 89, 103, 115, 161, 162, 163, 164, 181,237, 245, 250, 259, 319, 344, 360, 364, 370, 373, 376, 395,415: n = A,T,C or G
agtacttctagaattaattaaggcgggggngggggactttctccctttctttttggctcccatgaatncttttaanngtatngacattngcattctgactcanaatttggactgncttcataaatgctcactgtgaacttaaaaaatgtacattctgcagnnnnagggtggaatattctanaaatgtcattttaggcctatttggtaaatagcgttggacaagtcttctatagcgtnattgattnttctntctacttgncctgtcaattattgaagagagatatataaatctctgaatctatttgcggatatgtccatntactctgtataagttctatctgttncgggcttgcatatttngaancttttnaantangtgttgaatgtttaggatncttgcatcttcctgattagng

SEQ ID NO: 18896 - DNA, 267 bp, Homo sapiens
  misc_feature 28, 29, 31, 37, 40, 41, 48, 55, 59, 62, 64, 65, 72, 90, 93,117, 118, 120, 130, 131, 132, 179, 184, 190, 233: n = A,T,C or G
agtacttctagaattaattaaggcgggnnantgcggnaanncaagccncataggngatnccntnnttgtggntataaactgctcaaagcnctngctgaccactgcactatgcatgcnnanctaatgctgnnngaactgaactaaaagttgaactacttcccactgcaggggaaacagtnttgtnactganttcaaccaagttaactgcatgttttaaaataattatttttcanaggaatattagacaatcctgagtttctacaacac

SEQ ID NO: 18897 - DNA, 493 bp, Homo sapiens
  misc_feature 2, 5, 21, 26, 29, 35, 38, 41, 47, 48, 53, 60, 65, 67, 74,75, 78, 235, 348, 354, 355, 362, 375, 376, 378, 382, 385,387, 388, 389, 397, 398, 401, 412, 420, 425, 431, 437, 439,440, 451, 452, 454, 455, 458, 463, 466, 471, 474, 477: n = A,T,C or G
  misc_feature 479, 480, 492: n = A,T,C or G
anacnggccgtcgttttacancccgnaanaagagntanctntgatgnntggcnggccctncctcnanagtactnntanaattaattaaggcgggtggatcacgaggtcaggagttcgagaccagcctggccattatggtgagaccctgtgtctactaaaaatacaaaaattatccaggcatggtggcgcgcacctgtagtcccagctactcaggaggctgagacggaagaatctnttcaacctgggaggtggaggttgcagtgagctgagatcacaccactgcactccagcctgggtgacagagtgagatgccatctcaaaaaaaaaaaaaccaaattttcaaaaaanttatcnnggtttanggggggccccctnnantccnacntnnnggaagggnnagncagaaaaatcntttaaccntgggngggggnggttcnanngacccaaaatnntnntantgccntcnacctnggnaangnnaaactccttttna

SEQ ID NO: 18898 - DNA, 288 bp, Homo sapiens
  misc_feature 38, 42, 46, 68, 80, 83, 86, 87, 92, 96, 147, 183, 195, 205,211, 215, 224, 230, 231, 238, 241, 258, 259, 262: n = A,T,C or G
agtacttctagaattaattaaggcggggcggaatggtnacancttnaatacctgctctaatgggttanttacagacatgnatnganncaaanatantctgacacgtctaattctaatccctctgcgcgacgacaagtgcctctgtcnacaacacctgtaatggctgtaccacctctatgcacncacattggaatnactggatgcnctcttncctncagcttaangtaccnnaattccnaangaactgtatgactaaannggngagactccatacacacagaatacatc

SEQ ID NO: 18899 - DNA, 234 bp, Homo sapiens
  misc_feature 22, 24, 31, 33, 36, 38, 39, 45, 46, 47, 51, 57, 58, 61, 63,65, 71, 74, 97, 110: n = A,T,C or G
actggccgtcgttttacacccngnaacaagngntancnntgatgnnnggcngtcccnnccncnanagaaanaanaaaaatacattaaaggcgggctntctgggatgattnctgaaccaacagtccaagaccttttgttgatttcagccccacttagccaagacctcaagtataaataattctgataattatggagaaatcaactgctattttatactgattctgtaaaaaaaaa

SEQ ID NO: 18900 - DNA, 627 bp, Homo sapiens
  misc_feature 308, 309, 310, 311, 312, 313, 314, 315, 316, 317, 318, 319,320, 321, 322, 323, 324, 325, 326, 327, 328, 329, 330, 331,332, 333, 334, 335, 336, 337, 338, 339, 340, 341, 342, 343,344, 345, 346, 347, 348, 349, 350, 351, 352, 353, 354: n = A,T,C or G
  misc_feature 355, 356, 357, 358, 359, 360, 361, 363, 364, 365, 366, 367,368, 369, 370, 371, 372, 373, 374, 375, 376, 377, 378, 379,380, 381, 382, 383, 384, 385, 386, 387, 388, 389, 390, 391,392, 393, 394, 395, 396, 397, 398, 399, 400, 401, 402: n = A,T,C or G
  misc_feature 403, 404, 405, 406, 407, 408, 409, 410, 411, 412, 413, 414,415, 416, 417, 418, 419, 420, 421, 422, 423, 424, 425, 426,427, 428, 429, 430, 431, 432, 433, 434, 435, 436, 437, 438,439, 440, 441, 454, 475, 478, 488, 505, 512, 518, 521: n = A,T,C or G
  misc_feature 529, 531, 535, 539, 559, 573, 579, 583, 594, 600, 603, 617: n = A,T,C or G
agtacttctagaattaattaaggcgggagaacaaagttagagtttctattagttttcttatagcttgtttgttagtttgtttttgcaatcagtgttaaattgccatcagtctaaagtaatgtattataagatgttatttgtaagcctcatgataacctcatatcaagaagcctgcaactgatacacaaaaaataaaaagcaagaaattagacataccactggagaaaatcagcttcacaaaaaggaagacaggaaggaaagaaacaaacaggagatcaaaaaaaaaaaaaaaaaaaaaaaaaaaaaannnnnnnnnnnnnnnnnnnnnnnnnnnnnnnnnnnnnnnnnnnnnnnnnnnnnncnnnnnnnnnnnnnnnnnnnnnnnnnnnnnnnnnnnnnnnnnnnnnnnnnnnnnnnnnnnnnnnnnnnnnnnnnnnnnnncattccccttttngccagctggcgttaatagcgnaanaggccccgcnacccgattcgccctttnccaacanttggcncanccctgaantnggcngaantgggaaattgtaaagccgtnaatatttttggttnaaaaanttcngcgttaaaaantttttngtnaaaattcaagcttnatttttttta

SEQ ID NO: 18901 - DNA, 247 bp, Homo sapiens
  misc_feature 231: n = A,T,C or G
ctcgagagtacttctagaattaattaaggcgggagaaagccttttatctgtatatgcatatgttatgtgaatatacatgcacatatacatatatcttcatatatacgtacatatgtgtgtttgcaatacacttagggttagggtggggtgtgtgtgatgtggatgaaggtcattagtatgttagcttatttaaattaaacctttacttgagatgatttaaataaattccanacaattgttttttgtt

SEQ ID NO: 18902 - DNA, 175 bp, Homo sapiens
agtacttctagaattaattaaggcgggggtattacatattcatagcatgccgcagaaatcattttaagtctatcaaaaacaactatattgtgcattttcaaataagcacatataaaagatgagctataagaagagagaaggatgctaaaaaaaaaaaaaaaaaaaaaaaaaaaaa

SEQ ID NO: 18903 - DNA, 429 bp, Homo sapiens
  misc_feature 25, 30, 34, 35, 39, 41, 42, 48, 49, 50, 52, 54, 57, 58, 59,65, 66, 67, 68, 76, 77, 83, 89, 98, 101, 102, 113, 118,122, 394, 408: n = A,T,C or G
gatactggccgtcgttttacacccnggaanaagnnatancnntgattnnngncngtnnntttccnnnnagaaaaannaaaaanctttantgctggccnccnncttgaggccangaatnaganaccagcctggccgacatggtgaaacgccatctctactaaaaatacaaaaattagccaggcgtagtgacgtgcgcctgtaataccagctacttgggaggctgaggctgcagaaccgcttgaaccttggaggtggaagttgcagtgagccaagatcgcaccactgcactccagcctggatgacagagaaagactccgtctcaaataaaaacagaaacaaaacattaatgtcattaagcccccactgctaaatctgactggcttaaaaaaaaaanagggtcccttcaanattgtatctaaacttaacatg

SEQ ID NO: 18904 - DNA, 234 bp, Homo sapiens
  misc_feature 31, 35, 39, 50, 56, 64, 70, 74, 76, 77, 81, 95, 102, 153,180, 181, 188, 195, 211: n = A,T,C or G
agtcttctagaattaattaaggcgggtggancacntgangtcaggagttngagacnagctgggncaaccncatntnncctnttctttgaaaaacnctatcgntattaaaaatacaaaaattaggctgggcatagtggcaccacaccgtgtagncccaagctacttcgagaggctgaacanngagaatngcttgancttggaaggtggaagntgcactcatgctgagattgtgcc

SEQ ID NO: 18905 - DNA, 417 bp, Homo sapiens
  misc_feature 377, 378, 381, 383, 384, 385, 386, 387, 388, 389, 390, 391,392, 393, 394, 395, 396, 397, 398, 399, 400, 401, 402, 403,404, 405: n = A,T,C or G
tcgagagtacttctagaattaattaaggcgggtggatcacaaggtcaggagatcgagaccatcctagctaacacagtgagaccccatctctactaaaaatacaaaaaattagctgggtgtggtggcaggcgcctgtggtcccggctactcgggaggctgaggcaggagaattgcatgaacccaggaggcggagcttgcagtgagctgagatcgcgccactgcactccagcctgggcgacacggtgagactccatctcaaaaacaaacaaacaaacaaaaaaaccctgctctgtctttgttcaaggctcagctttttagatgtgagtccactgagctggtgtgtaccttaaaataaacaatcctcctgttctccagannaanannnnnnnnnnnnnnnnnnnnnnnggcggccgccac

SEQ ID NO: 18906 - DNA, 411 bp, Homo sapiens
  misc_feature 244, 299, 319, 320, 332, 334, 355, 376: n = A,T,C or G
agtacttctagaattaattaaggcgggatcagaatggaaaaagaactgtttaaaagtttgatacttttaaatagttggtttttttgcttactctggtaatgattttctacaaatacataataaattgtttttttgagtctatattctgtatgcagttgaatatccattacttattctgctgtgctttaatagaatggaatgtttacaggcccttaaaatattatttttaaaaaaccttctgaanatacataccaaagtttttccaagaagattttataatcaatttaataatgtaaggnttatcaagattctataatannatagttattaangnaattttatgttagagactatntttgtaatgtactgagtggtncctttataagaaaagcgactgccaatatattttta

SEQ ID NO: 18907 - DNA, 393 bp, Homo sapiens
  misc_feature 23, 33, 120, 131, 132, 139, 141, 152, 159, 172, 174, 193,197, 200, 202, 207, 213, 220, 227, 233, 237, 257, 264, 270,279, 289, 295, 323, 329, 345, 367, 370: n = A,T,C or G
agtacttctagaattaattaaanttaacctgtncaacaaacccccgaaacatgagtttgcctgtgtgacaaaccttcacgtgtaaccctgaaactaaaataaaagttttttttaaaccancaaaaaaaaanntccaaantnttttgattaanttaaaanacaattttcccancntaaagagataataaatgtngganatnanggatnccctgnttttccngatctantcactnttcnttacatgtttcaaaacctcnccgtgtnccccangaatatgtncaatgttttntgtcantttttaaaaattaaattaaatttttaantgctgngtaacaactttttatntagtttttcactgtagcagatnttntaagtaatgtaaaaatgatttaa

SEQ ID NO: 18908 - DNA, 621 bp, Homo sapiens
  misc_feature 15, 18, 22, 150, 475, 515, 518, 563, 567, 578, 579, 584,592, 600, 601, 606: n = A,T,C or G
ctcctgttttaatgnggnatanagaaaaagaacaaaagccccttactcaagctgcagcttacttaacttctagccagtcagcaacaaaagacccaagaagctatgaaccactagttcctgtcttagagaggggctggagacttccctgcnaccctgcatgtgcaattagaagtaaacttcgccttatactggcctcttcctcattttaatgctgaaaatcacacccaggtgtggaaatttaaactgctaatgttacgtgcaatgtatgaaaaagcatgagggcagggcgcggtggctcacgcctgtaatcccagcactttgggaggcccgaggtgggcggatcacgaggtcagaagatcgagaccatcctggctaacatggtgaaaccccgtctctactaaaaaacatacaagaaaattacccgggttgtgggtgggtgggcgcttgtaatcccagctacttggggaagcttgangcaggaaaaaatggccgtgaaacccttgggggaaggccanaanctttgccagtggagcccaaaaaattcggggcccacttgcaacttncaancccctggggcnnggcanaagcaagnaacttccnnttcanaaaaaaaaaagaaaa

SEQ ID NO: 18909 - DNA, 894 bp, Homo sapiens
  misc_feature 12, 22, 25, 29, 32, 34, 36, 37, 39, 43, 44, 45, 66, 70, 74,77, 92, 102, 266, 340, 344, 364, 366, 368, 391, 392, 398,413, 419, 422, 436, 446, 452, 455, 458, 468, 481, 502, 518,545, 550, 576, 578, 589, 599, 616, 618, 646, 652, 659: n = A,T,C or G
  misc_feature 667, 680, 717, 720, 721, 722, 729, 759, 776, 777, 780, 822,823, 849, 851, 857, 860, 862, 863, 867, 868, 870, 878, 880,891: n = A,T,C or G
aactggccgcgntttcccccgnaanaagnganancnntnatgnnnggcgggccccccctcgagagnaatnatanaantaattaaggcgggcngatcacctanggtcgggagttcgagaccagcctgaccaacacggagaaacccgtctctactaaaaatacaaaattagctgggcatggtggcacatgcctgtaatcccagctactcaggtggctgaggcaggagaatcgcttgaaaccaggaggtggaggttgcggtgagctganatcgcaccattgcactgcagcctgggcaacaagagcgaaaccctgtctcaaaaaaaaaaaattacccaggcggnggcncatgcctgtaatcccagttncntnaacccaggaggcggaggttgcanngggctnaaatcatgccattgnctccanccngggcaacaaaaaanaaactctgtntaaaantanttnttttaaaaantaaaaaattattnatttaaattttggaaaaattntttcaacttttttttnaaataaatgggaaattttaaaattganaatcnctttggcccagggtgccagggggctnantaccgttgttnatccccaacncttttggagggcttgangnggggaaaaaatttcctttgagtttcagngaattncaaaaancaaccctnggcaatttttatngaaaccctctttttttttcaaaaaaaaattaaaaaanttnnnacctttntttttccctgggtccctaacaaaaaatcangaaaaaacctttttttnnaanaggggcgggggggaaaaaaaaaacttttttaaaaaataaccnnggggccttggggggggcccctttttntntttccnccntnntttnngnaaggcttnanggtaaaaaaanttt

SEQ ID NO: 18910 - DNA, 196 bp, Homo sapiens
  misc_feature 20, 29, 33, 38, 42, 171, 172, 174, 182: n = A,T,C or G
tgggggtaccggcccccccntcgagagtncttntaganttanttaaggcgggactcggccctttggaatctaatgctatgtcccggtagatagcgtcaccattgaattagaagacacacatatgttgagaataatcattctggtcatttgctgcatgtcttattgacaaannanaaaaaaanaaaaaaaaaaaaaa

SEQ ID NO: 18911 - DNA, 791 bp, Homo sapiens
  misc_feature 124, 128, 134, 136, 150, 172, 174, 182, 186, 221, 232, 234,250, 254, 265, 271, 276, 279, 281, 320, 321, 326, 348, 353,366, 373, 387, 388, 390, 392, 393, 394, 396, 397, 398, 414,415, 421, 422, 427, 428, 433, 434, 435, 436, 437, 438: n = A,T,C or G
  misc_feature 439, 440, 441, 442, 443, 444, 445, 446, 447, 448, 449, 450,451, 452, 453, 454, 455, 456, 457, 458, 459, 460, 462, 464,465, 466, 467, 468, 469, 470, 471, 472, 473, 474, 475, 476,477, 478, 479, 480, 481, 482, 483, 484, 485, 486, 487: n = A,T,C or G
  misc_feature 488, 489, 490, 491, 492, 493, 494, 495, 496, 497, 498, 499,500, 501, 502, 503, 504, 505, 506, 507, 508, 509, 510, 511,512, 513, 515, 516, 517, 520, 521, 522, 523, 524, 525, 526,527, 530, 534, 535, 536, 537, 538, 539, 542, 543, 554: n = A,T,C or G
  misc_feature 555, 556, 557, 559, 560, 561, 562, 563, 564, 565, 567, 568,569, 570, 571, 572, 573, 574, 575, 576, 577, 578, 579, 580,581, 582, 583, 584, 585, 586, 587, 588, 590, 592, 594, 595,596, 597, 598, 599, 600, 601, 602, 603, 604, 605, 606: n = A,T,C or G
  misc_feature 607, 608, 609, 610, 611, 612, 613, 614, 615, 617, 618, 619,620, 621, 623, 624, 625, 626, 627, 629, 630, 631, 632, 633,634, 635, 636, 637, 638, 641, 643, 644, 646, 647, 648, 649,650, 651, 652, 653, 654, 655, 656, 657, 658, 659, 661: n = A,T,C or G
  misc_feature 663, 666, 667, 668, 669, 670, 671, 672, 673, 674, 675, 676,677, 678, 679, 680, 681, 682, 684, 685, 686, 687, 688, 689,690, 691, 692, 693, 694, 695, 696, 697, 698, 699, 700, 701,702, 703, 704, 705, 707, 708, 709, 711, 712, 713, 714: n = A,T,C or G
  misc_feature 715, 716, 717, 718, 719, 720, 721, 722, 723, 724, 726,727, 728, 729, 730, 731, 732, 733, 735, 736, 737, 738,739, 740, 741, 743, 744, 745, 746, 747, 748, 749, 750,751, 752, 754, 755, 756, 757, 758, 760, 761, 762: n = A,T,C or G
  misc_feature 763, 764, 765, 766, 767, 768, 769, 770, 771, 772, 773,774, 775, 776, 777: n = A,T,C or G
agtacttctagaattaattaagggcggggcggcgccctcagggtacagagcacagacagatagacattccagagactgtattgagagtctttataaagtgtgggagatttaaaaaaaaaaaaanctgntaaaantnccctttttgggagnggggagggaaaacctttaaaantnttaaaaancaancaaaaccccaaaagatgaaaaaccaaaaaatttcnttttttttgtncntaaaaaaaaaaaaaancccntaacccccccnttttanaaccnttncnaaaaaaaaaaaaaaaaaaaaaaaaaaaaaaaaaaaaaannttttnaaaaaaaaaaaaaaaaaaaaanccaanccccccccccccnggggggncccccccccccccnntnannngnnntttccccccccccccnngggggnnttttnnaaaannnnnnnnnnnnnnnnnnnnnnnnnnnnantnnnnnnnnnnnnnnnnnnnnnnnnnnnnnnnnnnnnnnnnnnnnnnnnnnannnaannnnnnnnaanaaannnnnnccnnttttttttttnnnntnnnnnnnannnnnnnnnnnnnnnnnnnnnncncncnnnnnnnnnnnnnnnnnnnnnncnnnnnannnnnannnnnnnnnnccncnncnnnnnnnnnnnnnntntnttnnnnnnnnnnnnnnnnnannnnnnnnnnnnnnnnnnnnnntnnntnnnnnnnnnnnnnnannnnnnnnannnnnnncnnnnnnnnnnannnnnannnnnnnnnnnnnnnnnncccccccccccccc

SEQ ID NO: 18912 - DNA, 434 bp, Homo sapiens
  misc_feature 180, 282, 308, 315, 339, 363, 374, 424: n = A,T,C or G
agtacttctagaattaattaaggcaggtagacaggaggggaagagagagagtaaagccgctgaccctgcacacatggctcatgcccaggcttctgcccagagagataataaagccatatcaaaactgcccacaattcctcgagtgtttttccagcaacccaccactcgcccactgacttntatcagacctcagcttgggctggaacctgacacttagcatgacaggggagctttcagattaaatgtgattgtttctgcacattagtcagaaagtctctcganaatacctgttaataatacagtttttngaaagtnattttaaagtgaagaattccttcnggaaacatgctaaccaagtgaatnaaatgggacanattggcatcaggtgcggatgcatatattaggatgcaacatgacttttgtnagattactgg

SEQ ID NO: 18913 - DNA, 231 bp, Homo sapiens
  misc_feature 167, 202, 203, 204, 209, 213, 221: n = A,T,C or G
gacgacaggctatttgaaatatccactcagagataataaaagaaaaagcatgaagcatgcctacaatgatctagaaaatagcctcaaaagggcaaatctaagagttattggccagtcgagagagagatagcagagtagaaagtttattcaaagggataatcacaganaacttcccaaacctagagaaagacatcaatattcnnnaaaanaaanaaaaattnaaaaaaaaaa

SEQ ID NO: 18914 - DNA, 399 bp, Homo sapiens
  misc_feature 318, 336, 341, 368: n = A,T,C or G
aaagctgggtccgggccccccctcgagagtacttctagaattaattaaggcgggaggtatttaactgaaaggaatatctgcttcactgttgcaaccaaaccagatgccttcttccacttcaccagaccaaggagatgacctggagaactgcattttaagattttctgacctggatttaaaagatatgagtcttattaatcccagcagcagtcttaaagcagaattagatggcagtacaaaaaaagaaatactcgtttgcaaagaaaaaggtagaattcttatgaatgtttcatgatcatgtatgtgtggttaacgcanataccattttggaagtcnggttntcaagggttgctctccagctcaaggtnaagtctaagtcaggaacattaaccagtgatg

SEQ ID NO: 18915 - DNA, 307 bp, Homo sapiens
agtacttctagaattaattaaggcgggtgcctgtagtcccagctactcggaaggctgaggcaggagaattgcttgaacccaggaggtggaggttgcagtgagccaagatcgcgccactgcactccagcctggctacagtgcgagactccgtcgcaaaaaaaaaaaaaaaaaggtaggtttctgagttgagaactaggttcaaatgtaaagactcaaatgatctgcctttgggagtaaaaattattatagagggctaaagatagcttaaacatacagttaacctaaaaaaaaaaaaaaaaaaaaaaaa

SEQ ID NO: 18916 - DNA, 550 bp, Homo sapiens
  misc_feature 28, 31, 32, 34, 35, 39, 40, 41, 48, 55, 58, 63, 78, 104,112, 139, 151, 166, 167, 182, 183, 188, 189, 192, 198, 199,205, 209, 212, 213, 215, 216, 229, 236, 238, 248, 255, 257,262, 285, 289, 291, 308, 314, 334, 364, 374, 378, 386: n = A,T,C or G
  misc_feature 389, 403, 409, 412, 414, 421, 426, 427, 435, 436, 437, 446,448, 453, 454, 456, 461, 462, 465, 479, 488, 515, 516: n = A,T,C or G
agtacttctagaattaattaaggcgggngtnntnncagnnnaggccanatgtgcnttnattgnttaaagccgtagttntctcaactctattgatgcggggttantaatactnacaaaattgtccagcaaggccatattngctagggacaanttatcaaacctaaannttataattgcgtganncgtgnnacngacacnnatatgnaaancanngnnaaacattaattanctacgantncaaaacatgngataacntnctttnacgcagaggagaatatggacttnaatngnttaccatacgaaaagcngacatntccaaccaaccatccctacncacctgtgccctattctcgccttgtgtccntttagagccntttnagctattngcngagaagcaaactgnaccaangcntncccccgntaacnngttttttnnncaaatgggncnttatnnangaatnnccnaaaccagatagccntatcatacncaccatcatagccaccatcaccctgcnnaaacctctccggaaaaaaatttttgttaaaaatt

SEQ ID NO: 18917 - DNA, 467 bp, Homo sapiens
  misc_feature 7, 31, 36, 39, 41, 42, 44, 50, 52, 57, 59, 60, 66, 75, 76,318, 353, 412: n = A,T,C or G
atactgnccgtcgttttacacccgggaaaangagtntancnntnatggtngncgggncnntcctcnagagaactnntaaaattaattaatggcgggcagatcacgaggttaggagttcgagaccagcctggccaacatagtgaaaccccgtctctactaaaactacaaaaaaaattagccgggcgtggtggcagacgtctgtagtctcagtcacttgggaggctgaagcaggagaatcacttgaacccaggggcggaggttgcagtgagccgagatcgtgccactgcactccagcctgggtgacagatggagactcantctcaaaacaaacaaaacaaaacgaaaaccacctnattgcatcccatccttcagcttgacctccaactccacacagaaaatagaagctactcancatataactttctcaatgtagtttcctgtattttgtggcacttgttttcctcttc

SEQ ID NO: 18918 - DNA, 448 bp, Homo sapiens
  misc_feature 139, 301, 324, 325, 326, 327, 328, 329, 330, 331, 332, 333,334, 335, 336, 337, 338, 339, 340, 341, 342, 343, 344, 345,346, 347, 348, 349, 350, 351, 352, 353, 354, 355, 356, 357,358, 359, 360, 361, 362, 363, 364, 365, 366, 367, 368: n = A,T,C or G
  misc_feature 369, 370, 371, 372, 373, 374, 375, 376, 377, 378, 379, 380,381, 382, 383, 384, 385, 386, 387, 395, 411, 448: n = A,T,C or G
agtacttctagaattaattaaggcgggatgaaaggttctgccagcattggatgcaatccggggccacaagtctgcacactcctttgctactggtcctgtaatggcagaacctttcatctcgcctttattgttcactatngactcctgcattatcttcaaaataaagaaacacgccatcttttctacggtatgactttcgttgtcgaatgaccactgctggatgtaccttaatccaagcctacgttttcacacttctagtaaacctctacctgcacgacaacacataaaaaaaaaaaaaaanaaaaaaaaaaaaaaaaaaaaaannnnnnnnnnnnnnnnnnnnnnnnnnnnnnnnnnnnnnnnnnnnnnnnnnnnnnnnnnnnnnnntggccggncgttttacaacgtcgngactggggaaaaccctgggcgttaccccaacttaatn

SEQ ID NO: 18919 - DNA, 305 bp, Homo sapiens
  misc_feature 305: n = A,T,C or G
agtacttctagaattaattaaggcggggtagaaaagagattttagatctgtgggataatatcagatggtctaacatatatgtaattggagtttcagaaggagagaagagaatgtggcagaagacatatttgaagagacaatgctcaggaacttctaaaattgatgaggtcatcaattcacaaatggaagaagttcagcaaatcccaagcaagttaaatacaaaacaaaaataagccaacaaatttaaaaatcccatatataggcatatcataatcaaaaaaaaaaaaaaaaaaaaaaaaaaaaan

SEQ ID NO: 18920 - DNA, 251 bp, Homo sapiens
  misc_feature 8, 11, 154, 204, 217, 242: n = A,T,C or G
agtacttntanaattaattaaggcggggtaagagagagtttttaaagaagaaaatcaaaaggtatgtttttgaatgtaattttttttcgtgttaagttcagcttagttaatgatattgtaccaaatatagtttctcaaggcaaaatgtctatanatatcttctacttttaattcataactatattatggtagtgtacatactgnttcttcctggaantaaattaaggtgacactatactaangttgtctta

SEQ ID NO: 18921 - DNA, 325 bp, Homo sapiens
  misc_feature 115: n = A,T,C or G
agtacttctagaattaattaaggcggggtaagatttgccgagttccttttactttttttaacctttccttatgagcatgcctgtgttgggttgacagtgagggtaataatgactnaaggttggagagctaaacactgggatttttggataacagactgacagttttgcataattataatcggcattgtacatagaaaggatatggctaccttttgttaaatctgcactttctaaatatcaaaaaagggaaatgaagtataaatcaatttttgtataatctgtttgaaacatgagttttatttgcttaatattagggctttgcccc

SEQ ID NO: 18922 - DNA, 390 bp, Homo sapiens
agtacttctagaattaattaaggcggggggttcatagtagaagagcgatggtgagagctaaggtcggggcggtgatgtagagggtgatggtagatgtggcgggttttaggggctctttggaacagatttctgacattgatgatgcagtaagaaaactgtaaaattcgagccatataaataaaacctgtactgttctagttgttttaatctgtctttttacattggcttttgttttctaaatgttctccaagctattgtatgtttggattgcagaagaatttgtaagatgaatacttttttttaatgtgcattattaaaaatattgagtgaagctaattgtcaactttattaaggattactttgtctgcccaccacctagtgtaaaataaa

SEQ ID NO: 18923 - DNA, 120 bp, Homo sapiens
  misc_feature 50, 53, 70, 75, 76, 83, 84, 85, 97, 101: n = A,T,C or G
gtaccgggccccccctcgagagtacttctagaattaattaaggcgggacncangggctcatggctgtaancccannactttgnnnggctgagccganggtnagattgcttgagcccagga

SEQ ID NO: 18924 - DNA, 656 bp, Homo sapiens
  misc_feature 130, 161, 163, 164, 166, 175, 182, 187, 189, 191, 196, 198,199, 200, 207, 208, 209, 212, 213, 221, 222, 223, 224, 227,229, 231, 232, 236, 237, 238, 239, 241, 244, 248, 249, 250,258, 261, 262, 266, 268, 272, 274, 277, 278, 279, 286: n = A,T,C or G
  misc_feature 287, 288, 294, 295, 299, 307, 308, 310, 314, 315, 316, 318,321, 327, 337, 338, 339, 342, 345, 350, 353, 354, 357, 358,359, 362, 363, 369, 370, 374, 377, 380, 385, 386, 389, 390,394, 396, 397, 402, 403, 404, 413, 414, 415, 416, 420: n = A,T,C or G
  misc_feature 432, 433, 434, 436, 449, 455, 461, 462, 463, 465, 470, 473,479, 480, 482, 491, 497, 507, 513, 514, 516, 518, 525, 542,552, 560, 564, 566, 567, 576, 577, 587, 603, 604, 610, 611,617, 619, 620, 624, 634, 643, 648, 649: n = A,T,C or G
agtacttctagaattaattaaggcggggaaataaaaactaaataacaaaaaaaaaaaaaaaaaaaaaaaaaaaaaaaaaaaaaaaaaaaaaaaaaaaaaaaaaaaaaaaaaaaaaaaaaaaaaaaaaaanttaaaaaaaaaaaaaaaaaaaaaaaaaaaangnngnccccccccnggggggnccccnantnccccntnnngggggtnnnttnncccccccnnnnggncngnntttnnnnanctngggnnngggaaaanccnnggtntncccnanttnnnccccttnnnaaaaanncccnttttcccnngngggnnnanaanaaaaanggcccccccnnnttnccntttcnaannatnnnccnnccttanngggnaanggnaattnnaanncttnannttttnnnaaaaatccnnnnaaanttttggaaaaannncntttttttttaccnaaaggnccaaannngnaaaanccntttttnntncaaaaaatncccccncaaaaggggntggggnntntnccccttngggaccaaagggccccntttaaaaaangggggccnccancnnaaaaggggnnaaaaaccccntttttttttggggggnngggggnncccccntnngtgnaccccccccncccctttanaaaannttttttt

SEQ ID NO: 18925 - DNA, 246 bp, Homo sapiens
  misc_feature 33, 68, 98, 109, 138, 157, 160, 169, 190, 206: n = A,T,C or G
agtacttctagaattaattaaggcgggggctgntttgatttgaagtggaggccaaaaaactcattagngatattgtcaacgaaaaaagcacgctgaangaaattaacantctaaggctatggccttggtagggctaancaacacattggtggtatancangaaacatancatggggtaaatgaagatganacagacagaggctacntaagttcaccaggccacccagtctgcccaccttgctatgc

SEQ ID NO: 18926 - DNA, 508 bp, Homo sapiens
  misc_feature 173, 174, 175, 176, 177, 179, 180, 181, 187, 188, 190, 191,194, 203, 208, 215, 217, 221, 231, 232, 239, 242, 247, 257,261, 268, 270, 271, 272, 280, 285, 300, 301, 303, 311, 340,348, 349, 353, 358, 383, 396, 398, 413, 416, 438, 439: n = A,T,C or G
  misc_feature 440, 441, 442, 451, 452, 467, 471, 475, 484, 488, 489, 492: n = A,T,C or G
tacttctagaattaattaaggcgggcacctgtagtctcacctactcgggaggctgaggcaggagaatggcatgaacccaggaggcagagcttgcagtgagcagagatcacgccactgcactccagcctgggcgacaaagcaagactccatctcaaaaaaaaaaaaaaaaaaannnnnannncctttnncnnttnttttttaanggaancaaaaancngggngggggggctnncccttgnttnccccncctttggggnggcnagggcangnnnattttttngggtngggatttaaaaaccnntnggcccaantgggggaaaccccttttttcccaaaattnaaaaattnncccnctttnggggggccccccctttttccccccnttcttgggggggntnggggaaaaaaatttnttnacccttggggggggggggtttnnnnnacccaaaannccccccccccctttncccntggnaaaaaaaanaaannccnttttaaaaaaaaaaaa

SEQ ID NO: 18927 - DNA, 407 bp, Homo sapiens
agtacttctagaattaattaaggcggggggattgcttgagcccaggctgtgtggttcaccataattgtgtttgtgactagctactgcactccaacctgggcaacatagtgggacttcatctctaaaacaaaacaaaacaaaattacacttaagcactattgtttaatttttaattgtcagtttatcattattttgggtaagacattctggggtttcttgaatcttgtccaaaaaccagttgttttggaaaattgctttaaattgagcatatttatgtatattggataaaaatgtactacagagcaaatttcaaatttttcattatatcagtctttttgaaaggatcaacttggataaaataaatatataatgctctatttgttagagctctattaaaaaggaaacag

SEQ ID NO: 18928 - DNA, 410 bp, Homo sapiens
agtacttctagaattaattaaggcgggagccaccgtgcccggccaatacgtactttaaataaaacacaagtaggttgaagccagaagacagaaaagataaactatgtaaataataagcataagaaagctgattcgtgaccatattaatgctaccacatagacttcaagacaaagagtataagaggcaaaaaaggacattttataatactcaaaaggtcactggtaaattctatgaaaactttaagatatatttatatcaatggaacaccaacaaatgaactaacactcttatacaaactttcagaaaataaagggagaaggaaaactacccaatttattgtataaggtcagtacaaccctgataccaaaacctgacataaacttgataagaaaaaaaaaaaaaaaaaaaa

SEQ ID NO: 18929 - DNA, 297 bp, Homo sapiens
ggtaccgggccccccctcgagagtacttctagaattaattaaggcgggataatgcagagaggtaccatcttgattttccccagttacattcacctggtctggtctctgtaagcttagaagagtagaatcactttattttttaaagacttccggccaggcacggtggttcacgcctgtaatgccagcactttgggaggccgaggcgggtggaccacctgaggtcaggagttcaagaccagcctggccgacatggcgaaaccctgtctctactaaaaaaaaaatacaaaaagattacct

SEQ ID NO: 18930 - DNA, 485 bp, Homo sapiens
  misc_feature 2, 23, 32, 34, 37, 40, 45, 46, 48, 55, 57, 63, 64, 74, 103,334, 335, 338, 342, 346, 355, 360, 364, 367, 368, 370, 373,376, 379, 382, 384, 385, 387, 390, 395, 400, 402, 403, 405,406, 407, 413, 417, 419, 431, 432, 436, 438, 442, 450: n = A,T,C or G
  misc_feature 453, 459, 469, 472, 473: n = A,T,C or G
anactggccgtcgttttcacccnggaacaagngntanccntgatnntnggcggtncntttctnnagagaactantagaattactttaaggcgggcggatcacngaggtcaggagattgagaccatcctggctggcacggtgaaacccagtctctactaaaaatacaaaaattagcccggcgtggtggcatgcgcctgtggtcccagctacttgggaggctgaagcaggagaattgcctgagcccaggaggaggaggttgcagtgagccgagatcgcaccactgcattccagcttgggcaacagagcgagactccatctcaaaaaaaaaaaaaannttntttntttntttaaagtnccttnaaanaanntntanttnggnccntnngnaancaaanttttnannannnaggggncagnangggggggttttnnaaangncccntttttaanaanttaaanaaccccaaanttnnggttaaaaaaaa

SEQ ID NO: 18931 - DNA, 289 bp, Homo sapiens
  misc_feature 248, 249, 250, 251, 278: n = A,T,C or G
agtacttctagaattaattaaggcgggtggtaattactttcctttcacaaaatttgaaatctattttaattctccctttgactcaaaaatctctctctcaatacacacacacaatggggctcactcacccaccacattaacaacataaaaccctcattcacacgagaaaacaccctcatgttcatacacctatcccccattctcctcctatccctcaaccccgacatcattaccgggttttcctcatnnnnaaaaaaaaaaaaaaaaaaaaaaaaaangcggccgccac

SEQ ID NO: 18932 - DNA, 703 bp, Homo sapiens
  misc_feature 532, 614, 648, 675, 690: n = A,T,C or G
agtacttctagaattaattaaggcgggagacgtcttacagaggaacaaaaataaggatgacagaaaacttcacctcaaaaacaatgcaaaggagaaaacagtagagtgccatctttatgaatacaggagagaaaaaagtcagtctagaattctatataacaagccaaaatattttttttaaataaagaagaaaattaaacttttgcagacaaaagacagaaaaattaattactagctaatcttcacttaagaacttaaagtcgttcaggcaaatttaaatctacataaaggcataaaaagcaatagaaatagtaaacatgtgagcaaatataaaatagtatataaaatacattttaaaacattcaaaactcaacattttaagaatattcaaattaggccgggcgcagtggctcacgcctgtaatcccagcactttgggaggctgaggcgggaggatcacctgaggtcaggaattcaagaccagcctggccaacatggcgaaactctgtctctactaaaaacacaaaacttanctgggcctggtggcaggcacctgtaatcccagctactcggaaggctgaagcataagaatcacttggacgccggatgccggangttgcagtgagccgagatccgcccactgcacttncagccctggatggccagagcaagactntgtttcaaccaaacnaaaaaaaatttca

SEQ ID NO: 18933 - DNA, 199 bp, Homo sapiens
  misc_feature 40, 45, 51, 80, 112, 123, 133, 152, 153, 155, 197: n = A,T,C or G
agtacttctagaattaattaaggcggggagtgatgttctnatttncatcgnttctagcctgaggccagcccttgtctgcnccacacatggaagcaaaaagaatacataaaanttaaaaaaaantaaatcttcnctgggaagtgaaagagganncnggaaaaggagagtaccaggattagaggcacaaattatctgcntt

SEQ ID NO: 18934 - DNA, 257 bp, Homo sapiens
  misc_feature 251: n = A,T,C or G
agtacttctagaattaattaaggcggggggtcagtcagtctgaatattgcatcttttggagaaaaaaggcagccagatggtccacgcagcactggaagaagagggtggtgatgtggtcagtgtactgtgtccctaagaaatgtatgtactgtgaaataaggagcagatggcaggagaactaggagacacttgagtgatgaactcaagtatccagaagaactgggaagcaaaaaaaaaaaaaaaaaaaaaanaaaaaa

SEQ ID NO: 18935 - DNA, 332 bp, Homo sapiens
  misc_feature 115, 129, 147, 148, 149, 152, 154, 155, 161, 162, 172, 186,189, 204, 210, 218, 219, 220, 221, 222, 223, 235, 259, 260,261, 263, 290, 292, 300, 303, 308, 309, 310, 311, 312, 313,314, 315, 316, 317: n = A,T,C or G
tttgcatctgagatcctgctggaaaccacagcaacctgtatccactattaggaggtaaaaatcaataaaatggcccattcaaaaaaaaaaaaaaaaaaaaaaaaatttaaatatntttgctaaaaaaanaaaaaaaaaaaaaaaccnnngtngnnccgttnnttatcaaaanaaaaaaaaaaaaanaancctcccccccccccncggggncccccccnnnnnnaaaaaaaagggnggaccccccccccccccggggggnnnanaaaaaaaaaaaaaaaaaaaaaaaaacncnccctgggntgntctcnnnnnnnnnnaaaaaaaaaaaaaaa

SEQ ID NO: 18936 - DNA, 452 bp, Homo sapiens
  misc_feature 313, 347, 349: n = A,T,C or G
agtacttctagaattaattaaggcgggggggggggctctgacatttacctgctccccacctctgcaggttgcgcttgcaatagacctgtgttgctgtagagccgccaactctctctctgtctttctttaaccttcaccttctcttcaaaacttaacccttagtttcaacattgtaattgccaccctcagtttcaacattgtaatatgttgaacagtaacattttatagaggttcttagagcatttagagtttttttagaacatatgtaaaggccctagcataagcctctagtacctccagacattacaaatgnaacttccttcttctctttctttcctaaatgattngncccaagtctgagaatattataaaaactgcatcagaaaatatacttgaacttagcttcattttatggtggacttataaagctcctatttgacatctttcttttt

SEQ ID NO: 18937 - DNA, 424 bp, Homo sapiens
  misc_feature 2, 25, 28, 30, 42, 43, 44, 46, 48, 54, 58, 60, 70, 339, 340,342, 367, 368, 370, 372, 383, 391, 405, 406, 407, 408, 409,412, 414, 415: n = A,T,C or G
cnggccgtcgttttcccccggaacnagngntacccatgatgnnngncngtcccntccncnagagaactantagaattactttaaggcggggatactgattcagaaatcctgtagcgtgtaataaaagaagaggaaatggcatggaatcactgcctcctgcgatttgaaggccattgtgaaggaaaacaatgcagtgaaagaaagttcttcatattaggacagatatcattgcatcacatttatttatctttctgggtatttttatagcccttaataaaaaatattaaaatagccaaaaaaaaaaaaaaaaaaaaaaaaaaaaaaaaaaaaaaaaaaaannanaaaaaaaaaaaaaaaaaaaaaaaanngncnccccccccccngggggggncccccccccccccnnnnnagngnnttttccccc

SEQ ID NO: 18938 - DNA, 291 bp, Homo sapiens
agtacttctagaattaattaaggcgggaggcacggaatccaaaagcctgttgtttgagagtgtgttaggagaaaggatactagaagtggacacatttcatttctaagacatctcaagataaatgagtaactttccaaatctttcacatgtgtaacatatttatttttgatgcagtatataataatcatatttctatagtaataaatccattcctttgactgtatgtaattctaatttatcacctaccccaccattttatcctaaaaaaaaaaaaaaaaaaaaaaaaaaaaa

SEQ ID NO: 18939 - DNA, 107 bp, Homo sapiens
  misc_feature 63, 89: n = A,T,C or G
agtacttctagaattaattaaggcgggccctgggccgcatggtggagctggagcctgcgcatngagctggctgcacttccccccagcantacaggaggagcactggg

SEQ ID NO: 18940 - DNA, 397 bp, Homo sapiens
  misc_feature 23, 26, 28, 31, 47, 49, 96, 283, 287, 379: n = A,T,C or G
aactggccgggccgtcgttttcngantnggnggtacctatgctgggngncgggccccccctcgagagtacttctagaattaattaaggcgggatanggagtgagttgaatgaaataaaagaaaatcagagaagtccagttagagtaaaagagagaaaaataacagatcacaggaatgtatctgagagtccaaacagaaaaaatgaaaaggagaagaaagttaaagaccataaatctaacagcaaagagagagacatcagaagaaattcagaaaaagatgacancgtntaaaaacaaagtgaagaaaagggccaaatctaaaagtaggagtaagagcaaagagaaatcaaagagtaaagaaagagattcaaaacataatngaaaaaaaaaaaaaaaaa

SEQ ID NO: 18941 - DNA, 421 bp, Homo sapiens
  misc_feature 24, 26: n = A,T,C or G
agtacttctagaattaattaaggngntgtaatttactcaggaagatcacaaattccttaacattctttacaattataaaattaacggcttttttattatcaataaattacttcctattgctccctaaatcacctccataaaaccaaatattaagctgtttgtgttacatttcctgtgatgccttttaaaaacattttgggccgggtgcagtggctcacgcctgtaatcccagcactttgggaggccaagatgggtggatcacgaggtcaggagatcgagaccatcctggctaacacagtgaaaccccgtcttctgctaaaaatacaaaaaaaattagcccgggcgtggtggcgggcgcctgtagtcccagctactcaggaggctgaggcaggagaatggcatgaacctaggaggtggagct

SEQ ID NO: 18942 - DNA, 282 bp, Homo sapiens
agtacttctagaattaattaaggcgggagacaaaagacatatttttcaagtggtgaaagaaaaaaaagactatctactgtgaattctaccattgacaaagctatacttcaggaacaaaagaaaaataaagatatattcagacaaaggaaaacaaaaataatttggcactataagacctacctttaaatattagctaaaggaagttctttaaacacaatggaaataatttttaaaaaggaatcctaagcatcagaaaaaaaaaaaaaaaaaaaaaaaaaaaaa

SEQ ID NO: 18943 - DNA, 498 bp, Homo sapiens
  misc_feature 60, 214, 222, 236, 256: n = A,T,C or G
aattcattagattggtcaaggcatgacactttaactacacaataggatttaaaaagcagntggtttttttagtagttctctggtaatcacacgcacatacacacatacacaaaaatttatagagtactctgaatataggatttcccccttaattaaggcgggcaaaaggggtggatttaatacctttagagacagggaaaattatgacagaggntactctancctgcttaaaaganattttggggcaaaaactcanaatggtgtttacagtgctgcaaattacaccaatgggagctttggaagtaattttgtgtctgctggtatacagaccagttttaggactggtaatccaacagggacttaccagaatggttatgatagcactcagcaatacggaagtaatgttccaaatatgcacaatggtatgaaccaacaggcatatgcatatcctgctactgcagcagcacctatgattggttatccaatgccaacaggata

SEQ ID NO: 18944 - DNA, 401 bp, Homo sapiens
  misc_feature 386, 390: n = A,T,C or G
agtacttctagaattaattaaggcggggtgtggtggcatgtgcctgtagtctcagctactcgggaggctgaggcaggagaatcacttgaacctgggaggcggaggttgcagtgagtcaagatcataccactgcactccagcctgggtgacagagtcaggctccatctaaaaacaaaagattgtcacaatagcagttaacaaacacaaaaacatttcctagttataagaaccttacctggaaactggaaagcaggagacagccaagccgtttgctttctgctaaatcgacactgatagaccggctgagctctaacataaaacatagccacatttaaggagctggatagctacatagttagcaactaacaaaactgaaaaatgtcctncctnttgataaatcc

SEQ ID NO: 18945 - DNA, 416 bp, Homo sapiens
  misc_feature 26, 33, 35, 46, 60, 64, 66, 69, 70, 74, 80, 87, 89, 90, 109,113, 117, 120, 125, 127, 128, 130, 141, 163, 174, 186, 201,218, 244, 251, 291, 293, 303, 309, 339, 358, 378, 381: n = A,T,C or G
agtacttctagaattaattaaggcangtaactntnctttttttatncaacattataacangagngnttnncctngttatnaaaagtntnnaatgaattcataataaaantttngttnccngccgnanncnaatcattcttntattatggaacatttgagtggntggtctcttcntgtgataaatanttccatgaggaatcntctgtgcattctatatnatgtatttacaaatatcacacttaanaaccctntttaaaaggttatataacctcttagtaacctctttaacananatttagcttncatatntaactgccttaaaaattttggaaaagaatnatgtgaaatagtctcttangtaaggagactgaaatctanaanacaggctgcaagcttgactctggctctgaaattag

SEQ ID NO: 18946 - DNA, 399 bp, Homo sapiens
  misc_feature 121: n = A,T,C or G
ggcggggttgggaggggtggcaaagtttcactcttgttgcccaggctgaagtgcaatggcacaatcttggctcaccacaaccgctgcctactgggttcaagcaattctgaatggtcttganacaaacagaaaaatggaaagtctcagcaaagaaacagatatgaagaataaaatgaaaattttagaactgaaaaatgcagttacgtgctgtataaccatgtttccatcaacaacggactgcatatacagtgaggatcctgtaagattataatagagctgaaaaattcctatcacctagtgacatcatagtcattgtgacatagcacaattacttaatttttaaataaatttagtgtagcctaaatgtacagcatttataaagtctacagtaatgtaatg

SEQ ID NO: 18947 - DNA, 214 bp, Homo sapiens
  misc_feature 11, 22, 23, 25, 26, 28, 38, 39, 41: n = A,T,C or G
ctggccgtcgntttacaccccnnannangggaacactnncngggtaccgggccccccctcgagagtacttctagaattaattaaggcgggaaattcattaaagtaggaaaagctctcattcaagagcacagggaaatgaaaacctttaaggatttgaatgagtgcaccaaataatataatatcaatgtttccaaaaaaaaaaaaaaaaaaaaaa

SEQ ID NO: 18948 - DNA, 417 bp, Homo sapiens
agtacttctagaattaattaaggcgggagaatcagttgaacgtgggaggtggaggttgcagtgagccaagatcgcaccactgcactccagcctgggtgacagagcgagactgcatctcacaaaagaaaaaagaaaaaaaaagacatgtcaacttaaagcactgtggtatcctggatgagatgattctgggacagaaaaggaatactgggtaacaactaaggaaattcgaataaaatattaactttagttgacaatagtgtattggtattggttcattggttgtgctaatgcaccatattgaagtaatgtaagatgttaaaaatagagggaattgggtgtaggatatatagcaactctactatcttttcagcttttctcaaaatttaaaactattcttaaaaggtcactctccttcct

SEQ ID NO: 18949 - DNA, 394 bp, Homo sapiens
  misc_feature 40, 42: n = A,T,C or G
agtacttctagaattaattaaggcgggcaggtcatctgangncaggagttcgagaccagcctggccaacaggacaaaaccccgactttactaaaattaaccaggcatggtggcgggcgcctgtaattccagctattcaggaggcttaggcaggagaatcgcttgaaccctggagggagaggttacagtgagctgagatcgtgccactgttctccagcctgggcgacaagagcgaaactctgtctcaaaaaataaaagaaatatcttcttgggctctgtctctctgtctctcctcctctcttcttcccttcttgtctttttagttctctttcttctccctttcctttatcttctcctaccaaagaaacttaaaaaaaaaaactgagcctttaaaa

SEQ ID NO: 18950 - DNA, 186 bp, Homo sapiens
  misc_feature 23, 27, 33, 39, 42, 45, 47, 50, 55, 56: n = A,T,C or G
actggccgtcgttttacaccccngaanaagggnacaccntcnggntncgngcccnncctcgagagtacttctagaattaattaaggcgggtgaggatttccccatataccagtgtgtgttcatctacccatgaggaataaaaccatgcagcagcatgcaaaaaaaaaaaaaaaaaaaaaaaaaaaa

SEQ ID NO: 18951 - DNA, 404 bp, Homo sapiens
  misc_feature 24, 32, 37, 38, 40, 48, 50, 61, 65, 71, 72, 84, 88, 94, 95,100, 112, 114, 123, 126, 133, 143, 151, 157, 159, 162, 173,176, 182, 183, 184, 185, 186, 195, 197, 199, 202, 206, 207,208, 218, 220, 221, 231, 232, 236, 237, 242, 247, 269: n = A,T,C or G
  misc_feature 292, 334, 364, 378, 391: n = A,T,C or G
agtacttctagaattaattaaggngggggganggctnntngacatttncntaatgctaaangacnagtctnngggggcgctgcnccancttggnncatgnctacatatgtancngacctgccnatngtgcacntgtaccctanaacttaangtgtantnatngctgactaaanctntgatgnnnnnactaaattncnanacncgannnacaatccttncnncatcttatgnnaatnntacangcctntggatcgtttattcacaagttncacaaaatattttttttactgtncacctgacatctaaagtaaaagcagaataaaataaacttctnaccaatagttaaaaaaaaaagaatgttctnccgaactaaacttnatgtttgaagganaaatgaaatcttt

SEQ ID NO: 18952 - DNA, 278 bp, Homo sapiens
  misc_feature 42, 239: n = A,T,C or G
aagctgggtccgggccccccctcgagagtcttctagaattanttaaggcggggggaagcatttagtatttcattaagtatgatgttagctataggttttttgtagatattctttatcagtttaagaaaatttcctacgattactagattgttcagaattgttttaagatcatgagttgatatttcaattttgttaaatactttttctgtatccattaagataatcatgtgttttcttantcagtcattgtagcccattgtattgcttgattttcttta

SEQ ID NO: 18953 - DNA, 576 bp, Homo sapiens
  misc_feature 22, 27, 28, 29, 35, 36, 42, 44, 46, 47, 55, 64, 65, 71, 73,74, 81, 85, 87, 91, 93, 94, 104, 108, 114, 119, 121, 122,161, 190, 282, 301, 305, 309, 336, 346, 353, 361, 368, 386,393, 396, 402, 422, 423, 434, 467, 475, 478, 481, 483: n = A,T,C or G
  misc_feature 485, 487, 488, 491, 494, 499, 503, 506, 510, 514, 520, 548,549, 550, 560, 561, 563: n = A,T,C or G
actggccgtcgttttacacccnggaannngctttnnccttgntncnngcccgcgnttttccacnnagaaanannaaaaacntttntngttngnngtggctttangganaaaaangaaangnnttgtgttgttttgttcccctgccctcctttctcaaaaanatttttgttattgttgttgttgttcttanacgagtgcctcctggtgcctgcggcatccttctgcctgtttctgtaagcaaatgccacaggccacctatagctacatactcctggcatttcnctttttaaccttgctgacntccnaatngaagataggactatctaagccctaggntttctttttnaattaanaaataatnaccattnaagggccaaaaaccctgntttaacntancctttntgtttttaaaaacttaaacnncccggcctggnggctcacccctgtaatcccaacacttttgggangcccaggnggnttntnangnnccnganaattnaaanccnttcntggntaacancggggaaacccccgttttttcttaaaannncaaaaaattnncngggggtggggggg

SEQ ID NO: 18954 - DNA, 159 bp, Homo sapiens
  misc_feature 142: n = A,T,C or G
agtacttctagaattaattaaggcgggggaaggggacacaggatctctctgtattctttcaactgcatgtgaaactatgagcatctcaaaataaaatttaactgtaaatacaaaaaaaaaaaaaaaaaaaaaaaaaaaaaanaaaaaaaaaaaaaaaaa

SEQ ID NO: 18955 - DNA, 185 bp, Homo sapiens
  misc_feature 46, 49, 58, 59, 69, 87, 90, 93, 96, 121: n = A,T,C or G
agtacttctagaattaattaaggcgggacctggaattgatttttgnttnttgagaagnnagaatccatntaatatgtcaattagatntgntgngtnattaaccaccccaaaacttagtggnttaaaagaaccaccatttatttaacatatattcctatgaggctggtctcaactgggctcaccca

SEQ ID NO: 18956 - DNA, 404 bp, Homo sapiens
agtacttctagaattaattaaggtgggcacatttaaggtcagttcactaacctatggttcagagttctgatcatatggaagtttggaaaagagagcttatcacaggtttgtatgctggtgaatggatagttttaattctcactgtctcaaaagagaatcagctctccagcagttctagaaaagctttgacaatccccaaggggcagtgttaccttactccttcactgcttcttagaaggtagaattaagtttctggaattgcacctacatgttttcttattaacattcagaattgggaatattaatttttccagtgagtagttttctgaaattggtaacttggagagtaaaataaccgtattttgcttttcaattttgtgtttggttacttttatgtaaaaatt

SEQ ID NO: 18957 - DNA, 175 bp, Homo sapiens
agtacttctagaattaattaaggcgggagccgttaagggactttaagtaagggatgataagacagcatctgctaagtattaaacacattgttagctaacatgctgacattgacggacactacagaaaaaaaacttaaaagcagacaaaaaaaaaaaaaaaaaaaaaaaaaaaaaa

SEQ ID NO: 18958 - DNA, 415 bp, Homo sapiens
  misc_feature 8, 21, 22, 24, 25, 27, 28, 30: n = A,T,C or G
agtacttntagaattaatganngnngnntnaatatttaaaatctaaaaacctcagatcagcagaccgagtcgaaatgtgattcttcaaagcaagtattgctttacccttgtcctgaatgcagtccgtcatatgaccactaacttgcatgtgaccaaatgtttgcagagtgtttttttagatatgctctcggtgagccgtcatccgtcaatccaagaagaagatgttgttgaactgcgttgcacaaagtttcttgacctcttcatttacttcaatcaggtttgcatttttttgattcaaaataacatagagcccccgccttaattaaggcgggagaactcactgaggatgaggtggaacgtgtgatcaccattatgcagaatccacgccagtacaagatcccagactggttcttga

SEQ ID NO: 18959 - DNA, 352 bp, Homo sapiens
ggtgccgggccccccctcgagagtacttctagaattaattaaggcgggtggggggagtgggcggcattcctcccagctttaaattaggaagtttcaggacccactccttctcctaggtctatattagtatcacctgggggcagacttaaacaaatattggttctcaagtaccacacccccccagattctgatataattggcttggcctggggtcagacactgacctttttaaagctctccaagggatgacagccagggttgcaaagcaatgaaatataccagggattcccaacttggctaaatattacaattatctggggaccatttaaacatacccaaacccatgccacct

SEQ ID NO: 18960 - DNA, 334 bp, Homo sapiens
  misc_feature 57, 60, 64, 89, 95, 96, 136, 158, 171, 176, 190, 193, 213,219, 223, 224, 237, 238, 239, 249, 269, 271, 273, 288, 300: n = A,T,C or G
agtacttctagaattaattaaggcgggggggaatggattgggcagtttgaggagctnggncaanacttgaaatagttgcagaaaatganagtaanngtcactggggaaatgtggaattatatattaagcaaaacangctggttgtagcaataactagntattatttttacngatanccaaagaaaaaaanccncaacaaaccaacaagccttnttaatncatnnccttatgataccnnntacttacaangttgtttaaatggacatcancngngcataattaaaatanacctaaattgtngcttgcctttagtgaatagataaattgcttatct

SEQ ID NO: 18961 - DNA, 254 bp, Homo sapiens
  misc_feature 38, 51, 60, 75, 80, 82, 86, 108, 111, 141, 159: n = A,T,C or G
agtacttctagaattaattaaggcgggggggatttgtngcctaacattggnaggactttncatctaagaatacanaagtncngganggcgaagaaaagaatagataanatngggaaattagaagataaaaacatacttttngaagaaaaaagatcaatntaaacctgaaaagtaggaagcaagaagaaaaaagacaagctaggaaacaaaaagctaagggcaaaatgtacaaacttagaagaaaattggaaaaa

SEQ ID NO: 18962 - DNA, 343 bp, Homo sapiens
  misc_feature 55, 265: n = A,T,C or G
taccgggccccccctcgagagtacttctagaattaattaaggcggggagccagcntcagacatgctaatatccaaaaacatctactcacatcaacttaatttccagtttctttcaaattgaaggtaagttccaagacaaactttttattctattctctgaccaagtgttgggaaaagaaaactgttaccattttcatttctagcatactaaaacaaaaaaacataaaaaccccaaaatctaaaacacttttaaaaataacatggngttaagagtagtttgttcagtttccctatagaaaatgatttatggaaggagaataaaagattattctgaacactaaaa

SEQ ID NO: 18963 - DNA, 351 bp, Homo sapiens
agtacttctagaattaattaaggcgggggagggcttctcataacaaaaactatcacaaaagactctgcaaaccccacaatgttgcacaaagatcatcataacctttcaaaaaaaaaaaaacacttctgctaggacagctgccagcaactgcctgttgaaacttggactgatgccaccctgttattgatccttacagccaaggagaattatcgcaaaacaattatgtaatcctcctcatttttcctgtgtcaactttcatcttcctttacctccccaaatacaaacataatttactatgacacccgtattcccattgcaatgccctatccccaaataaatgtcattttcctt

SEQ ID NO: 18964 - DNA, 405 bp, Homo sapiens
  misc_feature 29, 34, 38, 41, 49, 75, 77, 78, 87, 89, 92, 100, 106, 113,118, 119, 125, 126, 127, 129, 130, 134, 142, 144, 180, 183,197, 198, 218, 222, 225, 227, 228, 231, 232, 239, 243, 265,267, 270, 301, 366: n = A,T,C or G
agtacttctagaattaattaaggcggggnggacnatanacnagataagnaatttagactataatgacatactttngnnacattaagnanttntttcaccnttaatngttcganacatnncaaaannnannatcntggatacngnaagctcctggcaaactgtacttgagaagataataantangatttttgttttgnntccccttttgcggggcaccncganaantnnttnnaacttangaantgccccccccttggtgaacatncnatnaataaaagccctggaaacaaggtcatactanagattggttgtgccttgtcacaactgcaaacaatacctgagtggagtattcaaaaacttgcttanaaagaaaactctaggaacagatggcttcactgaagttat

SEQ ID NO: 18965 - DNA, 579 bp, Homo sapiens
  misc_feature 30, 31, 34, 36, 39, 42, 47, 48, 49, 54, 60, 61, 71, 560: n = A,T,C or G
attactggccgtcgttttacaccccggaannagngntanccntgatnnntggcnggcccnncctcgagagnacttatagaattacttaaggcggggtatacagattggaaaggacagtatgaatgcctataatagaaaatgccatggactcaccaaaaattctagaactaataaatgagttaagcaaggtcacaagatagaaaaggcagttgtattttaatatactagcagtgaacaattggatattgagatattaaacagtaccatttgcagtaacttagaaaaaaatgaaattctatgtataaatctcacaaggatctgtatactgaaaactataaaaacactgataatgaaagaaatccaggacccaaataaatggagagatataccatgctaaaatgttggttctccccaagttgatttatagattaagcacagtcccaagcacaatcacagcatgtttgtttataaatattactatagatgtaaatatctaaaatctgtgcctttacatgtagattttaaaatctgtatgaaaaggcaaaggaactaaaaagccnaaacagtttggaagaaaaa

SEQ ID NO: 18966 - DNA, 125 bp, Homo sapiens
  misc_feature 68, 82, 84, 89, 102, 113, 122, 125: n = A,T,C or G
agtacttctagaattaattaaggcggggatgaaaccgatatcgccgatacggttgtataggattgctngaaaaaaaaaaaananttaangttttaaaatagnaaataataaanaaaaaaaanaan

SEQ ID NO: 18967 - DNA, 380 bp, Homo sapiens
  misc_feature 2, 21, 24, 31, 33, 43, 47, 49, 63, 65, 67, 73, 75, 82, 89,91, 102, 111, 118, 121, 122, 123, 136, 163: n = A,T,C or G
anactggccgtcgttttacanccnggaaaangntttaaccttnattntngcccgcccttttcnananagaaananaaaaaanctttatngntgggcattccngatcggccnagaaagngtnnngggaagaaagttngatttacgccgatgaatatgataaganaaatggattcagtataaggataaggagggaaggtggaccagaatgaaaactgtaaatatttttttaacctaatatcacttaaatcgaggcagaaagatatagacattcaatgaattatattcaatgcatttaaaataccactgtaatttgacagagtaaaagtatagatacaaaaccttgtgtaagaggctgactttttcaaataaacattttttga

SEQ ID NO: 18968 - DNA, 793 bp, Homo sapiens
  misc_feature 2, 29, 32, 34, 35, 37, 46, 47, 48, 51, 63, 74, 75, 541, 578,590, 604, 609, 629, 633, 646, 664, 708, 717, 729, 772, 777,778: n = A,T,C or G
anactggccgtcgttttcaccccggaacnagngnnanccatgatgnnngcncgggcccccccncgagagaactnntagaattaattaaggcggggttgcaacttattctattgtaagatactgttaaatctaatagaggcattgtcacttttacgtataattttattttatttcatatatttcctattggctttttacatttaaattatggagcacttcatcatataaaaaacttcaattatatttaaacagtaagtctttggatttttttgccttgtaatttccatattacataataatgagataaacattaatgttttcagggtactttaaattttagataattactcattgtattcatgtgaaatttgtttttactgcatgtgtgggttggaggactgttttcacttctgattcatctttactcttatctcatcagagctcatacctcttggagttgggggattgcagtttataattccaataaatggggcaaattcaataataaccttaatacaaatgagtttgaatgccgggacangtcttcaaagcatacacaacatgggcctacattggtnccaccaattatnatttataagtaccnggttnggatggaaaagtaaaaagtnccanaaaattgtttaanggaaaattaaaagggaancatgtctcaataatccctggaccaaacaaaaattaagtaaggcntcaataagnggaactcaaccnccctggattgccaaaatcccaaccaaaaccttaaatattttcntgggnncctgcctttttggaa

SEQ ID NO: 18969 - DNA, 670 bp, Homo sapiens
  misc_feature 2, 19, 182, 213, 230, 237, 266, 277, 283, 301, 303, 341,354, 394, 436, 441, 449, 469, 471, 472, 481, 490, 493, 499,518, 528, 529, 555, 567, 572, 579, 591, 597, 618, 624, 629,651, 652: n = A,T,C or G
tnccgggccccccctcaanagtacttctagaattaattaaggcgggccaactcaaagctggggcttccaggctgtaggtaaatttaaacattttctggttgacaattgcttgagtttatttgaagacctgggattaatggaaagaaatgttcaggttaagataaatgattgtggggaccaanttttactgtgcaataggaatctctcagcacnacttcagtagagagcanatttgtnaaatgtttcttatcggacccaaaagggtngcctggctctnaactgnaatatcccctgggatctngncattagaaagggaaagggaaaacaaagggggaaaaggngggttctctatangaatggtgggatttttcccacaaggagacttttgccaggngccaattttcaagggcatggcaagggaaaataatatttttgngattnaaaattantttttcttcccttggtctcngnnaagggtttnttgcccagnaantccaanatttgaaaaaaggcaaagntccaccaaannattacaggggttcaaaattaaaaaancccatccttgantggangaaatcncattgggttttngtaagnggccaccggaactccccttgnaacccnccttnatagttagggaaatttttgggnncaaagattaaaaaaaaaa

SEQ ID NO: 18970 - DNA, 387 bp, Homo sapiens
  misc_feature 149, 154, 201, 217, 234, 252, 295, 352: n = A,T,C or G
agtacttctagaattaattaagctgaattttatgttactttattatgagggaacaatgaataatttaaattacagtttaagtaagttttagatccctttatattttcaaaatgaaataaaagatatacaatagaattaatattcaaatnatatntaactatcactcaaaatatgtatgataatagccaggcacagtggctnatgcctgtaatcccancactttgggagaccganttgggtggatcacctgangtcaggagttggggaccggcctgcccaacatggtgaaaccccntctctcctgaaaatataaaaattagctgggcgtggtggtgtgtgcctgtaatcccanctgctcgggaggctgaggcagaagaatcacttggg

SEQ ID NO: 18971 - DNA, 384 bp, Homo sapiens
  misc_feature 119, 123, 125, 143, 150, 151, 152, 153, 155, 158, 162, 164,165, 167, 168, 172, 173, 175, 176, 178, 179, 180, 183, 188,191, 192, 193, 194, 201, 208, 213, 217, 218, 228, 230, 233,235, 236, 241, 245, 249, 258, 267, 270, 276, 277, 278: n = A,T,C or G
  misc_feature 283, 305, 321, 326, 328, 330, 331, 357, 358, 361, 364, 373: n = A,T,C or G
agtacttctagaattaattaaggcgggggggagacaaaaaaaaaaaaaaaaaaaaaaaaaaaaaaaaaaaaaaaaaaaaaaaaaaaaaaaaaaaaaaaaaaaaaaaaaaaaaaaaaaanaaananaaaaaaaaaaaaaaaaanaaattcnnnncnctncccncnngnntcanncnncnnnttntattnttnnnntgacccnccccccncctantctnntttatataanangtncnnaattntatnaccntctacatantgtttattntcntcagtnnngcttntttattattcatagatttgctnttacttgccctacctnacatntnanncttttaaaaacaagatgttcctccanncanctncttcaactnaacaacattct

SEQ ID NO: 18972 - DNA, 630 bp, Homo sapiens
  misc_feature 2, 14, 35, 43, 46, 48, 49, 52, 58, 201, 202, 207, 229, 230,231, 232, 234, 238, 240, 271, 276, 277, 281, 282, 283, 287,288, 289, 291, 292, 295, 296, 298, 300, 301, 302, 304, 307,308, 316, 317, 322, 324, 330, 338, 342, 344, 345, 346: n = A,T,C or G
  misc_feature 353, 363, 367, 369, 370, 371, 372, 374, 375, 381, 386, 387,388, 390, 394, 395, 396, 398, 399, 402, 403, 404, 405, 411,412, 413, 414, 415, 416, 417, 418, 432, 433, 434, 435, 438,444, 445, 446, 447, 448, 449, 450, 451, 452, 453, 454: n = A,T,C or G
  misc_feature 455, 456, 457, 458, 459, 460, 461, 462, 463, 464, 465, 466,467, 468, 469, 470, 471, 472, 474, 480, 486, 487, 488, 489,491, 492, 493, 494, 495, 496, 498, 499, 500, 502, 507, 508,509, 510, 511, 512, 513, 516, 517, 525, 526, 527, 528: n = A,T,C or G
  misc_feature 529, 530, 531, 532, 533, 535, 536, 537, 538, 539, 540, 541,542, 543, 544, 546, 547, 548, 549, 550, 551, 552, 553, 554,555, 556, 557, 558, 559, 560, 561, 562, 563, 564, 565, 566,567, 568, 569, 570, 571, 573, 580, 584, 592, 598, 599: n = A,T,C or G
  misc_feature 601, 604, 608, 611, 612, 613, 614, 615: n = A,T,C or G
anactggccgtcgntttacaccccggaaaaagggncaccagcnggntnnccngccccncctcgagagtacttctagaattaattaaggcgggtaaaatgaattttgtaatatcctcaggatacttttatcttaaaagtatgttgttaaagattttgtaaattgtatttcaacaattttaaatgtgttgagcaagttgcagnnggggnccccaaaaacccaaccttggtnnnncncccntnttttttaaaatttgggggttttaaaagaaanaaganngagnnnaggnnngnnttnntntnnntnttnnaatatttnntttantngggccncccccccncccncnnnctttttnttaaaaaaantttntnnnnanncccccnccccnnncncctnnngnnggnnnncccccnnnnnnnnccccccccctcctnnnnctncttttnnnnnnnnnnnnnnnnnnnnnnnnnnnnntntttttntttttnnnnannnnnnannnanaaaannnnnnnaannaaaaaaannnnnnnnnannnnnnnnnnannnnnnnnnnnnnnnnnnnnnnnnnncncgggggngggngcgccccncccccnnanttntttnttnnnnnaaccccccccccccc

SEQ ID NO: 18973 - DNA, 855 bp, Homo sapiens
  misc_feature 47, 153, 160, 176, 201, 233, 264, 271, 272, 273, 274, 275,276, 282, 283, 284, 285, 286, 287, 288, 289, 290, 291, 292,293, 294, 295, 296, 297, 298, 299, 300, 301, 302, 303, 304,305, 306, 307, 308, 309, 310, 311, 312, 313, 314, 315: n = A,T,C or G
  misc_feature 316, 317, 318, 319, 320, 321, 322, 323, 324, 325, 326, 327,328, 329, 330, 331, 332, 333, 334, 335, 336, 337, 338, 339,340, 341, 342, 343, 344, 345, 346, 347, 348, 349, 350, 351,352, 353, 354, 355, 356, 357, 358, 375, 380, 386, 388: n = A,T,C or G
  misc_feature 406, 416, 417, 422, 433, 442, 448, 460, 467, 469, 470, 511,529, 553, 556, 573, 575, 576, 581, 589, 600, 610, 613, 628,630, 637, 639, 640, 645, 647, 648, 649, 652, 670, 679, 686,687, 689, 697, 707, 710, 734, 743, 752, 760, 763, 766: n = A,T,C or G
  misc_feature 770, 771, 775, 778, 779, 786, 798, 800, 803, 814, 818, 820,823, 826, 833, 834, 835, 840, 848: n = A,T,C or G
agtacttctagaattaattaaggcgggtcacctgaagttgggagttngagaccagcctggccaatatggtgaaacctcgtctctattaaaaatacaaaaattagccgggcatggtggcacacacctgtaatcccagctacttgggagcctgangcagganaattgcctgagcccangaggcagaggttgcagtgagctganatcacacctctgtactcctgcctgggtgacanagcaagactccatctcataaaaaaaaaatgnaaacaannnnnnaaaaannnnnnnnnnnnnnnnnnnnnnnnnnnnnnnnnnnnnnnnnnnnnnnnnnnnnnnnnnnnnnnnnnnnnnnnnnnnnacaccgtcgtaattggnaaacncttggntnttccccccttttttgggnaattggaaanntttcncccttttattnttttttggnaaaaantacccaaaaaanttttttngnnaaaaaaacaccctttttttttttaaaaccaaaaacgccccnaaattggggaaaaaaatncctttttttaaacttaaaaaaaanttnccccccaaaaagggggntnnaaagntttttttnaaaatttgggnaaaaaaattnccnctttttaaaaaaaangngggggcncnncaacncnnnaangggggggaaaaaaacccnttttttttnggggggnngnggggcccnttttgggaanacnccccccaaaaaaaattttttttgnggggggggnggggggggnaaaaaaanaanaanatanncccnttnntgggggncccccctttttntnttntttgggggggnaaancnccntanttttttnnnaaaangggggggnaaaaaaa

SEQ ID NO: 18974 - DNA, 344 bp, Homo sapiens
  misc_feature 33, 39, 44, 63, 145, 202, 217, 225, 231, 245, 248: n = A,T,C or G
agtacttctagaattaattaaggcgggcgagtnggacanttaantgagaaaatgaaatagaangcatccaggttagaaagaaagaagttaatctatctctattcacagatgacttggtcttatacatagaaaaccctaaagaatncacacacacaaaaaaaaacctatcagagctaataaatgagttcagtaagttacagcntacaagattaagatncaaaaatnaattgngtttgtatacgctntanaacaatctgaaaatgagtaaaaattaaaaggagtaaaatgcttagaataaatttaatgaaagaagtgcaagacttgcataatgaaaaccacaaaac

SEQ ID NO: 18975 - DNA, 316 bp, Homo sapiens
  misc_feature 19, 29, 30, 31, 35, 43, 52, 54, 64, 67, 68, 73, 81, 103,104, 106, 112, 139, 141, 143, 144, 145, 152, 160, 164, 178,223, 272, 285, 286: n = A,T,C or G
agtacttctagaattaatnaaggcggggnnnttgnaaataaanttttattgnancacaaagtgnaanngaaangataaaangtagccctggccccccgcctgnngngtaaantgagcaccattggtagtaattctcccncncnnntaaggtncaattttnaagnataacaaatgtgancatgacatgaaaatattctagaatagatactgtattaaatattgncatgtttacaatatgtaatatgtttttagcccgatggatttaaacatgntagattcaacctnngaatccatttgtgatatttgtaaaataaaa

SEQ ID NO: 18976 - DNA, 375 bp, Homo sapiens
  misc_feature 18, 23, 26, 30, 32, 35, 37, 38, 40, 44, 46, 50, 57, 61, 62,67, 71, 72: n = A,T,C or G
ctggccgtcgttttacancccgnaanaagngntancnntnatgntnggcngtccctncctnnagagnactnntagaattacattaaggcgggaggactgattcctgtattcccttctgcctctgctggggcttctgccagttgataagatgaggcaagattacttaataaggttcattaggtaactctacgtcacctgcctgccttgttgattgttgggatcctttgtaaccaagccaatcatttatcctgatttacttgggaccatctgaagctctcccattgtcccagtgtaattattagtgttcctttcattcttaaaaaggtcctagtttagggaaggggaacatcacacactggggcctgttgtggggtg

SEQ ID NO: 18977 - DNA, 139 bp, Homo sapiens
  misc_feature 14, 28, 37, 38, 45, 54, 58, 61, 64, 65, 73, 77, 88, 91, 117,120, 122: n = A,T,C or G
agtcttctagaatnaattaaggcggggncagaaattnntatcatnactgaattnttanaanacnnataccaanaagncctgaactcanganttcaatgctaagagaagttaacatanatnantattggataggtaaaac

SEQ ID NO: 18978 - DNA, 406 bp, Homo sapiens
agtacttctagaattaattaagggggatgggaatagagacattcatctacctactttgtgtttttttccttttcatccagctccctgtttcttgaagtgaaagagctcttcctggcagctgtgcggctggaccctacctccattgaccctgatgtgcagtgtggcttgggagtccttttcaacctgagtggggagtatgacaaggccgtggactgcttcacagctgccctcagcgttcgtcccaatgtgagcccaggggaggaatggaaatgggacatgactgtgtaccttattgaagagccatttgttgggaagctgggtttgatggtgcatgcctgtagtcccagctacttgggaggctgaagtgggaggatcgcttgagcctgggagttcaaatccagcctgg

SEQ ID NO: 18979 - DNA, 372 bp, Homo sapiens
  misc_feature 128, 252, 253, 317: n = A,T,C or G
agtacttctagaattaattaaggcgggtgtcactccttgccaaagctttagaaagccttcctcttcaatgatccctagagctgtgcgcaccattcccctatagggggcagattctcttgcaccgtctnccaaccgagcaagagctgcttctccttgcatttggagtcgagtttttgtgagatccaggggaaaggttgctaacaaaaacacaaatgcagggaaaaacccacaacattcagagaaacaaacaannatctaaaatcataggagtaatattttcccaagactggttgttctcaaattttagaatatatcanaatcagctagggagattttaaaaatttagaaatttcctagccccgtgcccatgga

SEQ ID NO: 18980 - DNA, 454 bp, Homo sapiens
  misc_feature 18, 20, 27, 30, 33, 38, 41, 42, 51, 52, 54, 288, 338, 342,349, 394, 401, 414, 417, 419, 421, 422, 431, 442, 443: n = A,T,C or G
gcaattaaccctcactananggaaccnctnctnggtgncgnncccgccctnnanagtacttctagaaattaattaaggcgggtgggatcacgaggtcaggagatcgagaccatttggctaacaaggtgaaaccccatctctactaaagaaaaatacaaaaaattagtcgggtgtggtggcaggtgcctgtagtcccagctacttcagaggctgaggcatgagaatcgcttgaacccaggaggcggaggttgcagtgacccaggattgtgccactgtactccaggctangtgagattgtgacactgtactccaccctgtctcaaaaaatcaaaaaacanacanacaaaanaacccagtaaatcaaagtctgtacattttaaattaaggacttacngttatanagagaaatcaatntgntntnngcgcgtttntcccttaccannaacagggagtt

SEQ ID NO: 18981 - DNA, 172 bp, Homo sapiens
  misc_feature 172: n = A,T,C or G
agtacttctagaattaattaaggcggggtaagggtgaaatactgtaaatggaagctttctgcttaaaagccaagtgattatttttattagttcttttcagcattggaataaagaatcagcctctggtgcaaaaaaaaaaaaaaaaaaaaaaaaaaaaaaaaaaaaaaaaaan

SEQ ID NO: 18982 - DNA, 390 bp, Homo sapiens
  misc_feature 28, 33, 46, 48, 55, 61, 88, 273, 277, 278, 285, 286, 287,288, 289, 307, 308, 311, 317, 322, 323, 324, 327, 331, 340,341, 342, 343, 346, 348, 349, 350, 352, 362, 363, 365, 366,368, 370, 377, 383: n = A,T,C or G
agtacttctagaattaattaaggcgggnaaacntgtagagaaaatntnactgaanattgtnaaaggattattaaaaacaaggtatganaatagagagtgataaaatagacttaaaagtaaggaggaacatcccactaaaacttaagccttaaaaagagtcagaagtcaaataagtaaagatgataaaacattaagataaaaaatttgacatggtgaaagttgagagattttaagaacataaactaaaacatgataaaaaaaaaaaataaaaantttnnttggggnnnnnaggcgggggggaaccccnnttncccctnttggnnngantttnccccccccnnnnggncnnntntttacaaaanntnntnanaaaccanataatntactttt

SEQ ID NO: 18983 - DNA, 753 bp, Homo sapiens
  misc_feature 493, 569, 625, 654, 660, 668, 672, 678, 706, 708, 714: n = A,T,C or G
agtacttctagaattaattaaggcgggcgcctgtaatcccagctactagggaggctgaggcaggagaatcacttgaacatgggaggtggagtgagccaagatcatgccattgcactccggcctgggcaacaagagcgaaactcggtcttaaaaataaaaaaataaaacagcctcacaggtgtgctgaatcttgacctgagagtcaccaatccatctgtggaccagattcacctataagagtcaattttgcaattttccactgcctccaggtgtgacattcagagcttcagaagtaggttatgtttatgttaagggatgacaatatttactgttggctggttgcgcatatgagtataacaatgtcacctgtgtgctgggccatgtaagggcactcagtgtattacccgagggctttatacaatatacaggagagtcaaatccactctgagatctttgtgattgtataaaaccatgatcgtacctgcggccctangcccagactggggcaggtggatcatgaagtcagtagttcaaggaccagcctgaccaacatggtaaaaccttatctntacttaaaaataccaaaaaaagccgggcattttccaactgttaaaaaaggcttgangcaggaaaaatcactttgaacctgggaangggganggttccantaanggtganctcgtgccccttttcctccagccctgantngataanggaaacctttgtttcaaaaaaaaaaaaaaaaaaaaaaaa

SEQ ID NO: 18984 - DNA, 153 bp, Homo sapiens
agtacttctagaattaattaaggcgggtatgtaacatacatactgctttgtaaatacgtgcataataaatgctgttgtttactaaagcttaaagctctatagactagcatactgtcttattaacaaaaaaaaaaaaaaaaaaaaaaaaaaaaa

SEQ ID NO: 18985 - DNA, 130 bp, Homo sapiens
  misc_feature 48, 77, 114: n = A,T,C or G
aactacactcccatagaattctagcattccatgaaataaacagtgaangctgaacattcatgaaattttcccaattntctataaaaatgttagtttaacttatacttctcccantccaaaaaaaaatttt

SEQ ID NO: 18986 - DNA, 403 bp, Homo sapiens
agtacttctagaattaattaaggcgggagaggacagaaaagttctacattcaggctgccccccaccctgagactttgactgtgtatcttaatttggctcattctgattctttataataaaactataatcataagtaaaatgatttcctgagctctatgagttgttttagcctattactgaacctgacagagtcacaggaacccccagagttgcagcctggggaacttcaaatttgcacctgaaaactacagtgaaagcagtcttattggggacaatgaccttaaatccgtggagtctcatgctaactccaggtggttagtgtcagaattgaattacagcatgctgcaacacaaaagacaaactttccacattcaaggagttacatgggtatgtgtagatccac

SEQ ID NO: 18987 - DNA, 392 bp, Homo sapiens
  misc_feature 19, 24, 31: n = A,T,C or G
ccggcgttttcttttacancccgnaataagnggtacctatgctgggtgccgggccccccctcgagagtacttctagaattaattaaggcgggtgccatctgtctccgcaatgccccccaagaaacaggctcaggccggggggcagcaaaaaggcggagcaaaaaaagaaggagaagattatcgaagacaaaactttcggtttgaagaataagaaaggagcaaagcaacagaagtttatcaaggctgtcacacatcaagttaaatttggtcaacaaaatccacgtcaggtaagtaatttaaatgtccatatctttttataaatgtaatattaatatagcctctgtttcagataaaatgtctggtattattatataattgtatttcaaaaaaaa

SEQ ID NO: 18988 - DNA, 444 bp, Homo sapiens
agtacttctagaattaattaaggcgggcggatctatttgaggttaggagtagatcctaaccaacgtctgaccaacatggcaaaaccctgtatctacaaaaatacaaaacctagccggggatggtggcacatgcctgtaatcccatgtgcctgcaatcccagctgttctggagggtgaggcaggagaactgcccgaatatgggaggaggaggttgcagtgagctaagactgcgccactgccctccaacctgggtgacagagcaagactccgtcaaaataaactaacaaacatacatttcattcatgtttaaaatggcttaaatgaagaattattcacagtaacattatttctaattttcacaattattaattaaggcgggaatggcaatacttgcagaaacagagtagcccattacaaacaaaggcacatgggcctttaaacaaa

SEQ ID NO: 18989 - DNA, 226 bp, Homo sapiens
agtacttctagaattaattaatagatgaataacagaattagctgaccaagtcaattgttgcaagtatttaaagcagactaggtcttaatatcagcaatgttttcagaaattattggagactagaaggtttggaattgaggggaggcaaaccacaggtgtgtaaagaaataaaagtgtgaatttttaccttaagataacaaaaaaaaaaaaaaaaaaaaaaaaaaaa

SEQ ID NO: 18990 - DNA, 466 bp, Homo sapiens
agtacttctagaattaattaaggattgccagcttcagttaagacaagacctatcagtaaatgaatatatgttttgatttaacacatctttacaattaattcataatagggactcaggctcaaataactgttcctgtgtctagatttataatgaggacatcagggagcctttttaagctaaagagtgattatctttcacagtagaactagaaacaaaaccctaacttgtgaagttgctatttatttttccctgagtgaatataactgttatttggtctttaacagatatactgaggtttgagtttcactttctttaagtctcacattgctaacatgacattagctgtaagaaacaagatagctttacatttgaatgccatttactggatttctaatgattctctttttttgtaaacaactggttcctttgattatgtcaacatgtttctgatgtggcatttttggtt

SEQ ID NO: 18991 - DNA, 420 bp, Homo sapiens
agtacttctagaattaattaaatgctgtcgtccagaagtgatgtacagcatttctgtccacaactctttggccagaattattctcatgaccctgccaagggcaaggtggcaaagaagtaccattctttcatgtggctgggagggaaaaaaagaaccagatttagaagagcattagatatctctgtcacatctgaggaacaaattagccatcagagcaaaggtccaggcatcccatctcggcaaacaaagcatgattaaccctagagctgctgattctgagctcaccctacttggattccctccactggccccaagctggcagctgtagctttgcaaacatgataatgcttctcttgttagaactgaatttagaattggcagcaacagaaacctgcaagctgcagttcatttgtgtatcca

SEQ ID NO: 18992 - DNA, 282 bp, Homo sapiens
agtacttctagaattaattaagggggctagggctgaaaaagcaagggggggccaagggccccaggcaaagaagcaggctcaaaggcgggccttcagcgcaagaggcacagagtggcgagaccaccgagacagatgtggaggcattgaggcagccagcgcaggggcttctgctgagggggcaggcggagcttgaggaaaccgcagataagtttttttctctttgaaagatagagattaatacaactacttaaaaaaaaaaaaaaaaaaaaaaaaaaaaaaaag

SEQ ID NO: 18993 - DNA, 165 bp, Homo sapiens
  misc_feature 39, 48, 61, 88, 122: n = A,T,C or G
agtacttctagaattaattaaggcggggtgatgcctgtngggggccantgccctcctaatngtggggtatggggccatccgagctgangccatctgagtggtggtggctgatggtactggantaactgagtcgggacgctgaatctgaatccaccaataaataaa

SEQ ID NO: 18994 - DNA, 214 bp, Homo sapiens
  misc_feature 14, 23, 34, 36, 38, 40, 43, 46, 47, 48, 50, 52, 54, 55, 56,57, 58, 59, 60, 61, 62, 63, 64, 65, 66, 67, 68, 69, 70,71, 72, 73, 74, 75, 76, 77, 78, 79, 80, 81, 82, 83, 84,85, 86, 87, 88, 89, 90, 91, 92, 93, 94, 95, 96, 97, 98,99: n = A,T,C or G
  misc_feature 100, 101, 102, 103, 104, 105, 106, 107, 108, 109, 110: n = A,T,C or G
ccgcgcaattaacncctcactantgggaacaaangntngnttnccnnnancntnnnnnnnnnnnnnnnnnnnnnnnnnnnnnnnnnnnnnnnnnnnnnnnnnnnnnnnnnagtacttctagaattaattaaggcggggggggggtctatacattcctgagattctgggaaaggtgctcaaagatgtactgagaggaggggtaaatatatgtttt

SEQ ID NO: 18995 - DNA, 380 bp, Homo sapiens
  misc_feature 325: n = A,T,C or G
agtacttctagaattaattaaggcgggtggatcacgaggtcaggagatcgagaccatcctggctaacatggtgaaaccccgtctctactaaaaatacaaaaaattagccgggcgtggtgactcgtgcctgtagtcccagctactcatgaggctgaggcaggagaaatcacttgagtccgggaggcagaggctgcagtgacccgagatcgtgccactgcactccagcctgggcgacagagtgagactgtgtctcaaaaaaaaaaaaaaaaactcaatgggctttttctttgttgttggaaagatgcggtcctgctatgtaacccanactcctctttggtctgcatgtatgcctcaaattccaattctttcttgccaaataa

SEQ ID NO: 18996 - DNA, 260 bp, Homo sapiens
  misc_feature 21, 22, 32, 43, 44, 45, 61, 75, 95, 176, 181, 184, 197, 200,202, 206, 207, 216, 219, 222, 225, 230, 232, 234, 237, 240,248, 250: n = A,T,C or G
agtacttctagaattaattannggcggggagngtgtggctgannnaaaaaaattttttctnatttaatcgccatnaaacatgctcagtacctgtnttgagaaaaggctttctttatcctaaagattattacctttttaaagtgctcttatatttctcatgagttctccatatttgnctctncanattttgttattcnccntnttcnnaagggtatntcntgncanatttnangnccntcnctttaccngntaattaattt

SEQ ID NO: 18997 - DNA, 226 bp, Homo sapiens
  misc_feature 203: n = A,T,C or G
agtacttctagaattaattaaggcgggcaggatagttcagacggtttctatttcctgagcgtctgagatgttagtattagattagttttaaacccttgtttgaaagccacattgttttggttatttctattaaattagaaaattgaaaaagttaaaaaaaaaaaaaaaaaaaaaaaaaaaaaaaaaaaaaaaaaaaaaaaaanaaaaaaaaaaaagaaaaaaaaaa

SEQ ID NO: 18998 - DNA, 478 bp, Homo sapiens
  misc_feature 32, 33, 34, 35, 47, 54, 93, 95, 97, 111, 129, 145, 147, 159,162, 171, 175, 178, 181, 186, 187, 192, 193, 231, 233, 242,247, 249, 253, 267, 275, 287, 289, 290, 292, 314, 339, 342,352, 353, 360, 362, 376, 377, 396, 397, 403, 413: n = A,T,C or G
  misc_feature 442, 478: n = A,T,C or G
agtacttctagaattaattaaggcgggggacnnnngcagcagccgangtgggancacagaggagtccactatccctgtggcagactatatgancncnatctagaaagcctntgggctcctcaaaaactnctttgatctgaccatnanttcacatagctncangacacaaantcanganacnaaagnnaatcnngatataaaaatccctgccccaaaattactgataaaaanancaggagctncgaanancatngatacgaaaggganctttaatnggtattcactantnntnaagtcgcccgagaaaaaaatanaagagggcactccaattgcccatanctnaaaaagtggnntacctangnattaatgtaagcanngaggtgaaaaagctctccnngaaaantacatgatcntatttaacttaattgaagaggacccttgngtggtgggtgaacaaagatcattacagccgcccgcn

SEQ ID NO: 18999 - DNA, 316 bp, Homo sapiens
gcggggggttgtgacgttgctagcgcttgtccggtggctgctgcgctgccgcaacgaatagggtttctggctgcgtaggagggacgggggcgcggagctgtgggaaactgcgccaggcgcccgaaaggtgaacacgggagtcgcgcgtctcccccgcagcagcggtaaagcggaagttatgctgcagccggagcccgggcttcctcccggagccgcgtcgcggggcccggctgccccgagctgagcggagcatcctttccgggtgaggggaggagaggacttggcgcgttcccctcgctgccccgggagccgcagc

SEQ ID NO: 19000 - DNA, 409 bp, Homo sapiens
agtacttctagaattaattaaggcgggaccgacagaaaaatttagattcttaaagtagccacattcaaattacccaggagtaattggccacctaagcagctggataaagcaatttctttgaaatacatttcaaggccaagcacagtggctcatgcctgtaatcccagccctttgggaggccaaggcgggctggtctcaaactcctgacctggagtgagccactatatccggcctttataaacttttttgattcttgtcataacacttagcctaaaatgcaaatgtacagctgtagaaaaatactttatttctttatatccttattctagaagctttttttctattaatttttgtttgtttgttttgttttactatttacttctaaaacttttttgttaaaaaccatggc

SEQ ID NO: 19001 - DNA, 325 bp, Homo sapiens
  misc_feature 134, 135, 136, 137, 138, 139, 140, 146, 148, 152, 156, 160,164, 170, 171, 176, 184, 188, 195, 196, 200, 205, 220, 222,271, 301: n = A,T,C or G
agtacttctagaattaattaagggggtctaattttggggatctcttttattatttttagatggagtcttgctctgtcacccaggatacagtgtgatcagaaaacagttttaaggaggtctaattttggggactnnnnnnnctgccntntgtncatnatcntaantattgnnagctnctatgttngatntaaaccnnaatnatatntttttcctatctatntnaggcactggtggaataaaaaacctgtatattttactttgttgcaaatantctttgccgcattttggcaagttgcaaaanatggtggagctagaaaaaaaaaaa

SEQ ID NO: 19002 - DNA, 420 bp, Homo sapiens
agtacttctagaattaattaaggcgggcttgacgacaggctatttgaaatatccactcagagataataaaagaaaaagcatgaagcatgcctacaagatctagaaaatagcctcaaaagggcaaatctaagagttattggccagtagagagagagatagcagagtagaaagtttattcaaagggataatcacagagaacttcccaaacctagagaaagacatcaatattcaagaacaagaaagttatataaaaacaagcagatttaaaccttattaaataagactacctcaagacatttagtaatcaaacttcaaaaggttgagaatacagaaaggatcctaaaagaagcaagagaataaaaacaaataacatgccaagaaccttctatatgactggcagcaaatttctcagtgaaaacc

SEQ ID NO: 19003 - DNA, 209 bp, Homo sapiens
  misc_feature 16, 50, 56, 83, 101, 152, 160, 167, 175, 176, 177, 184, 185,186, 188, 189, 192, 194, 195, 196: n = A,T,C or G
ctacaggtacacaccntacctagcccaacataatattagcacatagaatncatcantatacaaaacagagttatacatcatcnccaagtggtaattatttntggaaggcttcaatacatgaagtgcaatcagtgtaacccattatattagcngactacanaagagcntaaaaaannnaaaaaannnannggngnnnggcccccccccgg

SEQ ID NO: 19004 - DNA, 496 bp, Homo sapiens
agtacttctagaattaattaaggcgggagaggaagcctgcggacacctgccctttgtgattgaaccgcagacaccaggcctggcggggtcgcttgcctccgctgcccaagctaaggctccgctaagctggtcctgagaacatacttcatgctcaacttcagggatgtggctgtagtgtcctcactctatgctgagaatgaaagaagcacagtctatgaaaggaaaaccccgacagcacagagcacttcgtgcggcagcagcacaccgggagtcccactccctttcctgctgcgtttggatctgccgtgacaaggactatcagaaccactcacagtaaggtcgggtcgcgtttctaaatccactgtttatggaccgtcttttcactgagaagaagctcgtcagttcaggggtttctagaacttctccagactcttcaaaaactcatgactttcttccaagttggttaatcccagcacttttgggaggcccaaggcgg

SEQ ID NO: 19005 - DNA, 460 bp, Homo sapiens
  misc_feature 29, 32, 34, 36, 37, 40, 45, 47, 48, 57, 58, 63, 67, 75, 77,80, 81, 82, 85, 93, 96, 97, 104, 106, 107, 112, 114, 119,120, 129, 143, 153, 190, 203, 213, 233, 239, 244, 245, 281,284, 285, 288, 289, 291, 301, 303, 304, 307: n = A,T,C or G
agtacttctagaattaattaaggcggggnganangnnctnccatntnncgaccggtnncatangagngtgcgaantnggnnnccntgattgtntcnnatgctgncnncattncntgatnntacagtgtnttggtcccaaatanaaaaaaaaantaaacccgcaaaaaaaaaaaaaaaaaaaaaaataaantacctgaaaaagnaaagtaaacnaattttatttataataactnccaccnggggnntcataaatgtaaccaaaatggtgaaagatttctatnttnnatnnanaaacactgantnnaanactttctaaatcacaaataaatggaaagatatttctggttcattgattggcagaattaatactgttaaaatgtctacactgagcaaaacaatctacagattcaaagcagtcttttatctgtatacaaatgaaattatttagaatatttcaaaa

SEQ ID NO: 19006 - DNA, 413 bp, Homo sapiens
  misc_feature 48, 57, 99, 136, 151, 161, 182, 187, 223, 227, 239, 261,267, 268, 294, 295, 316, 317, 318, 319, 324, 325, 326, 331,339, 341, 359, 360, 361, 365, 366, 373, 381: n = A,T,C or G
agtacttctagaattaattaaggcgggggaaagagagagctcctttcnccatgtttnaccagtctgctgttataacctcttaggttgtatcctttaatntccagccttttaggttagtttctgtaacagaacaagngagtctgggatgaantcctcaaagnacttcaaatggtaattgtttngtttntgtaatagcttaacaaataaacctaggttttctatnttangaaaaaaaaaanatggtaaaaaatataaataaanagaacnntaaaaaaaaaaaaaaaaaaaaagggnnccccccgggggggggcccccnnnngcccnnnaaaanagggactntnccccccccctgggggggnnntttnnaaaaaanaatggttntaaactgaattaggcaatctttaaaaaaaaaa

SEQ ID NO: 19007 - DNA, 273 bp, Homo sapiens
agtacttctagaattaattaaggcgggggaccggctatccgaggccaaccgaggctccgcggcgctgccgtatcgttccgcctgggcgggattctgacttagaggcgttcagtcataatcccacagatggtagcttcgccccattggctcactcacccaccacattaacaacataaaaccctcattcacacgagaaaacaccctcatgttcatacacctatcccccattctcctcctatccctcaaccccgacatcattaccgggttttcctc

SEQ ID NO: 19008 - DNA, 258 bp, Homo sapiens
agtacttctagaattaattaaggcggggggttgagccgggtagggaaagcagcctaaagcccgggacaggcacacaggcccaggtgtgtaggccacagcagccgcagtcctgaaaggctgcaacacccagacctccaggagagaccaggcccaggatgcctcgcctgttcttgttccacctgctagaattctgtttactactgaaccaattttccagagcagtcgcggccaaatggaaggacgatgttattaaattat

SEQ ID NO: 19009 - DNA, 337 bp, Homo sapiens
agtacttctagaattaattaagggggtaggagtggaaagtatagaggacacagaaaaatatctaaagatacaagagcaaaaaattttccgaatttggtgaaaatttaaaacccacatgcccaaggagctcaacggatctcaagcacaataaacatcaaaaagaaaaagaaactacaacacataacacataacgtaaccaaatcacttaacaccagcaataaagagaagacctcaaaagcagtcaaaggcaggagacgtcttacagaggaacaaaaataaggatgacagaaaacttcacctcaaaaacaatgcaaaggagaaaacagtagagtgccat

SEQ ID NO: 19010 - DNA, 576 bp, Homo sapiens
  misc_feature 68, 70, 102, 375, 387, 392, 399, 414, 450, 454, 455, 459,467, 474, 483, 524, 533, 541, 545, 547: n = A,T,C or G
agtacttctagaattaattaaggcgggagaatcgcttgaacctgggaggcggaggttgcagtgagccnanattgcgccattgcactccaccctgggcaacanagtgagactctgtctcaaagaaaataataataataataataataatcagataaatagaaaaagaggaaaggcagaatttacaaacatatattaaccaagaaatagtgttatttattctttaccatacaaatttgcattgaaaagttcacaatatttgatttttgagctttctgagctcaggattggtcagagcttgaagtttaaaatagttgacagatttagggaatagctttcatgttagttaccgcatgttcattagcttttgagttgcangggaaccatttnaagtnacccccncattttgcgtctttntaagggaatggattttaaagggttaccaccaccttngttnntttnttaacctnttttttnagttccaanaactttaattaccactttcaccaaaccggccaataaatttnttcttaagnttttaaanggangnaaaacaaaacttggggtttaaaaaaaagg

SEQ ID NO: 19011 - DNA, 754 bp, Homo sapiens
  misc_feature 443, 591, 607, 625, 628, 629, 635, 641, 642, 644, 650, 651,656, 659, 664, 666, 667, 679, 683, 685, 686, 692, 697, 698,700, 705, 709, 715, 716, 719, 723, 725, 734: n = A,T,C or G
agtacttctagaattaattaaggcggggtaagatttgccgagttccttttactttttttttaacctttccttatgagcatgccagtgttaggatgtcagttttacaaaataatgaagcaattagctatgtgattgagagttattgtttggggatgtgtgttgtggttttgcttttttttttttagactgtattaataaacatacaacacaagctggccttgtgttgctggttcctattcagtatttcctggggattgtttgctttttaagtaaaacacttctgacccataactcagtatgtctggaattccagaggtcacatcagcatctttctgctttgaaaactctcacagctgtggctgcttcacttagatgcagtgagacacatagttggtgttccgattttcacatccttccatgtatttatcttgaagagataagcncagaagagaaggtgctcactaacagaaggtacattactggcaatgttctcttaacagttaaaacaagctgtttacagtttaaactgctgaaatattatttgagctatttaaagcttattatattttattatgaactaaaatgaaaggnttaaaacatgcttaanaaaaatgcccctgatttntgnnatatgngtaccnnanttgggnnaaaangantttantnnattttggtgcantaantnngaaaanttggnntncattntaanaaaagnnatnaatncnttatttttngataaaaaaaaaaaaaaaaa

SEQ ID NO: 19012 - DNA, 227 bp, Homo sapiens
  misc_feature 49, 51, 54, 55, 60, 65, 68, 89, 102, 142, 144, 150, 188, 205: n = A,T,C or G
agtacttctagaattaattaaggcgggagccatatgaatagtggctggnanacnnaattnttttnaanactccagacaccaaagctcanatgagcttcccantgggcaatattccatgtgtattttcacacaatgttcctananaaatangtactgcacacatgccttcactgggagaggataactgnaagccctgcgccttaangtctcctgaaccctgccttgtg

SEQ ID NO: 19013 - DNA, 423 bp, Homo sapiens
  misc_feature 207, 326, 327, 343, 347, 350, 351, 353, 360, 363, 368, 369,370, 371, 372, 373, 374, 375, 376, 377, 378, 379, 380, 381,383, 395, 397, 405, 406, 407, 408, 411, 414, 415: n = A,T,C or G
taaggaacaaagctgggtccgggccccccctcgagagtcttctagaataattaaggcggggtaagatttgccgagttccttttactttttttaacctttccttatgagcatgcctgtgttgggttgacagtgagggtgtagtagataaattcaaggaaataagagatttgtaagaaactaggaccagcttaacttataatgaatggnattgtgttaagaaaagaacatttccagtcattcagctgtggttatttaaagcagacttacatgtaaaccggaatcctctctatacaagtttattaaaagaattatttttattacccgtnnaaaaaaaaaaaaaaanaaanaannanaaaaaanaanaaaannnnnnnnnnnnnngncccccccccccncngggggggnnnnccnccnntttttttt

SEQ ID NO: 19014 - DNA, 386 bp, Homo sapiens
tactcgggaggctgaggcaggagaatcacttgaacccaggaggcggaggttgcagtgtgctgagatcatgccactgtactccagcctggtgacagagtgagactccgtctcaaaaataaaataaaataaaataaattcttgcctgtggttgttccacatacactattcacaaagggtaattctccagtctcttcaaactcagcactcactcctcaaatagtattggtacacaggtcaacttatcaagagccaaggacatcattcaaaataatttgccttgctttttaattgactactgatgtctgtcctcagtgtcctcaactcttgaagcaactagtcttgcctaaagactactagtcctggatacatttcttcagctgcttaaa

SEQ ID NO: 19015 - DNA, 405 bp, Homo sapiens
  misc_feature 194, 360: n = A,T,C or G
agtacttctagaattaattaaggcgggtggatcacttgaggtcaggagttcaagaccagcctggccaacatggcgaaaccccgtctctactaaaaatacaaaaaaaattagccaggcttggtggcatgtgcctgtagtcccagctactcaggaggctgaaatcacaccactgcactccagcctgggcaacagantcctccatctcaaaaaacaaaaaaaaaagttctacataaatctgattttttaaaataatagttccctttggaattaaatcaggtatcattttagaaatgtctttcccactgccttttctactatctctcctgacccctagtccagcttcacagtagtatctctgtnacctgataaaccataaatgaacaggaattctctacagccattaaa

SEQ ID NO: 19016 - DNA, 228 bp, Homo sapiens
  misc_feature 110, 225: n = A,T,C or G
agtacttctagaattaattaaggcgggggagaatgttttcatgttacttatactaacattagttcttctatagggtgatagattggtccaattggctgtaaactcttcanttcctttggttatggattttgaatcttttctgtgtttcttaataaagttcttttgaaaaatgggaacctttctcagatgggaattttgtatctttcctctgtttcttaataaagntct

SEQ ID NO: 19017 - DNA, 192 bp, Homo sapiens
  misc_feature 61, 148: n = A,T,C or G
agtacttctagaattaattaaggcgggggacaggcagagccaggacaagaccgacaggtcnggctgtgggggtcccggcacctggcgtgagtttcatgtatgaaaacataaaattgaaaaaaaaaaaaaaaacctacacgagcaccgngatttcaagtaataaacagaaaatgaatcacaaaaaaaaaaaaa

SEQ ID NO: 19018 - DNA, 286 bp, Homo sapiens
agtacttctagaattaattaaggcggggtaagatttgccgagttccttttactttttttaacctttccttatgagcatgcctgtgttgggttcacagcgggcagggaaagccgcgggaagggtactccaggcgagaggcggacgcgagtcgtcgtggcaggaaaagtgactagctccccttcgttgtcagccagggacgagaacacagccacgctcccacccggctgccaacgatccctcggcggcgatgtcggccgccggtgcccgaggcctgcgggccacctac

SEQ ID NO: 19019 - DNA, 123 bp, Homo sapiens
  misc_feature 46, 61, 62, 68, 69, 75, 87: n = A,T,C or G
agtacttctagaattaattaaggcgggtgacagctgaggagcaacnaaaaagcagagcatnntgtggnntggaangctgatggcggnaaaatggatgtggccacgtttttgaaatcaaactga

SEQ ID NO: 19020 - DNA, 405 bp, Homo sapiens
  misc_feature 266, 270, 272, 275, 284, 287, 295, 299, 302, 305, 308, 311,313, 314, 316, 317, 322, 325, 337, 339, 345, 353, 359, 364,368, 374, 381, 384, 385, 390: n = A,T,C or G
agtacttctagaattaattaaggcgggcggatcacgaggtcaggagattgagaccatcctggctaacacggtgaaacccagtctctactaaaaatacaaaaattagcccggcgtggtggcatgcgcctgtagtcccagctacttgggaggctgaagcaggagaattgcctgaacccaggaagaggaggttgcagtgagccgagatcgcaccactgcattccagcctgggcaacagagcgagactccatctcaaaaaaaaaaaaaangttntntcnttctttaangtngctttaantaangtntanttnggncnntnnggaancanatttttcattantnaggggncagtaagngggggntttgnaaanggcccntttttantanntttantaaccccaaaaaaaa

SEQ ID NO: 19021 - DNA, 270 bp, Homo sapiens
  misc_feature 26, 35, 36, 37, 41, 47, 48, 49, 50, 60, 65, 67, 68, 81, 90,94, 99, 105, 113, 116, 120, 121, 133, 149, 157, 245: n = A,T,C or G
ttatggaccctgcccgcctgcaatgnagagtgtgnnncccncgcctnnnntcactattgntcccngnntgggagggggttnccccccccncccntcccntatttncctggaanacnaggnnatactacagatnggttgtgccttgtccnactgctancaatacctgagtggagtattcaaaaacttgcttagaaagaaaactctaggaacagatggcttcactgaagttattccaaatatttaanaaataataccaggcttttataaact

SEQ ID NO: 19022 - DNA, 341 bp, Homo sapiens
  misc_feature 65, 85, 162, 168, 224, 229, 256, 273, 274, 279, 294, 303,305, 310, 317, 322, 334, 335, 336, 338: n = A,T,C or G
agtacttctagaattaattaaggcggggcaatatccttgtctaaaaaaaaaaaaagttgacttanacattttctttaacagttgnctttttttttctaaattcagtctttctcttgcttttttttccctgctattgaggaagtatttatgccttccctactnactganaagtaatgacttcgtggtacacattctaaagcatttctgatttgaatatttttgtncattnttatcaattattaaaccttctcttctngtccaaaaaaagataannaaganacataaatatgcggnccgccaccngnggtgnaactccnatacnccctatagtgannncntat

SEQ ID NO: 19023 - DNA, 360 bp, Homo sapiens
  misc_feature 69, 90, 102, 114, 120, 128, 133, 144, 148, 153, 157, 159,160, 164, 227, 245, 253, 255, 266: n = A,T,C or G
agtacttctagaattaattaagggggcaggagagaatatttgaagataataatggctgcatcgcaccangtttaataaaagacatgaatntatacatccaanatgcaccatganctccanggaggatnaactnaaagatccacnccgngacanattntnnttangctttcaaaagacatgataagaccttgaaagcagcactagttaggagcaattcatcacatacnaggggcccccaataaaantatccacngngttttcctcanaaactggaggccacaaagttgtgggccagtatattcaaactgctaaaagaaaaacaataaactaccaagaattctacaactgacaaaactgtcc

SEQ ID NO: 19024 - DNA, 215 bp, Homo sapiens
  misc_feature 28, 29, 33, 39, 65, 73, 77, 78, 89, 99, 108, 158, 171, 182,189, 200, 207: n = A,T,C or G
agtacttctagaattaattaaggcgggnngccntgtgtnttaatcccaaatggccttccaaaatnggcctttnttgnngcaagaattangactttgaanattgtattncatacatttctggattctattatatgaaatgtcagccatcaatatatttngttatttctttgnaggtaatctgncttttgnctcttgatgantctatanttttccct

SEQ ID NO: 19025 - DNA, 414 bp, Homo sapiens
  misc_feature 24, 26, 30, 34, 38, 48, 52, 53, 59, 67, 69, 70, 71, 75, 81,86, 95, 123, 128, 129, 146, 156, 158, 180, 181, 187, 188,191, 198, 203, 205, 214, 215, 218, 229, 234, 241, 243, 244,258: n = A,T,C or G
agtacttctagaattaattaatgnangtgntatntgtnctgactgctncatnncctggntgggtctntnnntgtntttatntcttnactcttccntatttcctgacaaaaaggccatattaantgtanncccttaatggtcctacnatggctcctncntgtacctgtgaaaactagagtnncatgtnnctnactttanattanangcttgaaannatncactgactgangaagngcatgtnannaaaacatgattaancttggcgaggaaggctgggaaggacaacatttaggcatcacataccaaagagttagccaaattgtgaatagaaagaaaattttttgaagtaaattaaaagggctccatcggtgaacacactaataataaggaaataaaatagtcttattactgaaa

SEQ ID NO: 19026 - DNA, 421 bp, Homo sapiens
  misc_feature 89, 92, 99, 104, 148, 169, 217, 366: n = A,T,C or G
agtacttctagaattaattaaggcgggcgaggtctggagttcgagaccagcctggccaacatggtgaaaccccatctctactaaaaatncanacattanctggncgtggtggcacctgccagtagtcccagctacttgggaggctgangcaggacaatcacttgaaccngggaggtggaggttgcagtgagccgagatctcaccactgcactccacnctggcaacagagtgagactctgtctcaaacaaaactaaaaaaccccccaaaaccaaacaacatcaacaacaacaaaaagagtaactgaatggagatgtgtgtgtgaacagataaagcccagcgtaaaaatggcaatgtgaaaacatgtncagctgttcttgtaatcaaagaaatgcatattaaattgagatgccattttttgcc

SEQ ID NO: 19027 - DNA, 428 bp, Homo sapiens
  misc_feature 158, 406, 417, 418, 420: n = A,T,C or G
agtacttctagaattaattaaggcggggggaaaagagcacattacatatggaagaacagagataaggatggcaggagtcatcattgcatctcattgaacagtgaagccagaagatagtggtgcagaatcttttaagtactgatagcaaaaactatcanctaggattcattacctactaaaaatttatttcagaaatgaagatgaaataaagacttttcccagacatgtaaaagcgagataattcatccgcagcagatctgcattacaagaaatgtgaaaagatgtccttaggcagaagggaaatgataccaaatggaaatctgaaaatgaatacagagtaccagagatggtaattatgtggataaatataaattactcttaccataactgaatatttaaagcaaangaaaaaaagtnnanaattaaaa

SEQ ID NO: 19028 - DNA, 448 bp, Homo sapiens
agtacttctagaattaattaaggcgggcagatcacgtggtcaggagatcaagaccatcctggctaacatggtgaaaccccctgtctactaaaaatacaaaaaattagtggggcgtggtggtgcacgcctgtaatcccagctactcaggaggctgaggcacgagaatcacttgaacccaggaggcggaggttgcagtgagccaagattgcgccactgcactccagcctgggtgatagagtgagactccgtctcaaaaaaaaaaaaaaaatctcttggatgagaaaactagacttaggatttaaggaaatctacgttaatggactggccagaaaaacaagtcataaagggaaattaggaagtaatcatgagagagggggatgttatgtcctattacctgaagcagaaatataaatggaaaacatatcaagtgttattaactgaagggaaa

SEQ ID NO: 19029 - DNA, 201 bp, Homo sapiens
  misc_feature 91, 93, 169, 170, 182: n = A,T,C or G
agtacttctagaattaattaaggcggggcccggctcgagggggtggatactgtgagtttaattataaagaatgacctggtacaaaagccananaaaaaaaaaaaaaaaaaaaaaaaaaaaaaaaaaaaaaaaaaaaaaaaaaaaaaaaaaaaaaaaaaaaaaaaaaaanntaaaaaaaaaancccaaaaaaaaaaaaaaaa

SEQ ID NO: 19030 - DNA, 435 bp, Homo sapiens
agtacttctagaattaattaaggcgggaggatcgcttgaggccaggggtttgaaaccagcctgggcaacattgtgaaggcttgtctctaagaatcttcttaaattagctggatacggtggtatatgcacctgtagtcccagctacttaggaggctgaggtgagaggatcacttgagcccaggattttaaggttagagtgagtcatgatcgtgccacttcactctagcctgggcaacagagcgagaccctttctctaaaaaacaaaaatccccagaaaacagacagagagatacaaagggtgtcataagtctggtgcttacatgagcctcagaacagttttttgctgttctctttgaccacataaaagttagaaactcctgttcaacaaacggcacataacataaagcaaaaatctcacacgcagcctgggaaaag

SEQ ID NO: 19031 - DNA, 588 bp, Homo sapiens
  misc_feature 28, 41, 78, 79, 126, 148, 162, 167, 187, 208, 219, 227, 246,297, 318, 323, 339, 343, 359, 374, 382, 383, 389, 393, 397,403, 431, 435, 443, 452, 460, 479, 480, 481, 483, 485, 486,488, 522, 526, 528, 533, 567, 573, 574: n = A,T,C or G
agtacttctagaattaattaaggcgggncgaatctatcatngactccaaaatactgagtaagctctttccactgggtnncatttgaggacggttcactatgtaattcttttctcattcttcaattnatctgaaaagaattcacaaagngtcaatacctaacntcagnaattctcaaaaccatatttnaaaaaaatgggctaaactcantcacaacttancattatcncgacgaacaacctgagttnaaacaaaacaccttttctggagcgttttcttcttttacctctgaatcttgnaggatgagcttttctgttcanaatgntcatttattgcaaggncttngaaattttctattgtnttaaaaaaaaaaaanaaaaaatnnataatntatncggnccgccncccgcggtggagcccccaattcgccctnttanaagagtcngtattaacnccccgctnactggccggccgttttacnnncntnntngacctgggaaaacccctggccttaccccaacccnaatncnccttngcaaacacttacccccttttccccagctggcggnaattgnngaaaaaggcccccc

SEQ ID NO: 19032 - DNA, 328 bp, Homo sapiens
  misc_feature 316, 317, 320, 323: n = A,T,C or G
agtacttctagaattaattaaggcgggagtgttcaggaattctttttaatattcttgcaaattttctgtaaatttaaaattatttaagaatctaaagtttaaaaaatgtctctaaactgttaaaagcttacaaaaggtatttatagatattttacccgtgggatttttttctttttttttttcttgatagggtatttttctgtctcccaggctagagtgcaatctgctgcgctggagtgatcctcccatctcagcttcctcagtagtgggactacaagcatgtaccacccaggcttgctaaaaaaaaaaaaaaaannaanaanaaaaa

SEQ ID NO: 19033 - DNA, 252 bp, Homo sapiens
  misc_feature 21, 22, 28, 29, 31, 32, 34, 42, 43, 44, 50, 56, 57, 58, 73,127: n = A,T,C or G
tggccgtcgttttacaccccnnaataanngnnanccatgatnnntacgcnggcccnnnctcgagagtacttcntaaaattaattaagggcgggggaagaaaagggtcccctagttgaggatagtcanggagcgtcaatgtgcttgtacatagagtgctgtagctgtgtgttccaataaattattttgtagggaaagttaaaaaaaaaaaaaaaaaaaaaattttaaaaaaaaaaaaaaaaaaaaaaaaaaaa

SEQ ID NO: 19034 - DNA, 462 bp, Homo sapiens
  misc_feature 30, 31, 32, 36, 43, 92, 93, 95, 109, 115, 118, 120, 128,137, 139, 145, 155, 160, 175, 177, 181, 186, 187, 193, 211,213, 222, 230, 246: n = A,T,C or G
agtacttctagaattaattaaggcgggagnnnatanggaactnctggacttgaattgcacttttgaccacttggaactaacagacattttcnnanctttgcatccatcnacaacngantncacatttngctctagcncncatgcntagaacattnttcangatagaccttgtgtnangccncaaannaagatngaccatatatctagtatngnttcaaactncagtgatntgaaactataaatcantagcaggaggaaccttggaaaattaacaaatatgtggaaatttaaaaacatgctcctgaatgaccagtgggtcaaagaataaatcaaaagagaaatttctaaaatgtcttgagacaaatgacagtggaagcacagcataccaaaacatgggatgcagcaaacgcatttctaagagggacattatagcaattaatgcctatgttaaaaagaagaaag

SEQ ID NO: 19035 - DNA, 392 bp, Homo sapiens
  misc_feature 48, 88, 118, 132, 175, 186, 202, 220, 230, 243, 254, 330,372, 381: n = A,T,C or G
agtacttctagaattaattaaggcgggtcttcaaacaaggcagttaangtttctggaatattaaaagggacttacaaaaagatctacngcaagtattcacagtagtcgtataacagtngtgcttcaatgtanaggacaaaataaatgcatgaccaaatgttttcttgaaaatcantctaaaattanatgaccaaagacgtangtactacatccacagtcnagatataaanagattttccatanaaatgaatgancacgacacacacagattctgcaagcatagcaaaacctgaaactaaaaatattgttttagctgggaaaaacattttntatatataagtgaattacggtgagtttccaaaaggcctgaantgcatcctnaaggcaaaaga

SEQ ID NO: 19036 - DNA, 345 bp, Homo sapiens
  misc_feature 56, 63, 77, 78, 104, 143, 162, 164, 175, 184, 186, 197, 203,216, 225, 236, 260, 268, 274, 322: n = A,T,C or G
aaagggaacaaaagctgggtccggcccccctcgagagtcttctagaattaataagncggggtngggggtactcttgnnaaaaggcacattggtgcatgtgtgtntgctagctcacttgtccatgaaaatattttatgatattnaagaaaatcttttgaaatngntgttttttaangaagagaantnatgtggcttcncatttntaaatcccctcanaggtgtgantagtctctttntcaacacacacttaaaaaattttnaatattgnctattnaaaatagggacaaaccttggaagaggtatggacaacttttgatattgnttggcccagatggtattaaaaaa

SEQ ID NO: 19037 - DNA, 257 bp, Homo sapiens
  misc_feature 102, 113, 116, 133, 137, 138, 145, 147, 151, 152, 153, 157,159, 161, 162, 167, 169, 170, 172, 175, 176, 182, 184, 185,194, 201, 203, 204, 210: n = A,T,C or G
agtacttctagaattaattaaggcgggcagatcacgaggtcagaagatcgagaccatcctggctaacacagtgaaaccccgtctctactaaaaatacaaaanaaaaaaaaaanaanaaaaaaaagggggcccncccnnggggggncntggnnntgcncntnntgggngnntnttnncccccncnnagtgggccnttttttnanncactgncaggggaggaaaggccttgatgttccagacaataataaatgcgcctg

SEQ ID NO: 19038 - DNA, 389 bp, Homo sapiens
  misc_feature 25, 29, 31, 42, 44, 45, 46, 47, 52, 53, 56, 61, 64, 67, 74,75, 77, 79, 80, 82, 83, 85, 92, 93, 94, 97, 102, 104, 106,108, 112, 113, 115, 117, 125, 126, 295, 361: n = A,T,C or G
agtacttctagaattaattaaggcngggncnggtggataacncnnnnaatgnngcngcttnggnagncccaggnngntnnannantaggtcnnnatntcaanancnanctanncnanatggtganncctcttctcttctaaaaacacacacacacaaaaatagctgggcatggtagtgcatgcatataatcccagctacttgggaggctggggcatgataatccaagagacggaggttgcactgagctgagatcgtgcactccagcctgggcgacagagtgagactccatctcanaaataaataaacaaacaaataaataaagtgagtaggtgggccactggccaatttttataacctcanccttacggggtctgctccaaaagcatct

SEQ ID NO: 19039 - DNA, 185 bp, Homo sapiens
agtacttctagaattaattaaggcgggcggctaggtctgtgcatttctggttgcaccgcggcgcttcccagcaccaacatgtaaccggcatgtttccagcagaagacaaaaagacaaacatgaaagtctagaaataaaactggtaaaaccccaaaaaaaaaaaaaaaaaaaaaaaaaaaaaaaaa

SEQ ID NO: 19040 - DNA, 345 bp, Homo sapiens
  misc_feature 249, 255, 297, 301, 311, 319, 325, 333, 335: n = A,T,C or G
agtacttctagaattaattaaggcgggaagatagatgtgtatatgaaggggactttattaaggggcattgactaacaccatcattaaggtggaagttccacaataggccatctgcttggcttgaggagcaaggaagccagttcaagtccccggaacctcaaaagtagggaatttcgacagtgcagcccttcaatcttgtagccccaaagggccttgagaagcccccctggccaaaacccacttggctgntaaggngttaagaattcccaaaaagcctgaaaaaaccttgggaagtcntganggtttcccanggggccangaaaanccttcccnancccttgggga

SEQ ID NO: 19041 - DNA, 461 bp, Homo sapiens
  misc_feature 29, 39, 45, 111, 134, 185, 196, 222, 254, 306, 359, 417: n = A,T,C or G
agtacttctagaattaattaaggcaggcnaaaatctaanataatnccatgaccttcacccttagggtcatgttatatataataatccaccccctctgagtgtgggtggganctgtggcttgcttctggccaatngaatatggcaaagtgatgggatgccactccctttattaggttcattatatngcaagagtganaggatgtcactcctatgatcaagttncattatattagaactctgtcttagcagacaanagagactcttgtgagctagccaggcatggtggcttatgcctataatcccaanaatttgagaggctgaggcaggaggatcatttgaggccaggaatccaagaccancctgggcaacatagcaagagcttggtgttacaaaaaacttaaaaaacataaaacttancagggtgtgatggtgcatgcctgtagtcctagatacctgggagg

SEQ ID NO: 19042 - DNA, 371 bp, Homo sapiens
  misc_feature 30, 36, 37, 48, 49, 50, 53, 56, 57, 59, 61, 62, 74, 76, 77,85, 87, 88, 90, 91, 92, 95, 96, 100, 101, 102, 105, 107,108, 110, 113, 116, 117, 121, 124, 130, 137, 138, 142, 147,150, 152, 162, 163, 203, 204, 209, 210, 231, 240, 243: n = A,T,C or G
  misc_feature 272, 280, 297, 329: n = A,T,C or G
agtacttctagaattaattaaggcgggggnggactnncttactctgtnnnaanagnnananntgtaaccatttncnnccaaatgntnntnnnaanncctnnnaantnncntanacnncttntanttatgnctatcannaacntgttncantntaatgaaaannctcatgaaaaaaaaaagatctcaactgctctacagagctnnaatgnnaaaagatcgtgccattgaaanctcattacnagnaggacataaatttttggctctccctattnacaaccantgcacattttgacacantggcctcaggttcacagtgcaccatgtcactngtgctatcctacgaaatcatttgtttctaagttgtgtttatt

SEQ ID NO: 19043 - DNA, 465 bp, Homo sapiens
agtacttctagaattaattaagggggagaaaagagcgataaccagagatatggagatgattcaagggacttgatgaaaataacacttgcatgaatatcaataaatttgaatatctagagcagaggtcaataaactttttctgtaaagggccagatagtaaacattttaggctttataggtcacgagagtattatgtgggtacttatgtaatcttattgatgaaatttaaaaaataattttaaaaatataggactattagaagaatggaattattttttatttgacattattttacttaattgggattcatggttattgttttctaccatcaaattaattccaaatgtttatctgtaaaaaaacattcttaggttataggctatacaaaaatagatggtggatgaaatttaactcaggtgctatggtttgctgacctctgacctggaacaaatggattattttcat

SEQ ID NO: 19044 - DNA, 424 bp, Homo sapiens
agtacttctagaattaattaaaaaaataaaaaccaacattaaccagagtttggaagaagttgattccaaccttcataggtgactctgaggggttcaagtcttcagtggaaaaagtaactgtggatgtgatggaaaaaagagaactagaattagaagtggagcctgaagatgtgacagaattgtttcaatctcgtgaaaaaacttgaacagatgagaggctgctttgtatagataagcaaagaaagtggtttcctgaaatgaaatctactcctgaagatgctgtgaacattgttgaaaagacaacagacttagaatattacatcaacttagttgatcaagcagtggcgaagtttgagaggattaagtccaattctaaaagaagttccctatgccgtaaaatgttatcaaacagcgtcgaatgcta

SEQ ID NO: 19045 - DNA, 122 bp, Homo sapiens
agtacttctagaattaattaaggcgggagggagtagtctttgtctaactttataccagtaccaaactatgttaatttaatgtagttttataataaatctttaagtccttaaaaaaaaaaaaa

SEQ ID NO: 19046 - DNA, 375 bp, Homo sapiens
agtacttctagaattaattaaggcgggagtcagtggatggaaaattacccaaaggaaacatcaggggcaaggtgggattctggctaaattgacttgacaggattcttgctgaaggcatgccaggctgatcaaataccaagggtgggagttctttctaaactgattcagcaagattcttgctacaactgggtgggtagtgcaggcccaacaaagatgtcaaggtcagggcctagacagcttagaggaacctgactagaagtagataaaggagggcatcttgtcagtgcaaagaataataagacacttcctgccctcaaggaatgcagtccaaaattacaaaatttctttgattctaggtcatcaataatttttttc

SEQ ID NO: 19047 - DNA, 354 bp, Homo sapiens
  misc_feature 28, 29, 31, 32, 36, 37, 38, 40, 41, 44, 45, 50, 51, 53, 57,107, 139, 182, 198, 199, 200, 201, 202, 208, 213, 215, 217,224, 227, 228, 229, 232, 241, 243, 247, 249, 250, 252, 253,256, 258, 263, 265, 272, 280, 281, 282, 287, 293, 298: n = A,T,C or G
  misc_feature 300, 301, 306, 310, 316, 323, 324, 327, 330: n = A,T,C or G
agtacttctagaattaattaaggcgggnntnngagnnncnnacnnctccnnangctnaggcacaagaatcacttgaacctggtaggcggaggttgcattgagcccanatcgcacctctgtgctccagactgggcaacanagcgagacccaatctcttaaaaaaaaaaaaaaaaaaaaggggnaaaaatttccccgggnnnnngggttngcccntntntccccanttnnnccnggggttaangnaaangnntnnttnanccccngngggcccnggcctttnnnacccntaattntcccntnnttttncccngggggnaaaaggnnaanccntttttaaaaaaaaaaaaaaaaaaa

SEQ ID NO: 19048 - DNA, 508 bp, Homo sapiens
  misc_feature 438, 443, 461, 465, 468, 475, 477, 483, 485, 491, 507: n = A,T,C or G
agtacttctagaattaattaaagcagcatgaagaatatattataaaaatactttctgtaaattgtttatattaatttgcatttatgtttatttaaggaatagaggaatggatttcatttatttcagagttgttataagaggtaaatatgaagtgttaagcatggtgcctggcatgtagtaagtgttccataaatgtcagctattttaattgtcatcgtgaagcagggccagcctttgtttatttacagagcaataatttgatgattattggaaaattctcctttcccaaggttttctaattataattccctaaattccacttataaatatccattactttggatttagactttctgtctttggggcctttttgttaatatgaagattaatcttttggaacaatgggtaataactgggaggggcctctgtggagctggnaatgntctatttcttgatttggntggnggntacatgngncactgngnaaaagncaaagcttaaattttng

SEQ ID NO: 19049 - DNA, 372 bp, Homo sapiens
  misc_feature 155: n = A,T,C or G
agtcttctagaattaaaagcatgtacggtatcaacgcagagttaataggcgggtgtgctcttttagctgttcttaggtagctcgtctggtttcgggggtccttccctttgcctgtggtgtaaaagtgcatcacacaggtattgccttttaacaanaactgatgctccttgggtgctgctgctactcagactagctctaagtaatgtgattcttctaaagcaaagtcattggatgggaggaggaagaaaaagtcccataaaggaacttttgtagtcttatcaacatataatctaatcccttagcatcagctcctccctcagtggtacatgcgtcaagatttgtagcagtaataactgcaggtcacttgtatgt

SEQ ID NO: 19050 - DNA, 499 bp, Homo sapiens
  misc_feature 27, 28, 29, 31, 36, 38, 39, 41, 47, 49, 51, 54, 62, 63, 73,74, 78, 79, 96, 114, 117, 120, 123, 351, 387, 388, 389,407, 408, 434, 435, 438, 439, 440, 452, 459, 463, 464, 467,472, 474, 483, 484, 486, 487, 488, 489: n = A,T,C or G
ctggccgtcgttttacaccccggaaannngntatancnntnattatngncngtngttttccnnaaagaaaaannaaannactttatgcttggcttngttgggtggcccccgccnaangcnggncacggggcttggacggcctgtcttctttccactggccccccggcatgggatgggccagggcgccgggtcgggtaccggagtgcaagctcgaaagagagagagaaaacactgagacagcattagtggagtgaaaggcggacacagatgagcctgcagaccatgcccccaaccctccgctgcccatcccctcctccctcctcacttggataaaaagcagatttgccttanaaaaaaaaaaaaaaaaaaaaaaaaaaaaaaaaaaannnaaaaaaaaaaaaaaaaanntataaaaaaaaaaaaaaaaaaaaaannccnnncccccccccccnggggggncccnnccnccccntntaggggggnntnnnncccccccccc

SEQ ID NO: 19051 - DNA, 266 bp, Homo sapiens
  misc_feature 266: n = A,T,C or G
agtacttctagaattaattaaggcgggtacatatgttggaattaacagacaaggacactagttattataaccatactccatatatttaaaaagttgcatacagacatataagactcaaagtgaatttctagacatgaaatctacaatatctgagatgaaaaatacactggatgggattaacagcagattaacattgcagattagtgaactttaaggcgtatcagtagaaactatctaaaaaaaaaaaaaaaaaaaaaaaaaaaaan

SEQ ID NO: 19052 - DNA, 531 bp, Homo sapiens
  misc_feature 2, 5, 8, 53, 205, 208, 210, 220, 232, 239, 240, 241, 242,243, 244, 245, 246, 247, 248, 249, 250, 251, 252, 253, 254,255, 256, 257, 258, 259, 260, 261, 262, 263, 264, 265, 266,267, 268, 269, 270, 271, 272, 273, 274, 275, 276, 277: n = A,T,C or G
  misc_feature 278, 279, 280, 281, 282, 283, 284, 285, 286, 287, 288, 289,290, 291, 292, 293, 294, 295, 296, 297, 298, 299, 300, 301,302, 303, 304, 305, 306, 307, 308, 309, 310, 311, 312, 313,314, 334, 450: n = A,T,C or G
gngangtncttttagaaattaattaattttcaggacataaaataccaaagatnttcatggcctaaactgagtactggatcaaatggacctgatagatatctacaaaattctccacccagaaacaacagaatagacattcttctcatcaagcccatggcacttactctaaaattgatcacataattggaagtaaaacactcctcancanangaaaaaaaanaaaaaaaaaatnaaaaaannnnnnnnnnnnnnnnnnnnnnnnnnnnnnnnnnnnnnnnnnnnnnnnnnnnnnnnnnnnnnnnnnnnnnnnnnnntacaacgtcgtgactggggnaaaaccctgggcgtttacccaacttaatcggccttgcagcacaatcccccttttcgccaggctggcggtaattagccgaaagaggccccgcacccggatcggccccttcccaacantttgccgccagccctgaatgggcgaatggaaattgtaaggcgttaatattttgttaaaaatttcgcggttaaattttttgt

SEQ ID NO: 19053 - DNA, 260 bp, Homo sapiens
agtacttctagaattaattaaggcggggaagtacacaagaggtgcaattttattttatatttttagagacagtttcttgctcttttgcccaggctatagtgcagtggagcgatcagagctcactgcagcctccaactcctgggaccaagcgatcccccactcccaaccttggctctagactgttactcttaagctttgagaaattttcacattgatgactattttaaaatcaaataaaactattttactggaaaaaaaaa

SEQ ID NO: 19054 - DNA, 409 bp, Homo sapiens
  misc_feature 23, 25, 29, 260, 271, 272, 273, 291, 294, 300, 313, 314,315, 316, 319, 320, 321, 325, 329, 333, 336, 348, 350, 351,357, 359, 389: n = A,T,C or G
agtacttctagaattaattaagnanaganatgatttttaatctgtatgtaattgttttaaagcacccattttaagagaaaatactgtgcaatgaagaaaccagtttaggcatttgctataaactgaaatattccaaaagaatcatctataacagccctgtaaattcctttaaaatgataactaacaggacagtttgaccaattttttttaaatatacttccttttatgtgttcaacagggaaaaaaaaaaaaaaaaaaanaaaaattgggnnnccccccgggggggggccnccnatcccncttttgggggttnnnntcnnncccnctcngggnggntttttaaaaatntnngacctntncccccaaatgaacagagtatacattctttnagcaccacatcacacttatt

SEQ ID NO: 19055 - DNA, 143 bp, Homo sapiens
agtacttctagaattaattaaggcgggctgacagaattgtcttcctcatttccaagaaaaaaaaaaaaaaacaactcatgagctttttaacagaattactttgactctgtaggtcaaaaaaaaaaaaaaaaaaaaaaaaaaaa

SEQ ID NO: 19056 - DNA, 365 bp, Homo sapiens
  misc_feature 139: n = A,T,C or G
agtacttctagaattaattaaggcgggcgtggtggcgcatgcctgtaatcccagctactcgggaggctgaagcaggacaatcgcttgaacccgggaaggcagaggttgcagtgagccagatcgcgccactgcactccancctgggcaacaagagcaaaaccccgtctcaaaaagaaaaaaagatttatattagaaggaggcgccttctctaaaagtaatgaatcctttttttccctccccaagcaaaaaatccttctctaaaattaacaatcatttttctaagcgtggtttaatgcttttttggaagactacttatttcttttcctttcaaaagttatgcaagctcattaaaaaaaaaaaaaaaa

SEQ ID NO: 19057 - DNA, 388 bp, Homo sapiens
agtacttctagaattaattaaggcgggcagatcacatgaggttgggagtttgagaccagcctggccaacatagtgaaactctgtttctactaaaaatacaaaaattagccaggtgtggtggcatgcgcctgtaatcccagctactcaggaaccttcttttcatgatttaaatacaaatcaaattcagagacacgcaagttaagcctcctttaaactatacttggttttaaacttttaatagaacactttagccaaatacatacagatttaactaaccaagccatagaaaacctgtttgagatgttcactagttttataaaattatcctccaaaacatttaaaattcctaaagcaaaggaaaaactgactttaaaataacctattttct

SEQ ID NO: 19058 - DNA, 164 bp, Homo sapiens
  misc_feature 50, 52, 53, 88, 97, 102, 113, 122: n = A,T,C or G
agtacttctagaattaattaaggcggggaagcagcaagtgcacaggtccngnnaaagaactgcacacgctcatgaatctggggaacanaggccacangcaangaatggctgangggccactnggctgggatcgctccttttaccaagagcaagcagaggccact

SEQ ID NO: 19059 - DNA, 439 bp, Homo sapiens
agtacttctagaattaattaaggcgggagaagggcaagagttgaaaaactaactgttgggtactatgctcactacgtgggtgatgggattattcatacctcaaacctcggagtcatgggtaacatttttttaacccatgtaacaaacctgtacatgtacctcctgaatctaaaataaaagttgaaaaagaaaacaagagattagaacagagacaatatacatggctagaagaccttgtgaagacacaacgagaaaatagccattgacaagccaaggagagaggctttagaggaaaccaatcctgctgacactttgatctcggacttccagcctctagcacttgggggaaataatttgttttttgagccagtcagtctgtggtatttgttacagaagccctagaaaactaataaaatgccctcctctgttttaaaaacaa

SEQ ID NO: 19060 - DNA, 219 bp, Homo sapiens
agtacttctagaattaattaaggtgggctgaagatggatcccccaaggatacaaactgcagagggtggtagagaagcccaaagatacgagaaaggaagagaagggaagaatgggatgatccagacttcagagttgcagaagtcaaaaagtgtgggctctgaggtggaagagtgatgagcactgccaaacacaacagagatgtccaataagatggggcct

SEQ ID NO: 19061 - DNA, 457 bp, Homo sapiens
  misc_feature 28, 33, 36, 40, 42, 43, 44, 45, 52, 57, 58, 59, 63, 65, 68,70, 74, 80, 85, 86, 90, 92, 95, 98, 99, 101, 102, 106, 108,110, 113, 114, 116, 117, 122, 126, 127, 131, 134, 135, 140,145, 147, 148, 150, 152, 156, 162, 164, 172, 174, 175: n = A,T,C or G
  misc_feature 179, 181, 182, 183, 184, 185, 186, 193, 197, 200, 206, 208,211, 217, 220, 221, 222, 236, 237, 253, 256, 258, 259, 261,262, 264, 405, 442: n = A,T,C or G
agtacttctagaattaattaaggcgggnacacngangggngnnnnaagggtngaggnnntgtntntancngtcnatcatnacacnnggananccnctnnannaaananantgnncnnatatntcannattnatnntgctnacatncnntncntaanataaangntcaacatntnngatnannnnnnctttttncttnttntgcgtntnggnctccanatnnngcatttcttcagtnncttttcgtaactgtanatncnnannanaaatgaacacttttccatacttgtaaggtgttgtaaagatgtgtaaagttttcactttttgcatcatattcacatgtggctatatgcccttttgtcttcaaagttttctttatcttgatcacttatcagaggcgtgactgntttattatcttagtcttttgaaagaatcctcccttanttttattttttaaat

SEQ ID NO: 19062 - DNA, 370 bp, Homo sapiens
  misc_feature 350, 351, 352, 353: n = A,T,C or G
agtacttctagaattaattaaggcgggggagaaagacaagggaacagctagttggtcgagcagtcagaaacccacatttgttagttaattttgcattcagtcttccatggtgtggtttgtggcaacccaaaataattacaatagtaacatcaaagaccactgactacagatcactataatggaaataataatcatgaataagtttgaaatattgtgagaattacccaaagtgtgacacaaacagaagtgagcctatactgttagtaaaatggcactgataggcttgcttgatgcatagttgctacaaactttcaatttttaaaaaatgcaacacttgtaaagtgcaattnnnnaaaaaaaaaaaaaaaaa

SEQ ID NO: 19063 - DNA, 272 bp, Homo sapiens
  misc_feature 153, 185, 187, 189, 192, 203, 208, 209, 215, 230, 231, 236,241, 257, 258, 262, 265, 269: n = A,T,C or G
taattaaggcgggcagatcacgaggtcaggagatcgagaccatcctggctaacacagtgaaaccccgtctctactaaaaatacaaaaacttagccgggtgtgttggcacgtgcctgtgggtttcagctactcggaaggctgagggcaggaccntccttggaccccttgaagggcaaaggtggcantnanctnaaatggttgcntttgnnttccanttgggccaccaaaannaaaanttttnttaaaaaaaaaaaccnncccnccnaccnaaa

SEQ ID NO: 19064 - DNA, 615 bp, Homo sapiens
  misc_feature 6, 9, 21, 29, 30, 39, 47, 48, 54, 55, 66, 92, 115, 172, 187,189, 201, 212, 225, 227, 240, 241, 245, 265, 267, 269, 277,283, 286, 291, 293, 301, 307, 311, 318, 321, 322, 324, 325,340, 347, 351, 353, 368, 373, 381, 393, 396, 400: n = A,T,C or G
  misc_feature 403, 405, 410, 411, 417, 423, 424, 435, 436, 439, 440, 442,444, 446, 447, 450, 458, 459, 460, 462, 466, 467, 469, 471,472, 473, 479, 482, 489, 491, 501, 505, 506, 508, 509, 510,515, 526, 527, 530, 533, 534, 535, 539, 540, 542, 545: n = A,T,C or G
  misc_feature 546, 549, 550, 551, 552, 553, 554, 556, 557, 561, 562, 564,565, 567, 568, 570, 571, 572, 573, 574, 575, 581, 582, 583,585, 592, 593, 594: n = A,T,C or G
ggccgncgntttacacccctnaaaaaggnnacaccatcngggtaccnngccccnnctcgagagtanttctagaattaattaaggcgggtganagctccctcttctgaattcatcnctacaggctcaaaactcctctttgatatcagacctgatgttattttccttcttttgnagggcatttagttangntaaaaagggttntttggaacttngaaattcaacccngnatttacccttccnnaccngaatggacagccaaaaatgntngngggaattnaatttngtnctttncntatgcccnaaactnaaangaattgnggnnanntttaaaacccgggantgggttncctnancctcccttttttgcnttggnatattttnaaaccctttganccnaggngcncncaccnnttttanccaaannaaaattttgannccnngntncnnttnggaacccnnngncttnntncnnngggaanttnaaacccnanaaaaaaaaantttnncnnnaaaanaaaaagggccnnggnttnnnaaanncnccnnaannnnnncnntttnnanntnnannnnnnaaaaannntnccccccnnnaaaaaaaaaaaaaaaaaaaaa

SEQ ID NO: 19065 - DNA, 361 bp, Homo sapiens
  misc_feature 31, 39, 46, 102, 148, 214, 215, 221, 222, 231, 232, 238,247, 292, 300, 302, 304, 314, 333, 346: n = A,T,C or G
agtacttctagaattaattaaggcggggttnctccatgntggccanggtggtctggaatcctgacttcaggtgacccgccgcctttgcctcccaaagtgcgngggattacaggcgtgagccagcgtgcccgatcaatcaataactttnaacgctttcttccatgattaccgttctatgtgggtattttatcttgaaggaattttgaaaatgtgnntattgnntcaaaaaannatgttncactgagantttcaagtggttttaaaatatcgcaagcgtatcatctgctcattncttaaacntngnaaaagccctntttcttcaaaatatatttnctacacacttctntattttgatttttca

SEQ ID NO: 19066 - DNA, 410 bp, Homo sapiens
  misc_feature 2, 22, 26, 31, 33, 34, 37, 38, 42, 44, 47, 48, 49, 51, 53,56, 65, 66, 67, 68, 70, 73, 80, 81, 84, 92, 97, 102, 103,104, 105, 111, 112, 113, 119, 123, 126, 137, 150, 151, 153,156, 157, 160, 162, 163, 165, 166, 171, 177, 192, 210: n = A,T,C or G
  misc_feature 216, 219, 222, 230, 234, 236, 239, 243, 244, 245, 254, 259,271, 298, 350, 397: n = A,T,C or G
antctggccgtcgttttacacncggnaaccngnnatnnccangnttnnngncngtngttttccannnngnaanaaaaaannccnttgatccnggccnggggnnnncctccnnnaaaaanaaanaancttttgggttngccgcggctgccnncnacnnaangnnannaaacngtgttnggtttttattcttancattattatgaagggtanaatatnatnatnttattttngttngnggngctnnnctcaataangctgntctaactacagngctcaataaaatgattaatgacagganggggttcccctgtgcttttaccagtagcatgaccccttctgaagccatccgnagaaagtctttgtcctccaaaaagctaacatacggttttgaagcaancattgaaaccttt

SEQ ID NO: 19067 - DNA, 200 bp, Homo sapiens
  misc_feature 177: n = A,T,C or G
agtacttctagaattaattaaggcggggagagagagaagtcacagcagtggggggaggcgcagaggagtgagggaggccagtgcctagagtgaagacagctgctgttttaataaaaaaaaaaaaaaaaaaaaaaaaaaaaaaaaaaaaaaaaaaaaaaaaaaaaaaaaaaaaaggtnaaaaaaaaaaaaaaaaaaaaaaa

SEQ ID NO: 19068 - DNA, 230 bp, Homo sapiens
  misc_feature 222: n = A,T,C or G
agtacttctagaattaattaaggcgggggaaggatgcaagaataaatctactggattcagatatttgagcaggtagttaaaatattggtgattgcctgtggtaggaaaactgaacttactctaacctcactaaagaatgttgaaggacgtgactacttatgtgtactggatacactgtcaggggcagccttcagaggtactgaaaaaaaaaaaaaaaaaaanaaaaaaat

SEQ ID NO: 19069 - DNA, 316 bp, Homo sapiens
  misc_feature 20, 24, 25, 34, 50, 91, 132, 189, 295: n = A,T,C or G
agaacaaacatatggataantganncaaaacggngttcagaaataaaccnacacgtatatagaaaattaatattggatctaggggctgaantaattaaatttacgaagttttttttcatttaatgataccanaacaagtgactattcctgtgcacaaaaataaaccttgcttctttcctcatatatatnaaaattaattgaatgccaaaattggaaccaacctaaatgtcattaactggtgaatggatgaccaatattgtggttacattttacaatggagcactgatcagcaatncaaagaaacaaataactgata

SEQ ID NO: 19070 - DNA, 399 bp, Homo sapiens
  misc_feature 293, 309, 310, 343: n = A,T,C or G
agtacttctagaattaattaaggcgggagtgcagtgacacgatcgggacccactgtagcctcaaactcctgcccttaagcaatccaactgcttcagcctcccgagtagctgagactgcaggtgaggaccgccatgtctagctttttgttttttttttaaacatatggggtctctctgtgttgcccagcctgctctggaactcctagcttcaattgaccctctgcctcagcctcccaaagtgttgggattgcagatgtgagccactgtgcccaacctgtttttcttggtgtttnatataaatggaattgnntcgcaccgtaatctttagggaagtgggggctgntcattgagcataattatgttggaattcatctatatattgataaatattttaagggc

SEQ ID NO: 19071 - DNA, 288 bp, Homo sapiens
agtacttctagaattaattaattaatgcttgtaggacataataataacaattgaatgtctgcacagccgctttccacacagacatcataacaaaaaatttccaccaaaccctgagaaccaaaatgaacgaaaatctgttcgcttcattcattgcccccacaatcctaggcctacccgccgcagtactgatcattctatttccccctctattgatccccgccttaattaaggcgggggccacttgagaagtgaataaatggggcggtttcggaagcgtcagtgtttcca

SEQ ID NO: 19072 - DNA, 367 bp, Homo sapiens
agtacttctagaattaattaaggcgggcgtggtggcgcatgcctatattcccacctacttgggaggccaaggcaggagaatcgcctggacccgggaggtggagattgcaatgagccgagatcgagaaaaaaaaaaaaaattcaatcgccatcacttaaaaaaaaactctcatttcctttaaagtgaaagaaattagttttgcaaaattcactacatagtcttgagctttcttggtttttttcagggactgttctcacagatcagtacctgtttgttgaccactgacttaaggagtttgataagggcataatcaaactacataagtgtccagtattttggcttccctgggccacattggaagaataaa

SEQ ID NO: 19073 - DNA, 533 bp, Homo sapiens
  misc_feature 185, 330, 348, 369, 382, 408, 416, 430, 431, 442, 446, 451,464, 467, 474, 489, 497, 522: n = A,T,C or G
agtacttctagaattaattaaggcgggcagatcacaaggtcaggagtttgagaccggcctggccaacatggtgaaaccccgtctctactaaaaatacaaaaatttgctgggcatggtggcgcgtgcctgtaatcccagctactaggggggctgaggcaggaggatcgcttgaacctgagaggcanaggttgcagtgagccaagatcatgccactttactccagtctgagcaacaagaacgggacttagtcaaaataaataaataaataaataaataaataaataaataaaatatcttttatctttaaagtgtttaacattggtatactgnctgtagttggttcattantcgtttataaagggttatttnctcatggagtggnaaacctgaccatcagttaccctttgngcctatgnccttctttctcctnnaaacaaaaatnggangtttntggtggaaattgnccnggtacanggttaactaaaacangcctaacntagcttttggtactccaaaaatttntttttaaaaaa

SEQ ID NO: 19074 - DNA, 405 bp, Homo sapiens
  misc_feature 24, 27, 28, 32, 49, 51, 54, 64, 91, 97, 100, 111, 232, 239,241, 244, 245, 253, 255, 256, 262, 264, 265, 266, 272, 273,274, 276, 277, 281, 287, 288, 291, 292, 293, 294, 295, 311,314, 318, 319, 320, 332: n = A,T,C or G
agtacttctagaattaattaaagnatnnaaanttaaattactggaggtnanttnaaaactttcncaaatctgctgcctcatgctgtttgtnttatanttntaacacttaanaggctaattattggctggtctgagtgcattggtgtttacaactaattgatcataatcagctacagatttctttattcattctccactcccactgcttcacttgactagcctacaaaataanacaaggntngannaaagaatncnncccccncnnngggggnnncnnatancccccnngtnnnnnatactttccccccccncangggnnngaaattacttgngtaaaagggcttcaagaatatatccaatttttaaatattttaatatatctcctatctgataacttaattcttc

SEQ ID NO: 19075 - DNA, 408 bp, Homo sapiens
  misc_feature 41, 45, 46, 50, 51, 103, 119, 136, 277, 313, 326, 338, 341,363, 382, 384, 395, 397: n = A,T,C or G
agtacttctagaattaattaagcgggcttatagacaaaacntgtnnaatnntctaatcagaggagaaaaaaagaattaaaaacaatgacaaaggcatacaaantttatgggacaccatnaagtaaactaatttccntgtaattggaattccttaagaagattaaaatagaaaaatcttaaaaagcatatttaaggaaataacgaacatattttaatctagaaaaagaagaggaagacaagatcatccacgtataaggatctcagaaatcaccaattnctttcaacacaaaggaggaattacccaagttatatnataatcaaattancaaatccaaacnctnaaaaataaaaaattcagtgcancaggagaaaagaaccatancncaagaagtggngncattatatgcc

SEQ ID NO: 19076 - DNA, 192 bp, Homo sapiens
  misc_feature 5, 35, 50, 91, 167: n = A,T,C or G
gaggnggactccctcccccatgcaggctttgcctncaggagctgcaccangaactcacagaggatcaggaattattctgagaacatacttntgagtgctgcctacagggagaaaataaattataaaaaataaatcaattctaaacaaaatatgacatttgttattanaaactatttctggaacctgtgggaa

SEQ ID NO: 19077 - DNA, 373 bp, Homo sapiens
  misc_feature 37, 38, 45, 48, 53, 56, 57, 58, 68, 73, 89, 111, 138, 175,184, 242, 245, 248, 266, 268, 269, 270, 286: n = A,T,C or G
ctcgagagtacttctagaattaattaaggcggggatnnagacagngtnctttngannnatgtatcttnagacngcttgcttgggactgntatgttaactagaaaatcatgntacaagataggatttatatgcgttatncctattctcactttgcatacataatggcttagacatntagactttnaaataaaataaccacaaaataactacactagctactgctaagtgaggaaatatgtatnganaanaagtgagctgtcatattntnnnactcgactttcattangtccctacatagccatgcaaaagactacaaaatgaaataaagatatgaaaacatattaagaatattcccctaccaaaaatagaaatc

SEQ ID NO: 19078 - DNA, 418 bp, Homo sapiens
  misc_feature 87, 274, 324, 384: n = A,T,C or G
agtacttctagaattaattaaggcgggcgggtcacctgaggtcaggagtttgagacaagcctggccaacatggcgaaaccctgtctntactaaaaatacaaaaattagtccggcacagtggcgggcacctgtaatcctaactaaggaggctgaggcaggagaatcgcttgaacctgggaggcagaagttgcagtgagccaagattgtgccactactgcactacagcctgggcgacagagccagactccgtctcaaaaaaaaaaaaaaaaaaaanggatcaaatctctggaagtaagagaggttaaagaaaaaaaaatctgtgcnatggcaacaaaagagtaaatcagaaaatactgtaaagaagtgaaatacacagatcagctngtttttgctgctttctattaacagctgttttgca

SEQ ID NO: 19079 - DNA, 339 bp, Homo sapiens
  misc_feature 129, 134, 154: n = A,T,C or G
tctctaataattaaacagaaagtagtaggcttgcaaagcaagtcagtcacatataaaaaaatagctctgacatagattctagtatattttatgtataaaaatatgttttaagtatattaatatataatngtatnatatgtaaattatgtatgtnatataattatatatgttataggctaataaagttatatattatgtaactagtatataattttatgttttaaaattatgttttataaaataatattttatgcatattttatatagcttagtacatgataaagcattgcaaactcttggggaaacattattctacacacatggggaaaatagtcataa

SEQ ID NO: 19080 - DNA, 229 bp, Homo sapiens
  misc_feature 206: n = A,T,C or G
agtacttctagaattaattaaggcgggggaaggatgcaagaataaatctactggattcagatatttgagcaggtagttaaaatattggtgattgcctgtggtaggaaaactgaacttactctaacctcactaaagaatgttgaaggacgtgactacttatgtgtactggatacactgtcaggggcagccttcagaggtactgaaanaaaaaaaaaaaaaaaaaaaaaaa

SEQ ID NO: 19081 - DNA, 205 bp, Homo sapiens
  misc_feature 147, 149, 150, 157, 158, 174: n = A,T,C or G
cccctcgagagtacttctagaattaattaaggcggggagtcaaattttctttttaaaaaggagcttcaatgatttgtaactgaaatatcaggttctagaagaaactggcgcttaaaccaaaaaaaaaaaaaaaaaaaaaaaaaaatntnncccaacnnaaaaaaaaaaaaaaanaaacccccccccccccggggggccccccccc

SEQ ID NO: 19082 - DNA, 743 bp, Homo sapiens
  misc_feature 168, 176, 193, 194, 195, 196, 198, 199, 208, 211, 215, 229,252, 254, 256, 260, 262, 264, 267, 269, 270, 271, 272, 273,274, 275, 276, 277, 278, 279, 280, 281, 291, 293, 296, 299,300, 301, 302, 308, 309, 311, 312, 314, 315, 316, 338: n = A,T,C or G
  misc_feature 348, 349, 350, 359, 361, 363, 368, 370, 373, 375, 376, 378,381, 382, 383, 384, 402, 411, 412, 413, 416, 426, 427, 429,435, 436, 437, 440, 441, 442, 443, 444, 445, 459, 470, 473,474, 475, 477, 479, 485, 486, 492, 496, 501, 502, 503: n = A,T,C or G
  misc_feature 513, 514, 520, 521, 526, 547, 548, 549, 554, 555, 566, 571,572, 574, 581, 584, 585, 588, 594, 595, 596, 600, 601, 602,603, 605, 613, 624, 633, 639, 646, 653, 667, 668, 679, 694,695, 697, 698, 700, 704, 705, 712, 733: n = A,T,C or G
agtacttctagaattaattaaggcgggggggttatgtgattcatcactgcaatgtggaagtgaatgttgccaattgtcagctttttccaaactgcatactgttatatggtttatgtcgcaatcaatggtggcaaaactccagaaagaaatacccacctaaggtgtccnaaaactcnttaaaggggaccagtcnnnnannccttttttnagngganttttccaacccccncctttttttttaaaaaaaaaacntngngggncntnttntnnnnnnnnnnnnnaaaaaaaaananaanaannnnaaaaanntnntnnncccccccccccccccccccccngggggggaannnccccccctntntnccatnanaanannanaannnncccccccccccccccccncgtgggggnnnttnttttttaaanncngggggnnnaannnnnnaaaaaacccccccnggaaaaaaaanaannntnangggggnngggggnaaanattcnnncctctttttnngggggnntgggnaaaaaaaaaaaaaaaaaaaannnccccnnttttttttttnttttnnanaaaaaanttnnccntttttnnngggnnnnanaaaaaaanattataccccnttttttttntttttnaaaaaanacccccncaaaaaattttttnnaaaaaaaattntttttttttttaccnncnncnaggnnccaaaanccctttttttttttttttaanaaaaaaaaaa

SEQ ID NO: 19083 - DNA, 143 bp, Homo sapiens
  misc_feature 143: n = A,T,C or G
agtacttctagaattaattaaggcgggttgtaaaggtaatgtttaatcattgtatagtgattatgcctctggtatagctttcctaataaaaagtttttgaaaaacataaaaaaaaaaaaaaaaaaaaaaaaaaaaaaaaaaan

SEQ ID NO: 19084 - DNA, 205 bp, Homo sapiens
agtacttctagaattaattaaggcgggattgcatgggtagaggattttaaggggtagactctcaagagctaataagttttacttgtttgtggaaaacacacacacacacacgcacacacacacaaccattatctgaaagttcttcatactactccagttctagtctctccatcccaaaaaaaaaaaaaaaaaaaaaaaaaaaaaa

SEQ ID NO: 19085 - DNA, 274 bp, Homo sapiens
  misc_feature 48, 215, 246, 267, 271, 274: n = A,T,C or G
agtacttctagaattaattaagggggatgaagttaaggcatagagttnttattagttttctttttgcttgtttatgcaagcactattaggttgtgataacagtgataagcttaaaataatggcttataaaatagtgctggaaaatctcatggtaactcaaatcacaaacatacaacaaatagacacaaaagtaaaaagcaagaaattaaatcatnccaccagagaaaatcacctttactaaaaggnaaaaaaaaaaaaaaaaaaacnaaanaan

SEQ ID NO: 19086 - DNA, 279 bp, Homo sapiens
  misc_feature 25, 28, 30, 32, 33, 34, 40, 45, 46, 48, 53, 59, 62, 63, 65,66, 69, 71, 73, 80, 86, 89, 96, 98, 112, 118, 173: n = A,T,C or G
agtacttctagaattaattaaggcnggngnannnccaggntaaannangcatnataatnggnncnnttntnangttatanaagctnctntgaaccntncttctttctacaantttagnaaaacatttcacgtaaaaatgaacaacagattgtggtgatggttacacaactctnaatataaaacactgaactgttggctcacacctgtaatcccatcactttgggaggcggatcacaaggtcaggagtttgagaccagcctggtcaagatggtgaaaccc

SEQ ID NO: 19087 - DNA, 341 bp, Homo sapiens
  misc_feature 75, 216, 238, 254, 261, 264, 284, 293: n = A,T,C or G
agtacttctagaattaattaaggcgggagttgggaaggattcaccatacttgtgttctcctccctttataaattntattcataggacttttaaaaggcttgtgctatctttccagtgaaaactgaaagtgcattattatggaagaatgtatttgcaggtagtaatagcattaaaaaatatactcgtgtgtaaacacatactaattttgaccttgcnaaggatgaaatttcccttcaangaaaaataaaaataantgccttnaangaataaattggtgataccgnaaaatttanaaattaaaaagggaccttttaatttttaccattacctacaattaaagg

SEQ ID NO: 19088 - DNA, 296 bp, Homo sapiens
  misc_feature 2, 20, 25, 28, 31, 34, 37, 39, 47, 49, 50, 51, 59, 159: n = A,T,C or G
anactggccgtcgttttcancccgnaanaanggnaancnatgatggntnnncgggcccnccctcgagagtacttctagaattaattaaggcggggagaagatagggaacactcatccctggtcgtctatcccagtgtgtgtttaacattcacagcccanaaccacagatgtgtctgggagagcctggcaaggcattcctcatcaccatcgtgtttgcaaaggttaaaacaaaaacaaaaaaccacaaaaataaaaaacaaaaaaaacaaaaaacccatgaaaaaaaaaaaaaaaaa

SEQ ID NO: 19089 - DNA, 175 bp, Homo sapiens
gtaccgggccccccctcgagagtacttctagaattaattaaggcggggttttttgcttttgcttcttcctcattttctcttgctgctgccatgtaagaagtgcctttcacctcctgccatgcttctgaggtctccccagcccatgtgggaactataagtcccaataaaccctctt

SEQ ID NO: 19090 - DNA, 304 bp, Homo sapiens
  misc_feature 23, 44, 140, 145, 196, 202, 214, 217, 219, 251: n = A,T,C or G
tcctaagggaacaaaactgggtnccgggccccccctcgagagtncttctagaattaattaaggcgggagtttaccaagagcaactctgaattgctacttgtttgaaactgagagatacatgaggtttcattgtcatgttnatganaaagaatgtggatagatatcaaagccaataaagtactcttttctgatgttnaagganttcatttaaaanatngnaatttaaatttgtctttcagtcaaaaatgacnccaagggatattttccctaataaaaagatcatactaattaggttcatttgtgc

SEQ ID NO: 19091 - DNA, 438 bp, Homo sapiens
  misc_feature 19: n = A,T,C or G
ggtaccgggccccccctcnagagtacttctagaattaattaaggcgggggaaagcaacatcgtatttatatactgatggtgacattctaataatgaaaagaaagagaatggaaaagacagaggaaaaagctgaagtgatgtctttagtagggaattataatgataaataattcatcattataacagcagaagcacatggataaaataacaataataacagctgaacacatgaacatctttgcagataagtgggcagatgtaatatgggggcttgtggaagtgctctttaaccagattatattttagacaagatattccagaacacccctgagggggatggcaagtatctgattgcggaagtgttcccaggagaaggctgttgtgagtcagaaaaggaggaaagagaagaagccaaaaaaaaaaaaaaaaaaaaaaaaa

SEQ ID NO: 19092 - DNA, 619 bp, Homo sapiens
  misc_feature 35, 38, 40, 48, 56, 64, 65, 87, 114, 157, 179, 193, 203,212, 214, 215, 341, 342, 351, 352, 367, 368, 369, 370, 371,372, 373, 374, 375, 376, 377, 378, 379, 380, 381, 382, 383,384, 385, 386, 387, 388, 389, 390, 391, 392, 393, 394: n = A,T,C or G
  misc_feature 395, 396, 397, 398, 399, 400, 401, 402, 403, 404, 405, 406,407, 408, 409, 410, 411, 412, 413, 414, 415, 416, 417, 418,419, 420, 421, 422, 423, 424, 425, 426, 427, 428, 429, 430,431, 432, 433, 434, 435, 436, 437, 438, 439, 440, 441: n = A,T,C or G
  misc_feature 442, 443, 444, 445, 446, 447, 448, 449, 450, 451, 452, 454,455, 456, 457, 458, 459, 460, 461, 462, 463, 464, 465, 466,467, 468, 469, 470, 471, 472, 473, 474, 475, 476, 477, 478,479, 480, 481, 482, 483, 484, 485, 486, 487, 488, 489: n = A,T,C or G
  misc_feature 490, 491, 492, 493, 494, 495, 496, 497, 498, 499, 500, 501,502, 503, 504, 505, 506, 507, 508, 509, 510, 511, 512, 513,514, 515, 516, 517, 518, 523, 524, 525, 526, 527, 528, 529,530, 531, 532, 533, 534, 535, 536, 537, 538, 539, 540: n = A,T,C or G
  misc_feature 541, 542, 543, 544, 545, 546, 547, 548, 549, 550, 551, 552,553, 554, 555, 556, 557, 558, 559, 560, 561, 562, 563, 564,565, 566, 570, 589, 611, 618: n = A,T,C or G
agtacttctagaattaattaaggcgggctaattgnaantncacatgangagaaaanagaataanntggaatgaggcacaccctacanggtctagaaaatagcctaagaagggcnaatttaatagttattgtccttaaagaggaggtagagagagagntaggcgtacaaaatttattcanatagataataacanagagcctctnaaacctagnannagatatcaatattaaaatacaagaaggttatagaacactgagcagatttaacccaagactacctcaagatacttaataatcaaactctcaaaggtcaaggatgaagaaaggatcctaaaagcagcnngaaataaannaaaaaaaaaaaaaannnnnnnnnnnnnnnnnnnnnnnnnnnnnnnnnnnnnnnnnnnnnnnnnnnnnnnnnnnnnnnnnnnnnnnnnnnnnnnnnnnnnngnnnnnnnnnnnnnnnnnnnnnnnnnnnnnnnnnnnnnnnnnnnnnnnnnnnnnnnnnnnnnnnnntggcnnnnnnnnnnnnnnnnnnnnnnnnnnnnnnnnnnnnnnnnnnnntggngccagcctgaatggcgaantggaaatttgtaagccgttaanatttttng

SEQ ID NO: 19093 - DNA, 373 bp, Homo sapiens
  misc_feature 83, 98, 104, 143, 162, 166, 167, 170, 172, 180, 194, 223,227, 254, 278, 299, 331, 352: n = A,T,C or G
agtacttctagaattaattaaggcggggggagggatagcattaggagatatacctaatgtaaatgacgagttaatgggtgcancacaccaatatggcncatgtntacacatgttacaaagctgcacattgtgcacatgtaccncataacttaaagtgtaatnatannaantnaataaaancaaaaataaaatcncaccatcaagaaagaaagaaagaaggaangatngattactgtcacatatactctattagntatcatcacaagcctaccacgtanataggataggctttaagtctnaaaacaaacagagatgaattgatttacccaangtcatacacctagcaaagctncagacttaaccttggactttc

SEQ ID NO: 19094 - DNA, 427 bp, Homo sapiens
agtacttctagaattaattaaggcggggagctaaaggaaaatatgaacatgatgaggagagaaacagaagacataagaaaacagatcttctagagctaaaaaatacaatatctaaaatgaaaaattccatagatgggattggacactgcgaactagaagtttggatactctaaaggattaataaacttgaagacagagcaaaacaaactagacaaactgaagcatagagagaaaagagtgggaaaaacttagcagagcctcaatggctgtgggacaatattgggtggtcttacatatatatatataattggaatcccagaaagacaagagaatatttgaaaaaatatggcagaaaacattccaacttgattaaagctataatcccacagattcaagaagttcaatgaattccaaaaagggtaaacaa

SEQ ID NO: 19095 - DNA, 265 bp, Homo sapiens
agtacttctagaattaattaaggcgggtggatggtgttaaggtgtaaagtttttattagttttattttgcatgtttgtttcttcatgcaaacagtgttattatttagttgaaaataatgggtcataagatagtatttgcaagtatgtggcatgccaacagtgaacaatctgaaaaagaaataaaaaattaatcccatttacaatagccagaaataaaattaaatagcggggcgttaaccaaaaaaaaaaaaaaaaaaaaaaaaaa

SEQ ID NO: 19096 - DNA, 353 bp, Homo sapiens
  misc_feature 328: n = A,T,C or G
agtacttctagaattaattaaggcggggcacagtgggatagggagagcatcaggaagaatagctaatggatactgggtttaattcctaggtgatgtgttgatctgtgcagcaaaccaccatggcacatgtttacttatgtaacaaacctgcacatcctgcacatgtggtacttttaagtaccccagaacttaaaagttgaagaaaaaaatagtaaggggttctctagttttgtcaatgagcttagtgataattcacaataggtacattcgtttttaaggaaaaaagaaataaagcaattataaaatcaaaaactaaaagattattcanaaaaaaaaaaaaaaaaaaaaaaaaa

SEQ ID NO: 19097 - DNA, 367 bp, Homo sapiens
  misc_feature 32, 34, 36, 45, 59, 310, 322, 333, 343: n = A,T,C or G
agtacttttttaattaattaaggcggggactntngnaccttatanaaaaatttaaatcnatcaaaggtcttaaacataagtcttaaaactataaaactcttagaagaaaatgtaggggaaaagcttcatgacattagatttggcaatgattttgatatgacacccaaagcacaggcaacaaaagaaaaaattgataagctgaactttatcaaaattaaaaaattgtgtattgagggatactataaagagaaccacaggaatgggagaaaaatatttgcaaaattatgtatcttggataaagggattaatnggccacaatatntgaaggaactnctaaaactcnagcaacaaactgattcaaaaatgg

SEQ ID NO: 19098 - DNA, 232 bp, Homo sapiens
  misc_feature 132, 133, 134, 135, 143, 151, 156, 164, 165, 166, 167, 168,169, 170, 171, 177, 178, 180, 191, 192, 193, 196, 200, 220: n = A,T,C or G
agtacttctagaattaattaaggcgggccctgcactcatgagggcttccaatgtgctgcccccctcttaatactcaccaataaattctacttcctgtccaaaaaaaaaaaaaaaaaaaaaaaaaaaaaaggnnnncccccccngggggggnccccnatttcccnnnnnnnngggtgnntntcccccccccnnnggnccgntttttaaaaaataatgccanattttaaaaaca

SEQ ID NO: 19099 - DNA, 178 bp, Homo sapiens
agtacttctagaattaattaaggcgggataaagttatcataaggaattaaaaaaactcagaaaagctgagccagcagaacacagtaatacaaatgctattttaagaaagagataaataactttgtaacaaagttctaaagctaatttattaaaaaaaaaaaaaaaaaaaaaaaaaaaa

SEQ ID NO: 19100 - DNA, 410 bp, Homo sapiens
agtacttctagaattaattaaggcgggacagtaagattaatttattctaacaatgatcttgataatccccctgattcccagactccttggaatagctccacagctatcagtggttctgccacaggttcagagccttcccagtactgccttcttatttgagaggtgtgctaagagctataaagcagaggcttcaattgtacacaattgggaagtttaggcaaaagtcatttcttccctatattttgtcatgcttatctcctgtctctttctgttttacagattagcaataaactccttaaaacccaaaggtttgggcttctgttcctttcacttgcagtcagacatggagttagtggtagaagaaacagaaggggtaacctgcatggtgacagctactgaggggatggata

SEQ ID NO: 19101 - DNA, 450 bp, Homo sapiens
  misc_feature 2, 24, 30, 33, 37, 44, 48, 53, 57, 65, 67, 73, 75, 76, 81,82, 92, 118, 119, 122, 281, 287, 293, 349, 352, 355, 356,373, 378, 389, 391, 392, 404, 412, 423, 429, 430, 433, 434,436, 438, 443: n = A,T,C or G
anactggccgtcgttttacacccnggaaanagntttnaccttgnttcntgccngccnttttccananagaaanannaaaannctttattgcnggcccgatcacctgaggtcgggagtnnaanaccagcctggccaacatggtgaaaccccatctctactgaaaatacaaaaattagccgggcatggtggcagggtgcctgtaatcccagctacatgggaggctgaggcaggagaatcacttgaacctgggaaggtggaagggttgcagtgaacccaaattncaatcnccgccntttgcacttccagcctgggccaacaagaagggaaacttttgcttaaaaaaaaaaanccnccnnaaaaaaaaaaaaacccnacccntgggaaatttngnnttttttttcccncaacccantttcccctttntggggnnccnngngnttttnaaaaaaa

SEQ ID NO: 19102 - DNA, 446 bp, Homo sapiens
agtacttctagaattaattaaggcggggtgtgcggagcgctttaccttccacagtgtccggcacacgcatccttttcgacatcatcacttgacctgctgcaataggcaacctacctggctctctcgcatcccgttatcagcgtcaagaagatttgcacgtaggcctttaaagccagccgccagccccggacgccttcctctcactaaccccatgctgcctttccaaacggaagatgaacttagcaattctaggcgctgcctgtgtactaggtagggaccctgaaagttcatagccatctagttcagtttttctcagcctccacgctattgacattttagaccagataattctttgcctttgaggggctgccctttgcattgtaagatgtttagcagcatatctggcctctccacactaaatgccagtagtgccaccacccccagtc

SEQ ID NO: 19103 - DNA, 373 bp, Homo sapiens
  misc_feature 22, 35, 37, 38, 40, 41, 45, 48, 49, 63, 86, 88, 89, 96, 99,102, 103, 105, 118, 125, 133, 175, 176, 180, 183, 193, 202,219, 225, 227, 229, 236, 246, 250, 251, 258, 263, 288, 289,292, 293, 294, 295, 296, 297, 298, 299, 300, 301, 302: n = A,T,C or G
  misc_feature 303, 304, 305, 306, 307, 308, 309, 310, 311, 312, 313, 314,315, 316, 317, 318, 319, 320, 321, 322, 323, 324, 325, 326,327, 328, 329, 330, 331, 340: n = A,T,C or G
agtacttctagaattaattaangcgggggcactcngnngnnaggnaannccccattttcacanaatgcgtttgaacgttaaatgcnannaaaagtnctnaannanctataaaactaantccctgnattccatngcccttttaaatatgtaatcattctcccaaaataaattcatnncatnaanaagcggtcancaccgctgnggaactccaattccccntataantnantcgtatnactcgcgctnactnnccctcantttanaacttccctgacttggaaaaccctnnctnnnnnnnnnnnnnnnnnnnnnnnnnnnnnnnnnnnnnnnncagctggcntaataacaaaaaggcccgcaaccaatctccctt

SEQ ID NO: 19104 - DNA, 596 bp, Homo sapiens
  misc_feature 345, 447, 469, 477, 512, 532, 533, 565, 567, 570: n = A,T,C or G
agtacttctagaattaattaaggcgggtggatcacgaggtcaggaaatcgagaccatcctggctaacacgggtgaaaccccgtctctattaaaaaaatagaaaaaaattaggcgggcgtggtggtgagcgcctgtagtcccagctactcgagagcctgaggcaggagaatggcatgaacctggaaggcggagcttgcagtgagctgagatggtgccactgcactctaacctgggcgacagagtgagacaccgtctcaaaaaaaaaaaaacaaaaaacaagaattatccaggtgtggcggtgggcgcctgtgaggcaggcgaatctcttgaacccgggaggcggangttgcagtgagccaagatcacaccattgcaccccagcctgggcaacaagagtgaaattccatctcaaaaagaaaccaaaaaaacaaaaaaaaacattgccgnttgagtactggggtttttgggngttggccnaggaaaattaaaaacctggaacatgaaataatggnttggtttttcatttccaaannttgggaatggattaaatatatccgtttttaananacngggaaattcctatttcaaggtttttt

SEQ ID NO: 19105 - DNA, 228 bp, Homo sapiens
  misc_feature 228: n = A,T,C or G
agtacttctagaattaattaaggcgggggaggtgtaggatttcaagaagacaaagtagacaacagtttacaatgcagtaatagaggcaagtaaaataaggatttattgcatcaaactatcttaatgagcatatactcattggtgttctagaaacaaaagccaaagtactttaggctgagaaataaatagaaggtgagaaaaaaaaaaaaaaaaaaaaaaaaaaaaaan

SEQ ID NO: 19106 - DNA, 430 bp, Homo sapiens
agtacttctagaattaattaaggcgggctgaattgttgataaaatggaaaaagtagtatattgttatataagcttctgaggtgtgttttgttgtataagccctggaggttaaaaagtcatcccttatgtatagtagttaaaggcataaaactgtgacttttagatattccacagaaccagacttatttgatgtggataataaccaatgatttagcattttgtttgcttttgttttattttatccgggttcattttttactcttcccatgtcatgaaacaggtggtggcgtgtagagatcagctgatccttgttttatggttaattgaactactttgtatccagggtttctgcaaatccaaaagtgatttttcatctaggatctattcctaacagtctactccaatcccactttagttttcccaattttaa

SEQ ID NO: 19107 - DNA, 432 bp, Homo sapiens
  misc_feature 334, 425: n = A,T,C or G
agtacttctagaattaattaaggggggggatccaaagatggtttcactaagaagggaaaaacaccggacctgagacttgaatgcaagtagaattttgtcaggcagatgatctgttcttccaggtagataatccatcctgggcagacaaaaccaggctgtagaaggaacaccatgtgtggagcaatagaaatatctcattgttactggagtataatgcatgcaagaagcaggcaaggtagacaggggccaccgtgaaggaaactctgaataggggaatgatatcatcacatttccatgttagggacaaataggagaagtttaatatcaagatgtnagaaagttaatggagggagacaattcaggtgttccagccaagggatgacaatacctagtttgaaggcagggatagggagaaaaaaaaaaanaaaaaaa

SEQ ID NO: 19108 - DNA, 279 bp, Homo sapiens
  misc_feature 2, 27, 83, 154, 192, 193, 194, 195, 196, 197, 198, 214, 215,220, 222, 223, 229, 230, 235, 236, 237, 238, 243, 244, 245,256, 257, 262, 263: n = A,T,C or G
tnaggcggggggtcttgggggcctctnaactcccgcccatgcctccctgatgggtgggcccagggcggcctctctctgagganacctcacccactcctcgctcagtttgaccactgtaagtgtctgcactctgtattctattaataaactaaantaaaaaaaaaaaaaaaaaaaaaaaaaaaaaaaaaaaannnnnnncccccccccggggggnnccccnanncccccnnaaaannnnttttnnnccccccccccnnggggnntttttaaaaaaaaaaa

SEQ ID NO: 19109 - DNA, 311 bp, Homo sapiens
  misc_feature 30, 37, 39, 40, 42, 43, 45, 68, 98, 126, 174, 184, 198, 210,212, 214, 217, 226, 246, 258, 290, 303: n = A,T,C or G
agtacttctagaattaattaaggcgggcgnctgtcangnncnntnctacggaggctgacgcaggagantcgtttgaacctgggaggcgaaggttgcantgagccgagattgtgccattgcactccnacctgggcaacaagtgcaagactctgtctcaaaaaaaaaaaaatggcncaccctggcntgctttaggaggancatgctggctgntntnatnaaaaaagtncaggagggcaaggtcaaaanctaggaaaccanttaggaggtgatggcaatgactcaggtgaaanatgatgatggttnaaaccagg

SEQ ID NO: 19110 - DNA, 314 bp, Homo sapiens
  misc_feature 4, 5, 257, 258, 275, 276, 277, 278, 279, 280, 281, 282, 283,284, 285, 301: n = A,T,C or G
agtnnttctagaattaattaaggcgggctactcggggaagtactgattccaggacttggaaaggaatgtaacaggaagcctacatcatgttgtgccagaaaccaagtaagttttaaagactaataaggtcatgtcaaaattatacagcaatcaaggactcctactagacaaatctaggacaatttaaacatcgaaaagaataatgactgcaattgactgaaacatgaaaatttaaaaatcgtaaatactgatactcnnaaaaaaaaaaaaaaaannnnnnnnnnnggcggccgcccgcggnggagctccaattc

SEQ ID NO: 19111 - DNA, 216 bp, Homo sapiens
gtacttctagaattaattaatgcttgtaggacataataataacaattgaatgtctgcacagccgctttccacacagacatcataacaaaaaatttccaccaaaccccccctccccccgccttaattaaggcgggggtgctggactggactcttgttcactttaccttctgccaaatgcagagagggaggccagtgtcagggtcggagtggcctggc

SEQ ID NO: 19112 - DNA, 585 bp, Homo sapiens
  misc_feature 21, 273, 301, 302, 303, 304, 313, 314, 323, 324, 325, 327,329, 330, 332, 334, 337, 343, 344, 345, 350, 361, 363, 377,378, 382, 386, 395, 403, 410, 412, 423, 424, 427, 429, 431,435, 436, 437, 438, 439, 440, 443, 444, 445, 446, 447: n = A,T,C or G
  misc_feature 448, 449, 450, 452, 453, 454, 458, 459, 461, 462, 463, 464,465, 467, 469, 470, 475, 477, 478, 479, 480, 481, 482, 483,484, 485, 486, 487, 488, 489, 490, 491, 492, 493, 494, 495,496, 499, 500, 502, 503, 504, 505, 506, 510, 512, 513: n = A,T,C or G
  misc_feature 524, 525, 526, 527, 528, 531, 532, 533, 534, 535, 536, 537,538, 539, 540, 541, 542, 543, 546, 547, 548, 549, 550, 551,552, 553, 554, 555, 556, 557, 558, 559, 560, 561, 562, 563,564, 565, 566, 567: n = A,T,C or G
gccccccctcgagagtacttntagaattaattaaggcgggagatggaggccaaacgcgccgagaggaaggtggccaagggccccatgaagctgggagcccggaagctggactgaaccgtggcggtggcccttcccggctgcggagagcccgccccacagatgtatttattgtacaaaccatgtgagcccggccggcccagccaggccatctcacgtgtacataatcagagccacaataaattctatttcacaccaaaaaaaaaaaaataaaanaaaaaaaaaaaaaaaaaaaaataattcnnnnccccccccnnggggggccnnntnanncncnttnaaaggnnngaaanacccccccccngnggggggtttttttnnaaangggnataaaaaangatgcctnccctttncnttgaatttttnnaangntntttnnnnnnttnnnnnnnnannnaacnnannnnntntnntgatnannnnnnnnnnnnnnnnnnnnaannannnnnaaantnncaaaaaaaaannnnnttnnnnnnnnnnnnnaannnnnnnnnnnnnnnnnnnnnnaaaaaaaaaaaaaaaaaa

SEQ ID NO: 19113 - DNA, 685 bp, Homo sapiens
  misc_feature 336, 337, 338, 339, 340, 341, 342, 343, 344, 345, 346, 347,348, 349, 350, 351, 352, 353, 354, 355, 356, 357, 358, 359,360, 361, 362, 363, 364, 365, 366, 367, 368, 369, 370, 371,372, 373, 374, 375, 376, 377, 378, 379, 380, 381, 382: n = A,T,C or G
  misc_feature 383, 384, 385, 386, 387, 388, 389, 390, 391, 392, 393, 394,395, 396, 397, 398, 399, 400, 401, 402, 403, 404, 405, 406,407, 408, 409, 410, 411, 412, 413, 414, 415, 416, 417, 418,419, 420, 421, 422, 423, 424, 425, 426, 427, 428, 429: n = A,T,C or G
  misc_feature 430, 431, 432, 433, 434, 435, 436, 437, 438, 439, 440, 441,442, 443, 444, 445, 446, 447, 448, 449, 450, 451, 452, 453,454, 455, 456, 457, 458, 459, 460, 461, 462, 463, 464, 465,466, 467, 468, 469, 470, 471, 472, 473, 474, 475, 476: n = A,T,C or G
  misc_feature 477, 502, 538, 542, 547, 552, 554, 567, 596, 602, 614, 616,630, 645, 648, 651, 662, 666, 674: n = A,T,C or G
agtacttctagaattaattaaggcggggcacggtggctcacgcctgtaatcccagcactttgggaggccgacacccaacgcaggtggattgcttgaagccaggagtttgacaccagcctgaacaacatggcaaaaccctgtctctaccaaaaatacaaaaaaatagccggacatggtggcacgtgcctgtagtcctagctattaggggggctgaggcaggacaatagcttaaacccaggaaacggaggttgcagtgagtggagatcacgccaatgcactctagcctgggtgacagggcaaaactctgtctcaaaaaaaaaaaaaaaaaaaaaaaannnnnnnnnnnnnnnnnnnnnnnnnnnnnnnnnnnnnnnnnnnnnnnnnnnnnnnnnnnnnnnnnnnnnnnnnnnnnnnnnnnnnnnnnnnnnnnnnnnnnnnnnnnnnnnnnnnnnnnnnnnnnnnnnnnnnnnnnnnnnntcgcccagctggcgtaatagcgaanagcccgaccgatcgcccttcccaacaatttgcgcancctnaatgncgaantnggaaatttgtaancgtttaataatttttgttaaaaaatccgnggtttnaaatttttttgntnaaaatcaaagcttnattttttttaaaccnaanaanggccgaaaatngggnaaaaaaancccttttttaa

SEQ ID NO: 19114 - DNA, 581 bp, Homo sapiens
  misc_feature 285, 286, 287, 288, 289, 290, 291, 292, 293, 294, 295, 296,297, 298, 299, 300, 301, 302, 303, 304, 305, 306, 307, 308,309, 310, 311, 312, 313, 314, 315, 316, 317, 318, 319, 320,321, 322, 323, 324, 325, 326, 327, 328, 329, 330, 331: n = A,T,C or G
  misc_feature 332, 333, 334, 335, 336, 337, 338, 339, 340, 341, 342, 343,344, 345, 346, 347, 348, 372, 409, 410, 411, 412, 413, 414,415, 416, 417, 418, 419, 420, 421, 422, 423, 424, 425, 426,427, 428, 429, 430, 431, 432, 433, 434, 435, 436, 437: n = A,T,C or G
  misc_feature 438, 439, 440, 441, 442, 455, 456, 457, 458, 459, 460, 461,462, 463, 464, 465, 466, 467, 468, 469, 470, 471, 472, 473,474, 475, 476, 477, 478, 479, 480, 481, 482, 483, 484, 485,486, 487, 488, 489, 490, 491, 492, 493, 494, 495, 496: n = A,T,C or G
  misc_feature 497, 498, 499, 500, 501, 502, 503, 504, 505, 506, 507, 508,509, 510, 511, 512, 513, 514, 515, 516, 517, 518, 519, 520,521, 522, 523, 524, 525, 526, 527, 528, 529, 530, 531, 532,533, 544: n = A,T,C or G
agtacttctagaattaattaaggcgggtggattacctgaagttgggagtttgagaccagcctgaccaacatggagaaaccccgtctctactaaaaatacaaaattagctgggcgtggtggcacatgcctgtaatcccaactactcgggaagctgaggcaggagaatcacttgaacccgggaggtggagcttgcggtgagccgagatcgcgccattgcactccagcctgggcaacaagagtgaaactccatctctaaaaaaaaaaaaaaaaaaaaaaaaaaaaaannnnnnnnnnnnnnnnnnnnnnnnnnnnnnnnnnnnnnnnnnnnnnnnnnnnnnnnnnnnnnnntggccgtcgttttacaaacgtcgngacttgggaaaacccttggcgttaccccaacttaatnnnnnnnnnnnnnnnnnnnnnnnnnnnnnnnnnngcgtaatagcgannnnnnnnnnnnnnnnnnnnnnnnnnnnnnnnnnnnnnnnnnnnnnnnnnnnnnnnnnnnnnnnnnnnnnnnnnnnnnntgttaaaattncccgttaaatttttggtaaatcaagctcattttttta

SEQ ID NO: 19115 - DNA, 202 bp, Homo sapiens
  misc_feature 33, 35, 49, 50, 57, 64, 67, 76, 81, 83, 87, 89, 91, 95, 97,98, 109, 117, 129, 165, 195: n = A,T,C or G
agtacttctagaattaattaaggcgggggcggntnaacctgtgtgctgnnaatgacnagacttnctnttgaacagngtgcngntgtnancntatngnnaaactattacnaataaagntttgtttattanaagataaaaacatacttttagaagaaaaaagataantttaaaccaaaaaaaaaaaaaaaaaaaaangcggccg

SEQ ID NO: 19116 - DNA, 334 bp, Homo sapiens
  misc_feature 304, 305, 307, 332, 334: n = A,T,C or G
agtacttctagaattaattaaggcggggcaggactgtattgaaataatacatattatttaaattaagtaatacatatatttaaataacacatattctttaaatatgtgtatactctttatatatactatatttatggtatgcatatgtatatatacgtatttatgacaaaaccatatatatataggccaggcatggtggctcatacctgtaatcccagcactttgggtggctgaggcaggtggatcacttgaagtcaggagttcgagatcagcctgggcaacatagtaagacctcattgctacnnanaaaaaaaaaaaaaaaaaaaaaaaanan

SEQ ID NO: 19117 - DNA, 372 bp, Homo sapiens
  misc_feature 279, 292, 345, 354: n = A,T,C or G
agtacttctagaattaattaaggcgggcatggtggcgggcacctgtactcccagctactcaggaggctgaggcaggagaatgacgtgaacccgggaggcggagcttgcagtgagccgagatcacaccactgcactccagcctgggcgacagatcaagactctatctcaaaaaaaaaaaaaaaaaaaaaaaaagctttagaacagtaaggaaagaaggacagaaagtacaacttggaagagggccaagtaggtgacttgtgtgcctgatttaaaatattnttacgaagaattntaacagggaaaatatctgccttaaagctatgttttcaaataagtctccattcnacatgaaantatcccagtaaaggacta

SEQ ID NO: 19118 - DNA, 639 bp, Homo sapiens
  misc_feature 14, 16, 17, 22, 63, 140, 157, 162, 166, 167, 168, 174, 180,184, 193, 197, 237, 250, 261, 284, 285, 288, 289, 291, 296,299, 303, 311, 313, 314, 315, 323, 327, 328, 337, 338, 342,348, 363, 367, 370, 371, 380, 383, 388, 396, 398, 405: n = A,T,C or G
  misc_feature 416, 425, 427, 439, 445, 447, 448, 452, 461, 463, 475, 480,493, 501, 512, 517, 525, 529, 539, 542, 551, 564, 589, 590,594, 600, 607, 624, 629, 630, 631: n = A,T,C or G
aatttaggcggggnanngagantgaggaaggaaaagaggatgtcacaggtactattttggtanattttagttgctattaacataaaagaaacaagatgtgagtttggttttagatgacctgttttttaaggtgaaaaganatgggtgttgaagacanaggcntttnnncagganataatnttgncctcctctnttgnactttgccttgatttgatcattttcaaaactgtaatgtanccatgtatcactnttctacttttnaactgaatgcataactgccttannaanncnattanganctcntttttttngnnnattgcccntggnnaagaaggtnntcantttttnccctttgggacaatnatanatnngggacctcntanagggngggacctngnccctctnaatcctttttnttaatcccncngcctaaaggggnagcccntnntttngaaccccancnccctttgggggnccttngggccttaaattncctccttngggaaatgccnaaggngggggganttcnaacctgtttnggnccccccttncttggaaaaaaanccccccccaattttttaataaaaanncccnttttcnccccccntaaaatttccccaaaanaaaannngggggggg

SEQ ID NO: 19119 - DNA, 427 bp, Homo sapiens
  misc_feature 336, 404: n = A,T,C or G
agtacttctagaattaattaaggcggggaagcaaagaatcgaaggtaaaatgttgattcaaagattgtctcccctaaatccttcatttctttctctgaaatggaactttggaagccatttatatagattaagtctgacagcctttatatttgcatgtaagtttacttgcatccttagacttggctttatgcaaaaagaaaatttttattcgttatattgtatttcatctgtctgatttccctggcacattaagatggtcctggtccctcaggatactttttcccttaataaatgtcatatgtaaataaaggcaactcatttattagtttgggattntttttcccttgagaaataaatgtttgttgaacataaattcttctttacctcatgtgctaagaactaanctatataatctgatatatttttt

SEQ ID NO: 19120 - DNA, 732 bp, Homo sapiens
  misc_feature 203, 204, 205, 206, 208, 211, 217, 223, 231, 233, 240, 241,246, 250, 251, 254, 255, 263, 264, 265, 266, 269, 273, 274,275, 281, 283, 288, 290, 292, 293, 300, 303, 304, 307, 308,314, 316, 317, 323, 324, 325, 328, 330, 331, 333, 337: n = A,T,C or G
  misc_feature 353, 356, 359, 364, 369, 377, 379, 380, 381, 387, 391, 397,398, 403, 405, 407, 409, 410, 412, 419, 421, 429, 436, 440,441, 457, 464, 477, 486, 496, 497, 502, 508, 534, 535, 539,542, 545, 549, 560, 564, 573, 577, 578, 579, 581, 582: n = A,T,C or G
  misc_feature 584, 588, 590, 600, 601, 620, 631, 637, 638, 639, 642, 656,657, 675, 686, 696, 702, 704, 710, 712: n = A,T,C or G
agtacttctagaattaattaaggcggggttggcccttgtcttttcaagtaattttcatattaaacaaaaacaaagaaaaaaaatcttataaaaaggaaaaaaaaccaaaaaaaaaaaaaaaaaaaaaaaaaaaaaaaaaaaaaaaaaaaaaaaaaaaaaaaaaaaaaaaaaaaaaaaaaaaaaaaaaaaaaaaaaaaaaaaannnngnccncccccngggggnacccccantnccccctnnagggngggnnttnncccccccnnnnggnccgnnntttaananccttngncnnggaaaanccnnggnnttcccnanntaaatnnnttngnnanaaanccccttttcccaactnggnganaaacnaaaanggcccccncnnntccccnttcnaaaaannggccnantntnntnggcaaangnaaaatttnaaacccnaaanntttggtaaaaatcccnttttaanttttttttaaaanaaagttctnttttttttanncaatngggccnaaaattcccgaaaaaacccctttttnnattntcnaanaaantttacccccgnattnggggggtgngggnnntnntncccnanttttgggaannaaaaaagccccctttttanaaaaaaccttnggcccnnnccnctttaaaaaggggnnaaaaaaaaccctcttttntaggggggaangggccccctntttttngnaacccncncccctaaatccaattttttt

SEQ ID NO: 19121 - DNA, 158 bp, Homo sapiens
agtacttctagaattaattaaggcgggctaagaagcagagaggaagttttagagtagcatttcccagagagtcttccacagcttttcataagtgttacgtgaaaagggttaaataaataataattctgtaaaaaaaaaaaaaaaaaaaaaaaaaaaaa

SEQ ID NO: 19122 - DNA, 217 bp, Homo sapiens
  misc_feature 53, 105, 122, 123, 136, 157, 183, 193, 205, 209: n = A,T,C or G
agtacttctagaattaattaaggcggggatactgtaattttggagcagtcatntgcaaattaacttatttggcagataccaatgtcaaattggtatgaaacaacnggaaagtaaagcatatnntaatatttccctnaaaaatcatggaaaggggatntaacaccctggaagcctgaaactggntgtcgtagtnccaatgactatnctgntttttaaa

SEQ ID NO: 19123 - DNA, 463 bp, Homo sapiens
  misc_feature 109, 370, 452: n = A,T,C or G
aacaaaagctgggtccgggccccccctcgagagtacttctagaattaattaaggcaggtcctatgagtcttaggcaggcctaggcacgtgttctctctttttgttgttngattctcaatttacgacaaatgaagaacgaggcctttacctggtctggatcgacttgttatggagcccatgtgaaatgaaaatgattcataaacaaaactgattccatccccagcaacagcagagatgaccatgaacaattagccacctgagaatcctcaacaattcttggggaattcattaattacattttattaaagggcagggatatccaaggtgacatatgggttacaaaggcaaagtataatttctttatgggttntgttaatgtgaaatataaattaataagctttttgattttactaatacaaacatacccatcaattgggtcttcttcaattcanaaataactaga

SEQ ID NO: 19124 - DNA, 289 bp, Homo sapiens
  misc_feature 39, 48, 52, 61, 63, 101, 111, 118, 123, 124, 132, 143, 160,161, 182, 184, 187, 200, 205, 206, 219, 229: n = A,T,C or G
tcgaagagtcttctagaattaattaaggcgggggttctnaagattatntganaaataactncnactacattgaaatgcagacttaaaaattcaaacattgnattagagcantcaaaanaaccnntcaagcanaaaaggtcaanaagatgtaatctttganntgacaaggtggaaaacttatnanaangggaaagaaagtnttatnncctttttttgttngatgggcacntaatgccatattatacccaaagttcttttaaaaaatatttccatccacccatttttattt

SEQ ID NO: 19125 - DNA, 324 bp, Homo sapiens
agtacttctagaattaattaaggcgggggattaatctggggtgcactttgaaagaagaaacaaatattttatgttaagtgaggattaaggaaagatttgagatatcttaatgggtaatgccccactagcagcaatacatgttgggattgaaaatcagtgtaactgttatttgggtatcatttactttaacatacctactagatctaaggtcggcagactttttctgaaacacgccaaataggaaatatttgaggctttgtaagccaaaatacagaattgtggattctatttaggtatttatataacaaggggaaaaataagttt

SEQ ID NO: 19126 - DNA, 408 bp, Homo sapiens
  misc_feature 57, 261, 345: n = A,T,C or G
agtacttctagaattaattaaggcgggatgctattaaaaaaagaaaaaagaagagancaaaaaagtcctccagtaaatttaaaatatggtagtcaaggccgggcttggtggctcaatcctataataccagcaccttgggaggccgaggcgggaggatcacttgaggccaggagttcaagaccggcctgggcaacataatgagaacccatctttaccaaaaaaataaaattacattaaaaattagccgggcacggtgacgtntgcctgaggtcacattcaagaagctgatgtgggaggatcacttgagctcaggagttccagaccattccaaagcaaaaacaaaangattttgagatcagtgtggacaacttagcaaaacaccatcttctaaaaaaaaaaaaaaaaaat

SEQ ID NO: 19127 - DNA, 276 bp, Homo sapiens
  misc_feature 263: n = A,T,C or G
agtacttctagaattaattaaggcgggggttgcagcgagccgagatcacgccactgtactccagcctgggtgacagagtgagactccatctcaaaaaaataaaataaataaaataaaataaaattgaagaaactttttttaattttaaactttgaattttgagataatggtagattcacatgcagctgtaagaaagaacacagagaaatcctatatactcttcccccagtttttttgagactctgtctcaaaaaaaaaaaaanaaaaaaaaaaaaa

SEQ ID NO: 19128 - DNA, 392 bp, Homo sapiens
  misc_feature 29, 30, 32, 35, 40, 42, 43, 44, 48, 51, 52, 53, 54, 62, 63,71, 74, 80, 83, 85, 91, 98, 99, 109, 117, 118, 120, 121,124, 130, 133, 134, 138, 157, 158, 161, 162, 163, 164, 167,175, 176, 178, 183, 188, 189, 190, 205, 207, 208, 227: n = A,T,C or G
  misc_feature 268, 276, 279, 293, 382: n = A,T,C or G
agtacttctagaattaattaaggcgggcnncnttngctangnnnttanaannnncttttttnnaatcaagnccnttttcntgnantagatnactgtgnntgggccttgngactaatnnannggngtcaanaannaaanaaaatttgtcaagacaacnnccnnnncanggggaacnncnaaagnagacnnnaaaactaagcacacncnncccccccgccccccaaacngactggctgtgtgttcacagaaatacaaacaccacccggtntgtgctantanggcttgctctgaanacaattacaaagaattggaatcacaaaatcaagtggttatcttatgaagttctagaaaaatagattttttttatattcaaatgcaagtntaaatatttc

SEQ ID NO: 19129 - DNA, 155 bp, Homo sapiens
  misc_feature 5, 18, 27, 55, 121: n = A,T,C or G
ctaantaacttgaatcantcaatcatntaggcccacatgatttcactggagtgtnctgtataattcaagggagaaaatatccaacttttttcacgcattcttctgggaaacaacatacttncctcggttttctcatcccaaagtctgaaatattt

SEQ ID NO: 19130 - DNA, 782 bp, Homo sapiens
  misc_feature 528, 670, 678, 698, 699, 729, 738, 747, 767, 770: n = A,T,C or G
agtacttctagaattaattaaggcgggggttgcagtgagccgagaccacgctattgcacttgagcctgggcaacaagaacgaaacttggtctaaaaaaaaaaaaagattatgggtctagcatgagtgtcatgcaagtaaaaaaagaaaattttcatggaaagattctaaatgataagctgttagatagtgtaataaactgaatacaaagcagagtatatacatttgcttttagcatttttgaggatttttgttttctagtaaattagacatcttattaaaatgctttgttttgtttcaatattgctcttttcttctgaaaacagttacaaacttatattcaaacacccttactccttaaacctgttatatctttagactaatagatgtgtatatttaactctatgtaagtcaaaactaaaactctattgtgtgctctcaggcagaggccacgtgttcaaaaaatacataaaaaatttttgaaaattattcaggactcagaaatatatcatttttatttacgcttgtantataatttttatgatgaccataaaaataacctgtagcccaataattaatttaactgtacaaccttagaattacctaagactgtagaattgaattgtttgtaatacaaaacataaagccaggaggttattagctccttatttntcacaatngggatcattattataatggnntgactgtattaaaatccgccatttatgganttaaatttnttccccttnttttggtaaaccccaaaacntangaaaaaataaat

SEQ ID NO: 19131 - DNA, 319 bp, Homo sapiens
agtacttctagaattaattaaggcgggggttgtttacaggaaattaggagaataataacatttccaaataaggaaggggtgtaggctgtaagctgggaaatgcctgggcacgttcggacatgtctgagcaggttatagtccagaacaaataacctggttaaagtacaaggacatagaatgtacttattcccttactatatttaacagccacatagggcttaacaaagagttattagcaaaaagcaagggagcttgaaggaagttaatttctaaaagaaactggtatttctaacacttggtatttattctttaacaaaaa

SEQ ID NO: 19132 - DNA, 645 bp, Homo sapiens
  misc_feature 308, 317, 327, 334, 335, 336, 337, 338, 339, 340, 341, 342,343, 344, 345, 346, 347, 348, 349, 350, 351, 352, 353, 354,355, 356, 357, 358, 359, 360, 361, 362, 363, 364, 365, 366,367, 368, 369, 370, 371, 372, 373, 374, 375, 376, 377: n = A,T,C or G
  misc_feature 378, 379, 380, 381, 382, 383, 384, 385, 386, 387, 388, 390,431, 432, 433, 434, 435, 436, 437, 438, 439, 440, 441, 442,443, 444, 445, 446, 447, 448, 449, 450, 451, 452, 453, 454,455, 456, 457, 458, 459, 460, 461, 462, 463, 464, 465: n = A,T,C or G
  misc_feature 466, 467, 468, 469, 470, 471, 472, 473, 474, 475, 476, 477,478, 479, 480, 481, 482, 483, 484, 485, 486, 487, 488, 489,490, 491, 492, 493, 494, 495, 496, 497, 498, 499, 500, 501,502, 503, 504, 505, 506, 507, 508, 509, 510, 511, 512: n = A,T,C or G
  misc_feature 513, 514, 515, 516, 517, 518, 520, 531, 534, 549, 575, 592,605, 620, 621, 628, 637: n = A,T,C or G
agtacttctagaattaattaaggcgggcacaatggctcacgcctgtaatcccagcattttgggaggccaagacgggtggatcacctgaggtcaggagtttgagaccagcctggccaacatggagaaaccccatctctgctaaaaatacaaaaaaaattaactgggcgtggtggtgcacacctgtggtcccagacacttgggaggctgaggcacgaggatcgcttggacctgggaggcggaggttgcaatgagccgagatcatgccactgcactccagcctgggcaaaaagagtgaaactccgtcccanaaaaaaaanaaaaaaaaanaaaaaannnnnnnnnnnnnnnnnnnnnnnnnnnnnnnnnnnnnnnnnnnnnnnnnnnnnnncncgctcactggccgtcgtttttacaaccgttttgactgggannnnnnnnnnnnnnnnnnnnnnnnnnnnnnnnnnnnnnnnnnnnnnnnnnnnnnnnnnnnnnnnnnnnnnnnnnnnnnnnnnnnnnnntngcccttttccnaanagtttgcgcaacctnaatgggcggaatggaaaattgtaagncgtttaaataatttttnttaaaaattctcngttaaaatttttttnnttaaaantcaagcctnattttttt

SEQ ID NO: 19133 - DNA, 640 bp, Homo sapiens
  misc_feature 530: n = A,T,C or G
agtacttctagaattaattaaggcgggtggatcacaaattcaagagatggagaccatcctggctaacacggtgaaaccccatctttactaaaaatacaaaaaattagccaggcatcatgacgggtgcctgtagtcccagttactcgggaggctgaggcaggagaatcgtttgaacccaggaggtggaggttacagtgagccgcgatcgcaccactgcactccagcctgggcgacagagtgagactctgtctaaaaacaacaacaaaaaagcatttatttgtatttttaagatggaatttatttgagaaacgtataaaaacacaacagaacgcttcctaggccactttacacaatcaataggcaataataacatacatatatttgcaagcataaaactcaggtatgctaacgatagtctcacgggtataatggtaatgagcagatgagttgtatttgtaaagaaatgggtcaaaaagcaaaatgcataaaagcatggttggtaactgggtgcactcagctttataacttangtcatctggaatttgtccaacctaagtcttttgaccagattcatcaaaagctgggatgggtcaccatctaatatgtagtcaaagagctggagatcctgaggaaatttttt

SEQ ID NO: 19134 - DNA, 417 bp, Homo sapiens
  misc_feature 255, 282, 302, 344, 345, 355, 356, 357, 378, 391: n = A,T,C or G
agtacttctagaattaattaaggcgggaaattttgcttcctttgggctttgctgttaggactctgcgtagaggcagggtttcgccatgttgcccaggctggtcttgaactcctgacctcagatgatccacctacctcggcctccccaaagtgctgggattacagaggcagaatccacgctgcaaaattcatcctcagctgttcatactgaaagtaacaagctacaacccaagagaacggcagatgcgatgaatcncagtgttgatgtggaaagtaagtcagngatggagacaggtgattganaggataccacaccagcccctggattttttttcgggggattgnncacccctacnnnaaaggggaaggagacctgganaggaaaccatttnttcattaaaaaaccggccaggaacct

SEQ ID NO: 19135 - DNA, 880 bp, Homo sapiens
  misc_feature 1, 22, 31, 32, 35, 37, 40, 49, 51, 53, 55, 58, 59, 67, 69,76, 80, 81, 82, 83, 84, 94, 95, 101, 103, 110, 112, 121,124, 130, 133, 154, 172, 175, 188, 205, 207, 293, 304, 309,359, 377, 394, 398, 403, 404, 405, 411, 428, 436, 443: n = A,T,C or G
  misc_feature 445, 449, 452, 460, 462, 463, 480, 483, 484, 486, 488, 499,502, 503, 504, 507, 513, 516, 523, 526, 527, 528, 530, 532,534, 550, 551, 556, 557, 560, 564, 571, 572, 581, 582, 586,587, 589, 592, 593, 594, 596, 613, 615, 617, 618, 619: n = A,T,C or G
  misc_feature 627, 628, 630, 632, 633, 635, 636, 637, 640, 642, 647, 648,660, 661, 665, 666, 672, 674, 675, 682, 683, 692, 693, 694,699, 700, 701, 714, 716, 718, 726, 736, 743, 744, 750, 751,758, 762, 771, 778, 781, 782, 797, 799, 812, 813, 814: n = A,T,C or G
  misc_feature 815, 817, 822, 823, 824, 825, 826, 827, 828, 829, 830, 831,832, 833, 834, 835, 836, 837, 838, 839, 840, 841, 842, 843,844, 845, 846, 847, 848, 849, 850, 851, 852, 853, 854, 855,856, 857, 858, 859, 860, 862, 870, 879: n = A,T,C or G
natactggccgtcgttttacanccgggaaannagntntanccttaattntngncngtnnttttcctncngggaaanaggnnnnncctttattcnnggccgncntttttcntncggaaaaanaanaacctnatnatttttgaccccgtgttgaanctatcctgccccgccatnatncctagtcctcttngccctcccatccctacncntcctttacataacagacgaggtcaacgatccctcccttaccattcaaatcaattggcccccaatggtactgaacctaccgagtacnccgactacggnggacntaatcttcaactcctacattactttccccccatttattcctagaaacccngggcgaccctggccgaantcctttggaccgtttgnacanttcgnnnttagtnacctcccggattggaangccccccnatttcgntntaantantttccttncnnaaaaaaacttttggccnctnnangnacctggccccncannnttngggggnttnaaaaaanaannngngngntttttccggggggggnnttttnnaanccanaaccctnnttttttccnngggnntnacnnnanagggggggggggggttntnannnggggggannangnngnnnttnanaaaanntttggggggggnnccanncccccncnnttttttnngggcccccnnntgggnnnaaaaaaaaatttnantncccccccnaaaaaaaaanttttttnnaaaaanngggggcncccnttttttttnccccctnttnngcccccccctttttntnccccctttttttnnnngnccccnnnnnnnnnnnnnnnnnnnnnnnnnnnnnnnnnnnnnnngngggggccnccccccccng

SEQ ID NO: 19136 - DNA, 318 bp, Homo sapiens
  misc_feature 24, 224, 227, 235, 243, 245, 246, 248, 252, 256, 257, 258,259, 260, 261, 262, 263, 266, 268, 270, 272, 282, 283, 284,285, 288, 293, 299, 309: n = A,T,C or G
agtacttctagaattaattaaggnggggtcgagagctgatgggcggcattgggaaaaccatgatgcagagtggcggcacctttggcacattcatggccattgggatgggcatccgatgctaaccatggttgccaactacatctgtcccttcccatcaatcccagcccatgtactaataaaagaaagtctttgaggaaaaaaaaaaaaaaaaaaaaaaaaaaggnggncccccccngggggggncnncnattncccnnnnnnnnggnantntnaccccccccnnnnggnccgtnttttanaaacattgancaaataaac

SEQ ID NO: 19137 - DNA, 665 bp, Homo sapiens
  misc_feature 16, 597, 608, 621, 642, 645, 650, 657, 664: n = A,T,C or G
taattaaggcggggtngatgttgatcaaagcatataaaatttcagttagataagggaataagctcaacatgatgactacagttaaaaacaatgtactatattgtattcttgaaaatcactagaagcatagattttaagtgttctcacacaaaaaataagaatgtgagataatacatatgctaattagctatatttagccattctacactgtatacacatatcaaaacatgatgtatatgataaatatgtataattttgtcaattatcaaaaataaataaatatttaaaagttattctatcatatctggttaatccactaatacacatacacactaaattgtaaaaatattgataatgtataaaaaaatctaaattttgaaaaattataaaactccttttccctcaatcttgatttcccaaaaacagtctttacgcttgtaatctaaaataacagataatactctacaaacatttatactcttaaaaataaacatgttctgtagcacctttaaatcactgtctccattaaacactctatgataaacataatttaataaaaacacataatttttacccagaattcgagacccttttatngaaaaccagcnaagaaaattcctnttttaaaaagggggaaaaggnaanctttnaggtaanccttttnt

SEQ ID NO: 19138 - DNA, 399 bp, Homo sapiens
  misc_feature 3, 19, 30, 34, 37, 39, 43, 44, 55, 57, 60, 73, 84, 95, 233,263, 290, 293, 297, 305, 322, 327, 333, 340, 349, 350, 351,352, 353, 354, 355, 356, 357, 358, 359, 360, 361, 364, 366,367, 368, 369, 370, 371, 372, 374, 375, 376, 377, 378: n = A,T,C or G
gcngggttccgggcccccnttccagaggtnttanagnancaannaaggcgggggncncanttcatccgatacncccagatctgngcaaaagcagngagagatgcactgaagacagaattcaaagcaaatgctgagaagacttctggcagcaacgtaaagattgggaaagtaaagaaggaataatctaccctgactaaagcttgaaatgctacatttccaaggggaagatgtgngggcacatgttatggcagattgaaaagganctcattccatgggaaaaaaaaaaaccngcntggncataaatngacaatggcaataaatngaaanatgggncactggnaaaaaaaannnnnnnnnnnnnaanannnnnnntnnnnnaaaaaaaaaaaaaaaaaaaaa

SEQ ID NO: 19139 - DNA, 578 bp, Homo sapiens
  misc_feature 8, 19, 21, 23, 26, 27, 28, 29, 31, 45, 46, 56, 58, 91, 122,282, 290, 509, 565: n = A,T,C or G
ctggccgncgttttacacncngnaannnnanataaccttggttcnnggcccccccncnaaagtacttctagaattaattaaggcgggatcnagagattggtcgaggagaaacggaagtcctnattcttgacagctctcagcacatgcagccctccccacacacacagtcacactcacacacactcacaaccagattcacattcctacccatgcacacactaacacacacttgtgcacttaaactcgtgcacttacacattcacattcatatactcacatgcncacattcnaaacacacacatactctacaaacactcatgttgcaaaaggggatttgtaagctgaatgtttagaactcagaacacatattttcacaaaaataatattatggtcgggcgctgtggctcacgcctgtaatcctagcactttgggaggctcagctgggcggatcacttgagatcaggagttcaggaccagcctggccaacatactaaaaatacagaaattanccaggcatggtggtgcatgcctgtaatcccagctactcgggaggctgaggcagganaatcacttgaacc

SEQ ID NO: 19140 - DNA, 747 bp, Homo sapiens
  misc_feature 36, 44, 66, 295, 390, 412, 415, 438, 440, 450, 468, 518,558, 574, 580, 582, 618, 620, 629, 641, 647, 652, 658, 667,672, 683, 685, 686, 698, 703, 712, 724, 727, 733, 734: n = A,T,C or G
aattaattaaggcggggattcttccgtgcagcaatnacattcantgagatatgtactaaaacttantgacactgaccttagaagataaaacatctttcaattactcaaggaattctcaatagcacacgtgttgtgtttttgataggcaaactgtatctttcctctattgattcattttttgttactacacaaacaacccgttaaactgctcccaggcattttcctaagtagttactagtgagaaatacttctgatttaatttttgtagattttctacttatgatatcattactgngaagagagattctcacttctggggcatctttgagtggatttggttttagctggagcatcagcttcatatgattgagctcttaaccatgatctcanctcactttactcttctggctgnggncccagtcctgtctttcaaattangnctggttttcnctattccttctggactgnaacatacactttctagtatatgccctaatattatttcgtattaacctatncctatcacaccaaatagcccataacaccatgggttttctnttaaaaaattttttantcaaancnttatctatttttataactaaaaactataattttctntnttttcaacncaaaggaaatancctctngaacnggccanctcattacnccccnccttttcaaantnnccatggttcccnaaaanggggggtanaattaaaccccnggngttaannggtaaaaaaaaaa

SEQ ID NO: 19141 - DNA, 523 bp, Homo sapiens
  misc_feature 29, 31, 32, 40, 48, 69, 78, 116, 128, 129, 130, 134, 137,138, 139, 144, 163, 165, 169, 170, 173, 174, 175, 195, 205,207, 208, 211, 212, 213, 214, 215, 217, 218, 219, 223, 226,232, 234, 237, 240, 241, 245, 312, 340, 342, 357, 370: n = A,T,C or G
  misc_feature 374, 376, 398, 403, 406, 408, 415, 421, 422, 430, 434, 438,441, 458, 459, 460, 466, 467, 470, 502: n = A,T,C or G
agtacttctagaattaattaaggcgggcntnncacagcangacgagangaccctatggagctttaattnattaatgcnaacagtacctaacaaacccacaggtcctaaactaccanacctgcattacnnntaanaannnaaaanataaaaaagaaaagaaaangnaaannacnnngccccccccgggggggcccnccctaccccntnnaannnnntnnntttnccncccctncnggnganntttntattaaccacaaaagaagacaagaagaaaggcagacagtagttacaagacaatcagaaaacaaacancaaaatgacaaaaataagtccttatttntnaaaaataacactgantgtaaataaactnactncntttaaaaaccatccaggggttngattnatntncacccangacggnnttatttgnttcntaanacnaatccttttccccttannnatcccnnaanctgaaagggaaggggtggaaaaagatattccntgcaactggaaactaaaaaag

SEQ ID NO: 19142 - DNA, 442 bp, Homo sapiens
agtacttctagaattaattaaggcaggactacactaaacaacagaattttaatatagaagaaacagccttctattgtcagatgatactatctagaagtttcttagctagagaagagaagtcaatgcttggcttcaaagttgcaaaggacaggctggctttcttcttagggaataatacagctggtgactaagctgaaggcaatgcccatttgctattcttatagtcctagcgtccttaagaattacgctaagtcgtaatcccagcactttgggaggccgaggaaggcagatcatgaggtcaggagatcgagaccatcctggccaacatgatgaaaccccatctctactaaaaatacaaagattagctggacgtggtggtgcacacctgtagttccagctactctggaggctgaggcagaagaatagcttgaacctgggaggc

SEQ ID NO: 19143 - DNA, 353 bp, Homo sapiens
agtacttctagaattaattaaggcggggaacaacacacactgggcctgtcggaagggcgaggggagggagagcatcaggaaaaattgctaatgtgtgttgggcttaatacctaggtgatggattgataggtacagcaaaccaccatggcacacatttacctacataacaaacctgcaggtcccgcacatgtatcccagaacttaaaataaaaataaaaattaaaaaaattaaaaaaaagaaaatttggcattttaggtgtcatatggtagcaactagatattgatttcccttctctctctctgaggcttttttgttgttgttgtcatttgcttgtttagtgacttgattaaac

SEQ ID NO: 19144 - DNA, 725 bp, Homo sapiens
  misc_feature 7, 33, 35, 37, 38, 42, 47, 51, 52, 53, 55, 57, 60, 61, 66,68, 69, 70, 71, 79, 80, 84, 86, 95, 96, 104, 106, 111, 121,167, 346, 382, 429, 456, 476, 477, 487, 489, 521, 546, 616,655, 663, 675, 684, 690, 697, 706, 724: n = A,T,C or G
aaacagnctggccgtcgttttacacccgggaanangnnatanccatnattnnngncngtnnttttncnnnnagaaaaannaaananctttgttgnnggcggggncnttgangtcaagaaanagagaccagcctggccaacgtggtgaaaccctgtctctactaatantacaaaaattagttgggcgtggtggcaggcacctgtaaagcgagctacttgggaggctgagactggagaattgcttgaacccacaaggcagaggttgaagtgagccaggatcgcgacacttcaccccagtgtgggtgacagagcaagactctgtctaaaaaaaaaagaaaaatgaaatnctggtattgacatatttaaaaacaattgcctacacngaaccatattcattcttttaaacaatacttatagagtgtctaatatntgtgaggcagcagtgattgtaatcagngctttgaacaaaattccccnnaatagggtantntttccctaatgagtttggctttttgaacaganacattcaaaggacgtgggggaggangccattgtgaccatcggggaaggatttgctaaacaggctgggccgtggtggctcacccctgtaatcccancctttgggaagggctgatcaccctgaggttaaaaggttnaaaacaancctgggctaacntgggggaancccctnttttttncttaaaaantccaaaaaaaaaattttnc

SEQ ID NO: 19145 - DNA, 522 bp, Homo sapiens
agtacttctagaattaattaaggcggggagaaacaggacttgaggattctagaatctcaggttgtagagaactcagtcaccaaactcaatgctttaatcccttctacaaaatccctgccaaatggttagccagtgcggtgacagcattcactatctcctgaaactacattagaaactagtcaaaactgtccctgtggtcacttcctctcagtagcccttatgtcagctgaggacattcaaagtgtaactcattttgttctatatctccaatatcttaattgaccaggtattaagtcccttcaaattctggtctggtctttgaatacatccttatctgtatctgtttggtgcagatggcagatagaagtctatcaatgtagtctactgtttctcaaagtgtaggccatggttcacttgcatcggaatacctataaattcctctaaagagtttgttagacgtgcagctttcaaggccacacttcagaacctctggatgtgaaatttgacaaacatcccaaataa

SEQ ID NO: 19146 - DNA, 412 bp, Homo sapiens
agtacttctagaattaattaaggcgggtatcttggctcagcctaggcagttctgaaacccaggaccaggaaaaattggagggggaacggaagacagatcattctgtaaagtttccaaaaaggaacctcaacccaaagacatcctgatgtctgtgcctaggaaaaataaaaggagaggcacaaaggttttgttcactgagatgtgtggtgattttttctctgccttcttctcatgtgaaattttcagaaatagcaaacaaatactttaaaaagaatcatctattgctctgtgataaaataataaacaattaaaatacactgcatctgttttaaacgggatgaataaatacaatgttgtactataaagaagaaatagttgataatattgtgaactggagaatgggagttgatgt

SEQ ID NO: 19147 - DNA, 368 bp, Homo sapiens
  misc_feature 337: n = A,T,C or G
agtacttctagaattaattaaggcggggtagctcacacagacagttccttatccccttcaccctggcttccttccatccccacggtggacaaagatcaggagttcccaacctccacactaagtgatattttacctggaggattctttgctgtcggggggctgtcttgtgccttgcgggaggttgagcagcatccccggtgcctacctaggagcagcaccccctccccactcatccaccagcacacccaggaccaggagcctcgacacacttgggactcaagggcttgcaccccacccagccctgaggatgaacaacctcagagaagaggtggtttanagcaaggaaaaaaatgaaaccagtgaccaaa

SEQ ID NO: 19148 - DNA, 668 bp, Homo sapiens
  misc_feature 623, 630, 631, 632, 633, 634, 635, 636, 637, 638, 639, 640,641, 642, 643, 644, 645, 646, 648: n = A,T,C or G
agtacttctagaattaattaaaaactaagacaaaaacacacgtattaacttaggcctccacagggtcaggttcatcaatatccctgtcttccaccacctcccctcatcccattggaaggccgtcaggggcagtaacactcatggagttgtcatcttctgtgataatgatgccttcttctggatacctcctgaagaacctgcctcaggctgtttcacggttaacttttttttttataagtagaagtacactctaaaattttaaacaataaaaagtatagtaaatacataaagcagtaacataaccatttattatcattatcaagtattatgtagtgtacataattgaacatgcttagacttttatatgactggcagtataggtttgtttacaccagcatcaccacaaacacctgagtaatgggttgtcttgtgatattatggtggctacagcattgctaggcaatgggaattttcagctccaacctgggtgaaaaagtgagactctgtctcaaaaaaagaaaaaaagacatcatagtgcactgtgttcttacctgtgaatagccactgcccttaagcctggggcaacatagcgagacctccatctcttaaaaaaaaagaaaaanaaagggnnnnnnnnnnnnnnnnntnaaaaaaagggggcccccccc

SEQ ID NO: 19149 - DNA, 372 bp, Homo sapiens
  misc_feature 359, 360, 361: n = A,T,C or G
agtacttctagaattaattaaggcggggtcttgtcatgttgcctaggctggtcttgaactcttgggctcaagcaatgctcccacatcagcttcccaaagtgctgatattacaggcgtcagccaccatgcttggtgtgtttcctttcagttataaaatatctcagatacataaacatgattcgttcattcgacaaatatttgttgagcatataccacatggaaggcactattctgggtttaggaacataacaattgacacagtagtccgagtccttgttctcaaggagctacattctagcggaggaagatagataatcaacaaataaatataaaacaggtttgttggtgttgagtaccannnaaaaaaaaaaa

SEQ ID NO: 19150 - DNA, 236 bp, Homo sapiens
  misc_feature 1, 22, 23, 33, 36, 37, 49, 51, 57, 63, 68, 69: n = A,T,C or G
nactaaagggaacaatttgctnngtaccgggcnccnnagctgggtgccngncccccncttaangagtnnttctagaattaattaaggcgggctgcgtggttcccgtgtcttcaccctttccctagtgactgcgttgtcggctttacgtttattcctttttgtgggcccgctttgtaattgggtgcatttttttctatgtattataacacatggctcataaaataaaactaatttct

SEQ ID NO: 19151 - DNA, 798 bp, Homo sapiens
  misc_feature 409, 443, 451, 485, 488, 541, 543, 551, 597, 605, 631, 632,638, 649, 651, 671, 686, 689, 691, 694, 719, 728, 732, 733,734, 736, 739, 745, 746, 750, 754, 768, 771, 773, 776, 777,779, 781, 782, 783: n = A,T,C or G
agtacttctagaattaattaaggcgggtggatcacatgaggtcgggagtttgagaccagcctggccagcatggtgaaaccccatctctactaaaaatacaaaaattagtggctgacgcctgtaatctcagcactttgggaggccaaggtgggcaggcggatcatgaggtcaggagatcaagaccatcccggctaacacggtgaaaccccgtctctactaaaaatacaaaaaaaaatttagccaggtgtggtagcaggtgcctgtagtcccagctactcggaaggctgaggcagaagaatggcgtgaacctgggaggtggagcttgcagtgagccgagtgagccactgcactccagcctgggtaacagagagagactccgtctcaaaaaaaaaaaaaaatccaaaagttncccgggcatggtggcaggcgcctgtaaatctcanctactcangaagctgaggcgggaatcgcttgaattccagganggnggaggttacagtgagccaagatcgtgccatttgcactttagcctgggcaacanancaagactntttttttaaaaaaaaaaaaaaaaaaaaaaaaaaagcggggcccccnccgcgggngggagcttccaatttccccctatagnnggggtnggtttttaccncnccccttcaacttggccggtngttttttaaaaaacnttngnggnacttggggaaaaaaacccttggcgnttacccaancttnnntnccntttggnngaanattnccccttttttcccnggntnggnntnannnaccaaaaaaggcccc

SEQ ID NO: 19152 - DNA, 282 bp, Homo sapiens
agtacttctagaattaattaaggctgggaaaaggggagaaacaggaactggaaagccactggcacttgtctgtgaacaatatgagaagaaaacagcaaattcatgttttccagtcagcagctagtcaaacctctaacagtacgtaagtggtcagagaggacaagccctctcatccagggctgagaacaggttgttttggctgtcaagcattttcaaaacaagttttcttggtctcatgacaggttgtggcaagaaaaaaaaaaaaaaaaaaaaaaaaaaaaa

SEQ ID NO: 19153 - DNA, 330 bp, Homo sapiens
  misc_feature 18, 32, 34, 44, 49, 57, 74, 78, 95, 100, 105, 107, 113, 114,115, 121, 132, 145, 146, 151, 153, 169, 171, 182, 208, 230,309, 316, 317: n = A,T,C or G
agcgcgcaattaaccctnctgcagggaacccncnctgggggccnggccnctgctccngagcccttctagaatanatcnaggcgggaaatggctgntggcncaacngnccacgnnngcattnaccccagcatnggtggttatcacnnggctnanactggaccaagaccgnanaaagatcctcnaacggaaagccaaatctcgcaagttngaaaggaaaagggcaaatacanggaagaaaccattgagaagatgcaggaataaagtaatcttatatacaagctttgattaaaacttgaaacagcgaagagntatgtanngcttaataaaaat

SEQ ID NO: 19154 - DNA, 487 bp, Homo sapiens
  misc_feature 19, 20, 26, 27, 29, 30, 32, 34, 38, 69, 331, 332, 334, 335,339, 340, 341, 342, 345, 346, 348, 363, 374, 377, 379, 384,386, 387, 388, 389, 390, 391, 392, 393, 395, 396, 397, 398,399, 400, 402, 403, 404, 405, 406, 407, 408, 409, 410: n = A,T,C or G
  misc_feature 411, 412, 413, 414, 424, 425, 426, 427, 429, 430, 431, 432,433, 434, 435, 436, 437, 438, 439, 440, 441, 442, 443, 444,445, 446, 447, 448, 449, 450, 454, 455, 456, 459, 460, 461,468, 470, 472, 483: n = A,T,C or G
ggccgtcgttttcaccccnnaataanngnnancnatgntgggtggcgggccccccctcgagagtacttntagaattaattaaggcgggcggactgtccgagctcaggagttcgagaccagcctgggcaacatggcgaagccctgtctctaccaaaaaaatacaaaaaaattagccaggcacggtggcgcacggccgcagtcccagctactcaggaggatgaggcacaataatcgcttgaacccgggaggcggaggttgtaagctggagcgcactgcactccagcttgggtgacaagagcaagactctgtccccccaccacccccaaaaatnnannaaannnngtnngnctaattaaaaaaagngaaccctttcnatntnaaatntnnnnnnnnannnnnnannnnnnnnnnnnncccccccccnnnngnnnnnnnnnnnnnnnnnnnnnnattnnntgnnncaaaacncngngaatgaatttnaaag

SEQ ID NO: 19155 - DNA, 503 bp, Homo sapiens
  misc_feature 377, 470: n = A,T,C or G
agtacttctagaattaattaaggcgggtggtgagaaatggtggaagaaggcctttaaaggttggtaatgcactggaacagaagaaaagagcacttgttacctgattcctgcctgctatcttttacactggagaatgacccctggctcattttgtggagctgttaattataggctcctgcctcttctaccacctatcccttggccacagtgcttggttcagggatggtcacatgctaggcctatgagagccaaccatgagatatttttttggcatatcctatttttattctagagccatcagctagctgttagtagtcctctttgccacctgataagaagaccctgcctaagaatgaagtcagcacagtgaaaagcanagttgaaaactaggaagagataaagagccctgctgacatcatttgatctcctgcattcagacatacctgaatccatggctagatttttaattnaatgagccaataaattcctttccttactatggt

SEQ ID NO: 19156 - DNA, 520 bp, Homo sapiens
  misc_feature 166, 171: n = A,T,C or G
agtacttctagaattaattaaggcggggatccagcctgggaatggatagtcacaggcttgcagatgatcagcccatctttgatcagcttctggatctgctgataggagcttggcgctggtgattttaccgatctcactgaggttcaagtagacctttttgccacantgaangccactggaggcgagcctcttctgaagcctgagcgtactcctggctatagacgcagccctgtaagactcttcagctttgtacaggaatgcagttgagttacttgggaacagatcccgttagtcttttctctctcatgtagactcttctttcaaaatacatccagactcacaccactttttcccacctccactgatactgccctggtctaggccatcatcactgcttgcctgaattatgacatcagcctcttgactggtcttctgctctgcctttgccttcctcagggatcttctcaacaacgcaacttatacacctcctatgaaaaaactttctaccactcacccttag

SEQ ID NO: 19157 - DNA, 618 bp, Homo sapiens
  misc_feature 29, 36, 46, 112, 160, 166, 195, 202, 204, 218, 239, 251,252, 253, 258, 260, 265, 283, 284, 285, 286, 287, 288, 289,290, 291, 292, 293, 294, 295, 296, 297, 298, 299, 300, 301,302, 303, 304, 305, 306, 307, 308, 309, 310, 311, 312: n = A,T,C or G
  misc_feature 313, 314, 315, 316, 317, 318, 319, 320, 321, 322, 323, 324,325, 326, 327, 328, 329, 330, 331, 332, 333, 334, 335, 336,338, 344, 345, 346, 347, 348, 349, 350, 351, 352, 353, 354,355, 356, 357, 358, 359, 360, 361, 362, 363, 364, 365: n = A,T,C or G
  misc_feature 366, 367, 368, 369, 370, 371, 372, 373, 374, 375, 376, 377,378, 379, 380, 381, 382, 383, 384, 385, 386, 387, 388, 389,390, 391, 392, 410, 421, 422, 434, 447, 452, 454, 465, 479,496, 503, 510, 519, 536, 538, 540, 546, 548, 551, 560: n = A,T,C or G
  misc_feature 563, 569, 586, 592, 596, 605: n = A,T,C or G
agtacttctagaattaattaaggcgggcngatcacnagatcagganatcgagaccatcctggctaacatggtgaaaccccatctctactaaagatacaaaaaattacccggntgtggtggcaggcacctgtggtcccagctacttgggaggctgaggcangagaanggtgcaaacccgggaggcagagcttgcantgagcanangttgtgccactgcnttccagcctgggtgacaaagnaagactccatcnnnaaaancnaatanctaaaaaatacaaaacannnnnnnnnnnnnnnnnnnnnnnnnnnnnnnnnnnnnnnnnnnnnnnnnnnnnncncgcttnnnnnnnnnnnnnnnnnnnnnnnnnnnnnnnnnnnnnnnnnnnnnnnnnatacttaatctgctttgnaaaatcatccnnctttttgctcanactggccgttaanaaccnantgaggccttgnccctgatctggtcntttccccaaacaaaatngccttcnctccctntaatgggcngagttgggaaaaatttngngnagccgngnaanttttttttngtnaaaaanaatcccccggtcctaantttttncgtntaaaatcangcttaattttttt

SEQ ID NO: 19158 - DNA, 448 bp, Homo sapiens
  misc_feature 444: n = A,T,C or G
agtacttctagaattaattaaggcgggaggatcacttgagctcagaaggtcaaggctacaatgagctatgattataccactgtactagagcatctgtgacagacaaagaccttgtctcttaaaaaaacaaaaacagactaaagatgtgatgaattgctgtaatctcatgataaaacatgaataaatgaggaattgcttcttacagataggcaaacaagtggtttcttgagacagaatctacagtgttgaaatgataaagtgtaaacagatagagggtctccagggattataggaattttacatttaaaggagaaaagtataatatgtaagcaatattttaattactagctcctctaaagaggaatctagtataaatactgtaccctaaactttctagctaaaagagggtataaaacctaaaaaaaaaaaaaaaaaaaaaaaaanaaaa

SEQ ID NO: 19159 - DNA, 387 bp, Homo sapiens
agtacttctagaattaattaaggcgggcgtggtggtacacacctgtagtctcagctactcaggaggctgaggcacaagactctgactcaaaaaaataaaaataaaagactggtggttggcagcatctaggtggcttcaggatggggctggtcaccagaaagaccaagccaggattagaggattgggactttcacccccaccctcaacctccaggaaggggataggggctggaggttaagctaatccccagtggccaatgattccatcagtcatcctatgtaataaagcctccataacaacccaaaggactgggtcagggtagcccggcacagtggtacggtcctgtggtcaggctgcttggcaagctgaggtgggaggatcacttaa

SEQ ID NO: 19160 - DNA, 280 bp, Homo sapiens
  misc_feature 255, 273, 280: n = A,T,C or G
aacaaaagctgggtacccgggccccccctcgagagtacttctagaattaattaaggcggggtttcagaataaggaacacattttgagaaatgttaatttctgaatgagactttttttccccaaagtagctgtgaaaaaaagagcctcaggcataagtcagccagcttattttgtctcaatataaattaaaaattaccctcaccaccacctccaccaaaactgaaataaaaaataaaataagtaaaagtccaaaanaaaaaaaataaataaaanaaaaaan

SEQ ID NO: 19161 - DNA, 305 bp, Homo sapiens
  misc_feature 280, 287: n = A,T,C or G
agtacttctagaattaattaagggcgggtcattatgtgttgtcgtgcaggtagaggcttactagaagtgtgaaaacgtaggcttggattaaggcgacagcgatttctaggatagtcagtaggatgaaacaatttggagaagatagaagtttgaagtggaaaactggaagacagaagtacgggaaggcgaagaaaagaatagagaagatagggaaattagaagataaaaacatacttttagaagaaaaaagataaatttaaacctgaaaagtaggaagccnaaaaaanaaaaaaaaaaaaaaaaaa

SEQ ID NO: 19162 - DNA, 144 bp, Homo sapiens
  misc_feature 22, 25, 29, 30, 44, 49, 52, 67, 68, 113: n = A,T,C or G
agtacttctagaattaattaangancttnnttatcactattatnacgtnttnattgttaagaggaannaaaagaatccttttaaggtcttgctattatagtaggtaaaagtancagttattgattcaccaaggtggttctctag

SEQ ID NO: 19163 - DNA, 202 bp, Homo sapiens
  misc_feature 94, 127, 147: n = A,T,C or G
agtacttctagaattaattaaggcggggaggggggaagggggagagcacacacttcgtcacgcttttggatttctttgtgtaggctaggttcanaaagaaattatctgtttcctattaaacacccanaggattcgctctgaactcangacgtggtcaacaattaacaaaaccaaaaaaaaaaaaaaaaaaaaaaaaaaaaaa

SEQ ID NO: 19164 - DNA, 398 bp, Homo sapiens
  misc_feature 3, 25, 26, 30, 34, 35, 39, 42, 44, 48, 49, 50, 52, 57, 58,66, 67, 68, 76, 77, 88, 91, 92, 100, 101, 102, 103, 104,105, 107, 109, 111, 112, 113, 115, 121, 127, 129, 132, 136,200, 323, 327, 331, 333, 335, 338, 339, 340, 363, 372: n = A,T,C or G
  misc_feature 379, 380, 381, 384, 387: n = A,T,C or G
ganactggccgtcgttttacacccnnaaanaagnnatanccntnattnnngnccgtnnttttccannnagaaaaannaaaaacctttnttnntgggccgnnnnnntncntnnnanaaaaanatatanantantttngcttctcattttgcctaaattggttctgtattcataaacactttccacatagaaaatagattantattacctgtggcaccttttaagaaagggtcaaatgtttatatgcttaagatacatagcctacttttttttcgcagttgttttctttttttaaattgagttatgacaaataaaaaattgcgtntaanatanananaannnaaaaaaaaaaaaaaaaaaaaaanaaaaaaaanaaaaatnnnaanaanaaaaaaaaaaa

SEQ ID NO: 19165 - DNA, 247 bp, Homo sapiens
agtacttctagaattaattaaggcgggaggccagggatgctctgctgagcaccatctgtgtagctagcctgcgtcacccccacccaggaccaactcatacacctcctatgaaaaaacttcctaccactcaccctagcattacttatatgatatgtctccatacccattacaatctccagcattccccctcaaacctaaaaaaaaaaaaaaaaaaaaaaaaaaaaaaaaaaaaaaaaaaaaaaaaaaa

SEQ ID NO: 19166 - DNA, 281 bp, Homo sapiens
  misc_feature 42, 50, 115, 117, 122, 124, 126, 129, 131, 132, 133, 146,149, 151, 157, 162, 164, 165, 170, 172, 173, 175, 176, 179,181, 182, 187, 191, 197, 200, 202, 203, 213, 215, 217, 219,225, 231, 234, 235, 236, 238, 240, 249, 263, 266: n = A,T,C or G
agtacttctagaattaattaaggcgggcagatcacttgcagngagctganatcacgccactgcactttagcctgagcgacagagtaagactgtctcaaaaaaaaaaaaaaaaaantntttcngntntancnnncaaaaattttttnggncnggcccnggggntnnatccntnnannccnannctttngggnggttgnggngnngggttttgangntnanaaaatnaaaacnttnnngncnagggggggnaacccccttttttnttncaattttaaaaaatt

SEQ ID NO: 19167 - DNA, 452 bp, Homo sapiens
  misc_feature 3, 15, 16, 22, 27, 47, 51, 63, 67, 73, 123, 137, 155, 277,340, 432: n = A,T,C or G
agnccttctagaatnnatcaangcggnccatggtgggcggcgcctgnaatnccatctgctcancacngctgangtaggagaatcgctttgaacccggaaggtggagggttggagtgagctganatggcgccagtgcnctcctgcctgggtgacanatagagactccatctaaaagaatttttaaaaattaaaaaggcaaacattaaaaagaaaaaattagataacttcccccaaattacatctaaccagccaataaaagaaaaataaaagttaacangcataaaaaatgggcaaaaaatcctactagacaattgcgggcagtatcacaaaagggacctanattagtgtaataaaataacaactgctaaggaaatatgatatattctaagattataacgcaatcacatatgtgatcaaagatcgtaccattgngttttaatggcccttttatc

SEQ ID NO: 19168 - DNA, 418 bp, Homo sapiens
  misc_feature 401, 402, 404, 406, 409, 410, 411, 412: n = A,T,C or G
agtacttctagaattaattaaggcgggggagaggtggggatggttaatggatacaaaaaaattacaaagaataaataagacctagtatttgctagcacaacagaatggctctagtaaaataatttaattgtacattctaaaataacaaaagagcataactggattgtttgtaacacaaaggataaatgcttgaggtgatgaatgctccatttaccctgatgtgattactacacattgcatgcctgtatcaaaatatttcatgtaacccataaatacatacatgtactatgtgccccaaaaattaaaaattaaaagcatattaaaaaccaatctctttaaatgtttttcatggacattaaaatgtgggaccactggcctatagtttagactcaaaaacgaannananaannnnaaaaaa

SEQ ID NO: 19169 - DNA, 864 bp, Homo sapiens
  misc_feature 515, 529, 539, 542, 559, 596, 606, 629, 631, 644, 659, 678,681, 685, 688, 695, 703, 704, 705, 709, 719, 736, 741, 750,751, 755, 758, 767, 769, 772, 781, 784, 785, 787, 796, 799,801, 803, 805, 810, 814, 819, 825, 829, 831, 832, 836: n = A,T,C or G
  misc_feature 837, 841, 844, 848, 855: n = A,T,C or G
agtacttctagaattaattaagcgggtggaaatcttgtaataaatgcctaaaaatgttttaagcaatttgactgggctctggaaagcattttgtgattctgaactaaaagatggacaagtaaattttatcaattaagaacaaacacccagagactatttctcttatccagaatttatgacaaggtcctgttgttcttattatcagtgatacttataatatggtttcttgggatgagtaatggagtttactccaagaaactcaaagcatttcatacattatttctgtgataaatcaggaaatatgtgaataattattttatgaatatgtattacctaaagttcattaagttcacattttatttttgcattcagaaaatctaattctttacccatcctaaccttttagcaagcaattttgtagtcaccctcaggcaagcaatagtgtagctatactctgggaaacccttcacttcttgaagaaggaaaaagtcttcctgattgaaaattggtggctngggtgaggtggctnacgcctatgnatnccaagcccttttgggangacccaacatggggtgggattgcttggatccccaggnagtttcaagnaacaagcctggggcaaacataantngaggaccctattnttttacaaaaaaatnaaaccaaaatttaggcctnggntatnggngggcaanggcacccnnntggnccctaacctnactctttggaggctgangtatnaaaggattnncctngantgtatggangnccnagggctgcnatnnancttaaaatnacncncnantggcnttcnaaccntggggngaantnnaagnnaacnccntgtncttaaanaaaaaaaaa

SEQ ID NO: 19170 - DNA, 244 bp, Homo sapiens
agtacttctagaattaattaaggcggggtaagatttgccgagttccttttactttttttaacctttccttatgagcatgcctgtgttgggttgacagtgagtattccacagaaagtggtaattatctctctctcttcctccattagaaaattaggtaaataatggattcctataatgggagcatcaccacttattaaaacacacatagaatgaaaaaaaaaaaaaaaaaaaaaaaaaaaaaaaa

SEQ ID NO: 19171 - DNA, 233 bp, Homo sapiens
  misc_feature 103: n = A,T,C or G
agtacttctagaattaattaaggggggcagggacgggtgttagaaaatggccctaattactggattcttgaaacactgaatacactccccctaggaaaaggtnttaaactattatcactcttttaagccttagaaaaactagttaagactgatttctcatcttttattccttctcctcttgctaaaaagaagagattacacatttaaaaaaaaaaaaaaaaaaaaaataaaaa

SEQ ID NO: 19172 - DNA, 164 bp, Homo sapiens
  misc_feature 25, 34, 57, 92, 102, 109, 114, 121: n = A,T,C or G
agtacttctagaattaattaaggcnggtgggganatgactgtgggtcatggatcttntaatatttaaacttaactgttcctgtctgcacaanagataaagtnataagcngccangtttccntaaggagatagtcttgatttgtcttttaacgtttgatcgtacc

SEQ ID NO: 19173 - DNA, 438 bp, Homo sapiens
  misc_feature 29, 30, 34, 36, 37, 38, 39, 40, 46, 47, 48, 50, 51, 53, 54,59, 62, 66, 68, 69, 70, 71, 77, 79, 83, 84, 85, 94, 97,100, 101, 103, 104, 107, 109, 112, 118, 120, 121, 122, 123,127, 128, 135, 141, 148, 156, 163, 166, 173, 175, 177: n = A,T,C or G
  misc_feature 186, 190, 191, 193, 196, 197, 198, 205, 208, 225, 238, 241,246, 327, 328, 329, 402: n = A,T,C or G
agtacttctagaattaattaaggcgggcnnaaancnnnnntacatnnncnngnnatctnacntganannnntgaagnanatannncctgatggnctngcnngnnttntnatnataaanannnntgannaaatgtngctgtngccaccnggggaggnaaaaccnaanctccaancngngcatgctangacnncnccnnncaaagcnaantaatatactcaattganccccccccttggncancggancaaagttaccctagggataacagcgcaatcctattctagagtccatatcaacaatagggtttacgacctcgatgttggatnnngacatcccgatggtgcaccgctattaaaggttcgtttgttcaacgattaaagtcctacgtgatctgagttcanaccggagtaatccaggtcggtttctatctacttcaa

SEQ ID NO: 19174 - DNA, 586 bp, Homo sapiens
  misc_feature 35, 50, 54, 64, 75, 78, 83, 84, 94, 99, 114, 128, 152, 153,184, 186, 189, 195, 209, 263, 273, 281, 307, 314, 325, 329,330, 331, 332, 334, 337, 338, 344, 352, 358, 380, 402, 403,404, 408, 422, 427, 441, 462, 473, 493, 508, 509, 536: n = A,T,C or G
  misc_feature 541, 552, 553, 567, 568: n = A,T,C or G
agtacttctagaattaattaaggcgggcacctgtnaatcccatctactcngganactgaggcangaaaattgctngancccannaggcagaggntgtantgagccgagatcacnccactgtgctctancctgggcgacagagaaagactccnncttgagaaaaaaaaatgcatatatatgtatntnttncccttnctatcccttgcgtncttccttatatgaacctaaggacactctataagggatccttgcattggcattangtagaaggtnggattctnaaactattggtgccttgtcttaaagnggtatanttaaattttanagtnnnntnacnntcaccnctatttgnttttanaacacttttatccccctaaaangtgccattgtgcccatttactnnnaatnacagctccactctnagacntaggcaaccactgnccttttgctttcctatgattnctgggcctttnatataaatggaattatgcanaaaaggaactcttgnnactgctctttcacttagcaaatgtttnggaanttcctccatgnngtggcatgtaccannactttatccttaaaatgc

SEQ ID NO: 19175 - DNA, 202 bp, Homo sapiens
agtacttctagaattaattaaggcgggggatgaagtcaaagtgtacagtttttattagttttctttctgagtgtttgtttatgcagttagtgataagttatcatcagtttaaaataatgggttataagatattatttgcaagcctcgtggaaacctcaaatcaaaaactacaacagttacaaaataaataaataaataaaag

SEQ ID NO: 19176 - DNA, 329 bp, Homo sapiens
agtacttctagaattaattaaggcgggaaggaaggacaaagcggttatgtacaaactgaaaactacataattgaaattaaaacctttgctggatggactcatttgccgaatggaaatgataaaatagtgatcttaaaaggtcaagatcaagatatattatcccatttgaaacagagaggaaaaaagattgaaaaaaataacagacttgcatacctgtgggacaatatcagaaagattaacatttatgtctttggtgtcccagatcaggaggaagatactgctgcagatgaatattgaaaaaaataaaggatagaaactttaaaatttgg

SEQ ID NO: 19177 - DNA, 712 bp, Homo sapiens
  misc_feature 591, 601, 650, 673, 680, 686, 691: n = A,T,C or G
agtacttctagaattaattaaggcgggatttgacataaagccataaaaatatttagtatgaaaatagaaagcctttctctgtgaaacaaacataacatgcaatttcccccaatatatttttatgaaacattttaaacaaacagaaaaattaaaagaattttacagtgaacactcacatgcccactgcctagattctaccattaacattttactatgcttgcttcgtcacatattcctccacttatttatcaataaaaccttcttattttttggatgtatttcaaaataatttctagacagccagaaactttctcctaaaaacagtacttcagaatatatatgttaactggagttcagtatttgtttagagttatgttttattttgaatatacagttaaagcactaatgaggccgggcatggcggctcacacctgtaatcccagtgctttggtaggctgaggcgggtggatcacttgaggttgggagtttgagaccagtctggccaacatggtggaaaccccgggtctacttaaaaatacaaaaagtagccggggtatggtggtgggtggtctgtaatcccagctactcaangaaggctganggcaggagaatcgcttgaacccgggaggcggaagttacagtgaagctgnaaatggggccactggacttctanccggggngacaanagtanggcctgtctcaaaaaaaaaaa

SEQ ID NO: 19178 - DNA, 434 bp, Homo sapiens
agtacttctagaattaattaaggcgggtcacagtttaaaaaaaaaggttgagaaacaccattagtgaatctcttaaaatatggagcccaactgtcatatactgctggcagaaacctcaactagtacaactcttttggaaaggtagctggcacaatttatcatgtatctctaaagtatttatgctctttgacttggtaattccacttctgggaatgtgtcctgaggaaattagcagaggtctgacacacgtatgactcacaaccattctaaccataagagttaaaacctataaacaacctaaatgtccaacaacaacagaatggttacacagagtaaaccactcaatagaagaataagccatttagatggtattttatttaaatggtgtttttaaagacttcgcaatgcaaaaatatttgctttaatgtctttaa

SEQ ID NO: 19179 - DNA, 493 bp, Homo sapiens
  misc_feature 231, 274, 364, 382, 415, 437, 480: n = A,T,C or G
agtacttctagaattaattaaggcgggggagtagagagttagtgtttcgtgggtacggaatttcaacttggaaagacgaaaaaggttttggagatggatagtggtcatggttgtccagtaacataaacacactaaatcccactgaacaatacacttaaaatggtaaatttaatgttttgtatattttaccacaaaaaaagatacaataaaacatacccaccagaacagctnaatatggaaaagagatgaataatcccaagttttggcagggttngtgaagcaactggaactctcagactgttggtgggtgtgtaaatttgtcagtcattctggaacaccgacagtatctactgaggctgagcanctgcaacccatgactcancaatgctactcctaggtatgcactcaatgccancgtgtacatttggtcaccatangacatgaactaaaaatgttcatagcttgcactattcatactancccctaaaactgg

SEQ ID NO: 19180 - DNA, 147 bp, Homo sapiens
agtacttctagaattaattaaggcgggggaattgaattagaacttgattcttgaaaaaagaaattgtgatttttttagacttctttttatgcaaaagtaacgtaacttccattcaacacattttatcccaaaaaaaaaaaaaaaaaa

SEQ ID NO: 19181 - DNA, 694 bp, Homo sapiens
  misc_feature 147, 158, 160, 168, 174, 179, 182, 184, 185, 187, 191, 193,195, 198, 201, 205, 221, 227, 230, 237, 238, 245, 250, 251,253, 260, 266, 267, 269, 276, 285, 286, 287, 290, 295, 297,299, 310, 311, 314, 326, 334, 342, 347, 350, 355, 364: n = A,T,C or G
  misc_feature 372, 376, 381, 398, 418, 420, 421, 422, 423, 434, 442, 443,444, 448, 464, 475, 480, 484, 486, 489, 497, 499, 515, 516,528, 533, 534, 539, 541, 545, 548, 552, 557, 560, 565, 576,577, 580, 584, 589, 590, 594, 629, 630, 632, 634, 643: n = A,T,C or G
  misc_feature 650, 652, 653, 656, 668, 671, 672, 678, 682, 683: n = A,T,C or G
agtacttctagaattaattaacacactttagtaaaaaaaaaaaaaaaaaaaaaaaaaccaaaaaaaaaaaaaaaaaaaaaaaaaaaaaaaaaaaaaaaaaaaaggaaaaaaaaaaaaaaaaaaaaaaaaaaaaaaaggcggccgccnccgggggggancnccaattcnccctanagggngtngnntnaccncncnctnacnggcngtggtttaacaacgtngggacnggnaaaaccnnggcgttncccanntnaatcgcnttgcannanatccccntttcgccannnggngtaanancnaagaggcccgnnccnatcgcctttccnaacagttngcccaccntgaanggnaaaanggaaattgnaaagcgtnaatnttttngttaaaaaattcgcgtnaaattttttggttaaaatcnannnnccatttttttnaacccaannngggnccggaaaattcggggnaaaaaatcccnttttnttanantcnaaaaaagnantttcaccccgaaaaanngggggttggagnggttnntttcnantttnggngaanaaagnagntcccnttttttaaaannaancggngggcnntccnaaccgtcaaaagggggcggaaaaaaacccgttttnntnanggggggganggggccncnnttncggggaaacccnttnncccctnaatnnaaagttttttt

SEQ ID NO: 19182 - DNA, 429 bp, Homo sapiens
agtacttctagaattaattaaggcgggagggacttgccttgtctcagatgagactttggactgtggacttttggattaattctgaaatgagttaagactttgggggactgttgggagggcatgattggttttgaaatgtgaggacctgagatttggaggggccaggggtggaatgataatgatttggctgtgtccctattcaaatctcaactgaattatatgtcccagaattctcacgtgttgtgggagggacttacggggaggtaactgaatcataagggccggtctttcccatgctattcttgtgataagtaagtctcgggagatctgatgggtttatcaggggtttccgcctttgcttcttcctcattctttcttgctgccacattgtaagcagtgccttttgccctctgccatgattatgagacc

SEQ ID NO: 19183 - DNA, 316 bp, Homo sapiens
agtacttctagaattaattaaggcggggattactaaaattatgtcctcttgatatgatgaaatagaaagtatacagaaccttccaggaaatgttccccccaaataataataaataacattaaagttaaactcgactctaattttcagtttacagaaaataaggatgatggaagaacaagctaaatgacaccatagatgctaactggaaaaacgtacctattaaaaaaggacattgctgtgacaatcaggaaaagttgaacataaagtggctatcaaatgatacaataaaattgtcgtcaattttcatagatttgga

SEQ ID NO: 19184 - DNA, 436 bp, Homo sapiens
  misc_feature 78, 79, 132, 145, 146, 160, 202, 214, 225, 230, 241, 259,266, 269, 287, 303, 309, 333, 339, 351, 352, 374, 406, 415: n = A,T,C or G
agtacttctagaattaattaaggcgggaggaaagggagctccctgaccccttgtgcttcccaagtgaggcaatgcctnnccctgcttcagctcgcacatggtgcgcgcacccactgacctgcgcccagtgtntggcactccctanngagatgaacccggnacctcatatggaaatgcagaaatcacccgtcttctgcatcgntcacgctggganctgtagaccgnagttnttcctattcanccatcttggctcctcccnaaagaanggngtctactggtggctgatntttgtcatgcaacttntaattnattagcggcttgaaataaagcagngaaaanaagacaaaagtnnctatcctcatacagattactgnttaataaaattataatgtttgcttttgcaaangaaaacttnaagctgaacaatgaaaatctt

SEQ ID NO: 19185 - DNA, 146 bp, Homo sapiens
  misc_feature 94, 100, 104, 108, 110, 116, 123, 127, 131, 135, 136: n = A,T,C or G
agtacttctagaattaattaaggcggggaaaaaataagacagatatgtagagtattaagtaataacacaataaagacaatgttgaaccacacanaaaaanaatnaagnanaaaaanaaataanaaantganaaannaaaaaaaaaa

SEQ ID NO: 19186 - DNA, 110 bp, Homo sapiens
  misc_feature 31, 39, 41, 44, 46, 64, 92: n = A,T,C or G
agtacttctagaattaattaagggggctccnaccaacananganangagtaactcatactgaantctatgagttcaaaatattacacacatntacccttcccacttgtca

SEQ ID NO: 19187 - DNA, 402 bp, Homo sapiens
  misc_feature 375, 376, 402: n = A,T,C or G
agtacttctagaattaattaaggcgcgatctcgactcactacatcctccgcctcctgggtttaagcagttctcctgcctcagcctcccaagtagctgagattacaggcgcccaccaccacgcctggctaattttttgtgtacttttagtagagatgaggtttcaccattttggccaggccgatcttgacgcctgacctcgtgatccacccacccgtcttggcctcccaaagtgctggaatttacagttgtgagctaccgtgcccggccagtatttacatgttttacacatttatgccgtatctttctcttaaatttttttgatatttctaggctatggtagttcatctgtgaggttttttttaattgttccaaannaaaaaaaaaaaaaaaaaaaaaaaaan

SEQ ID NO: 19188 - DNA, 326 bp, Homo sapiens
  misc_feature 290, 291, 316: n = A,T,C or G
agtacttctagaattaattaaggcgggggatctctctgttagagaacttaacattaccctaggaacagcaagagcatcatcagccccaggaaaatctacctctgatatggagaccaggcttaagaaaatcccctagaacccagagaaaaagtgcaaaacaaggaaaatggccaaagagaatatcatagatacagagatcagacaatgagaatccagagtcttgttaagtgatagaaggaaaatactaacagaacacatgtaacaggaacaacattttagaggaaacagannaaaaaaaaaaaaaaaaaaaaaaaanggcggccgcc

SEQ ID NO: 19189 - DNA, 560 bp, Homo sapiens
  misc_feature 56, 63, 78, 80, 81, 88, 107, 111, 138, 139, 142, 144, 149,153, 174, 182, 186, 187, 192, 195, 208, 214, 216, 217, 218,221, 226, 228, 230, 232, 233, 234, 243, 244, 252, 259, 264,265, 268, 276, 282, 288, 293, 294, 301, 302, 304, 306: n = A,T,C or G
  misc_feature 308, 309, 321, 322, 323, 325, 331, 333, 334, 337, 343, 346,353, 355, 364, 370, 371, 373, 374, 377, 381, 386, 410, 411,413, 420, 423, 435, 436, 438, 440, 451, 452, 453, 454, 459,464, 465, 466, 467, 481, 483, 484, 486, 493, 501, 504: n = A,T,C or G
  misc_feature 505, 506, 513, 529, 537, 540, 551, 552: n = A,T,C or G
agtacttctagaattaattaaggcggggtttattatgccactttcttccgatctgnacctganagggttgggggaaanannggcaaanggggataaaaagattttgngtcnaccaaaaaaaaaaaaaaaaaaaaaaannaancnaaaanaaanaaaaaaaaataaaaaaaaggngggccccncccnnggggngcnccaattccccctntagggngnnngtnttacncncncnnncatgggcgnngtttttanaacctcnggacnnggnaaaacccngggttncccaanttaanntccttgnngnananncccctttttccnnnangggggntnnatncaaaanggncccaccnanagccctttncaaaanntnnccncccntaatngtggaaaagggaaaatttaacccnnanatttttnttnaaaaaaaatccnntnanaaattttttgnnnnaaaanaaccnnnntttttttttacccncnnangggcccnaaaatttnggnnnaaaaatnccctttttttatattnaaaaaaanaanttttccccccnnataggggg

SEQ ID NO: 19190 - DNA, 826 bp, Homo sapiens
  misc_feature 358, 564, 567, 573, 588, 613, 622, 691, 692, 699, 709, 719,725, 737, 742, 746, 752, 758, 765, 766, 771, 780, 781, 785,789, 791, 796, 801: n = A,T,C or G
agtacttctagaattaattaaggcggggaattaaactgtgtagttctttttcccatctgatatttacaatctcttcactgggtcatactccacagctattttaccactttctgaaataaagttagcaaggatcaattcagaatctttttcattctaaaacttcctgcatatactggtcgcaccccacaatgagacattcttttggtttctaaaagcagaaaataagatgtgatgattaaatgaaataatggccagatcttggttcacattccacacaacagggaaccacgactctagggaatgtggctgattcccaggctgtagcaggaaagggttatgaagatcaagtctggattcntgttgtaccagaaattttaaaaatgctcaaagtatggattggggcatgtcaaatggacacaagagctagctcaaagaggcactgactggccagatctttgggacaatattttttggtaacaagcttttattgagatataattcatgtattcataccaatttaattcccatttaaccgtgtaccaaattcaaatgggtttttttagntantatttngcagaagtttattgncaaacttacccacccttcacttcangtttttagnaaatatttttcaccccaatcttaaaaacaaaaacccccattttagcaatttacttggccccacccccgnnttccttnccaaatggcntgggtaaacnacctangtctaccttttntggtntttntggggnttttgnccttacnnttggnacaatttcnntatnccantnggagnttccnttaaaaaaaaaaaaaaaaaaaaaaa

SEQ ID NO: 19191 - DNA, 273 bp, Homo sapiens
  misc_feature 20: n = A,T,C or G
taattaaggcgggggctgtnagccaaaaagttcccgaagttcacacaggcctgggagatgttcacgttttgaaaagcaaaaagcgaagaggccttgttgagcacctgggcattttgtagagatcggagaaggactgtgcctcagtcttaggactaaactagccccagaggaaagactacccttgatttaacctaactgcttaaaaataagcctttaaaggacaaagctgatccacaagtaactggactgtctgccagagaaagtccaaaatct

SEQ ID NO: 19192 - DNA, 459 bp, Homo sapiens
  misc_feature 397, 435, 455: n = A,T,C or G
agtacttctagaattaattaaggcgggaggtcaagttggtcaggggagaatgaatactggccgtatttcagtggcccccacagatacacagagtttggcaaacagaacaaagcatatgtaccaacaatgcatgtttatattctgtgccatgccaggggcaaattcatagttggcctgtttccataagtgtggggatggaaccttgaaacacaggacatctcataatgctgtaagcagggaccattgaaattgattcctagagtcttgttctacaacttctttaaaaattactgatttgacagcagtatgtattcaacatttaagactttctgtctaattttgagcatacattcttgactaaggctagcaattagagattctttctttaatttatcanatatctattaattgtctacttttgagtgggctcttgtncaaggcgcttaaaaaaccanttta

SEQ ID NO: 19193 - DNA, 345 bp, Homo sapiens
  misc_feature 28, 33, 35, 41, 43, 45, 51, 52, 62, 68, 69, 70, 71, 72, 84,85, 86, 95, 99, 104, 105, 108, 109, 111, 135, 142, 144,150, 167, 193, 205, 206, 217, 220, 234, 240, 247, 256, 270,272, 291, 333, 335, 336: n = A,T,C or G
agtacttctagaattaattaagggggangctgnangtctgnananaccaanncaatgctccnccatcnnnnncctacttcattnnntatcacaangatntctgnngtnncntacccccaaaggaattggagaatnccagttntngtgttnctaaagtgaaaggcggngagatggagtgtctggtaaagggcancaaggggttctnnacgatagactntgncctgcagatgttcntttttntcattancaccacttnctgctaattaattngncacaaactatctcattganttattgctgtcccgtagaagaatggaatacttggggaagaanannaaaattgaa

SEQ ID NO: 19194 - DNA, 263 bp, Homo sapiens
  misc_feature 17, 23, 41, 67, 74, 93, 116, 170, 177, 181, 186, 187, 256: n = A,T,C or G
taccgggccccccctcnagagtncttctagaattaattaangcggggtgatggacgcagtggttaantgctgantacggtagtaataagccangaggttctgaacacatagcacangcccagttctactaatccgctcatcattagtgaagggaattagttagcttccanaagtcanccanacttnnattcttccggccctctccctaacgtctccttctcccaccccaaacctgctaattgtggttaactttttncctttat

SEQ ID NO: 19195 - DNA, 362 bp, Homo sapiens
  misc_feature 106, 111: n = A,T,C or G
agtacttctagaattaattaaggcgggggagccggtgccctgggatcatggtggcgttgcggggccttggtagcggcctgcagccctggtgtccgctggatcttanactcnaatgggttgacacagtgtgggaactggatttcacagagactgagcctttggatcccagcatagaagcagagatcatagagactggattggctgcattcacaaaactctatgaaagccttttaccctttgctactggagaacatggatctatggaggtaaaaatataaaaacaaactagccaaagtttggtgttagaagtagaagatgaaagtcattattataatctgaagcttagctttcttggtggacaa

SEQ ID NO: 19196 - DNA, 131 bp, Homo sapiens
  misc_feature 47, 52, 53, 60, 68, 71, 72, 73, 78, 79, 81, 86, 88, 89, 90,92, 101, 109, 128: n = A,T,C or G
agtacttctagaattaattaaggcgggatgagagagaatattatttnagggnngtcgtantagaaaangtnnngtttnnancaccngnnntnaaatacaangtgcgcanattacttaatgaaaaaatnatg

SEQ ID NO: 19197 - DNA, 218 bp, Homo sapiens
  misc_feature 101, 104, 137, 142, 189, 191, 206: n = A,T,C or G
agtacttctagaattaattaaggcgggggggttgggagctgaaccatccccacctcagggttatatttccctctcccctttcctccccgccaagagctctnccnggggcgggcaaaaaaaaagttaaaagaaaaganataanaaaaaaagaaacaaaccacctctacatattatggaaagaaaatattntngtcgattcttattcntttataattatg

SEQ ID NO: 19198 - DNA, 108 bp, Homo sapiens
  misc_feature 99: n = A,T,C or G
agtacttctagaattaattaaggcggggggggggagattcttaatctcatcacaatactgcatgtattacaatataaattttaaaataaattctagcangactaaata

SEQ ID NO: 19199 - DNA, 351 bp, Homo sapiens
  misc_feature 325: n = A,T,C or G
agtcttctagaattaataaagggcgggggtaggagttgactacaaaagggcctggagagttttaggggggtgatgcaactatatttcgattgtggtagtggttcactcctgtatatgtttgtacaaactcacataactaaaactataaagagtgaactttactatatgtaaatgtaccctaattgttttgaaaaatgaaggtaaaaagttaagaaaatacttttttaaaaaaaacctttgagatatgctgtaggtagaagaaactgcactccccaacctcttttttgttttcctctttttttttccccctgaaacagtcttcacntctgtttcaaaaaaaaaaaaaaaaaa

SEQ ID NO: 19200 - DNA, 241 bp, Homo sapiens
  misc_feature 7, 17, 73, 139, 235: n = A,T,C or G
ctgggancaggggcttngctttgtcactgctgttccccagggccagactaacacacagtaggtgctccataantgtttcttgaaaggatgtttggagggatggatggatggatggatggatgggcaggaaattatatanacgggggcaaactgccaaaggctacagtttagttggcagcaaaaaaaatcgtttctgagaacgcatcccactgaatttagaataaaagccaaactnttaaga

SEQ ID NO: 19201 - DNA, 344 bp, Homo sapiens
  misc_feature 8, 53, 58, 62, 71, 73, 75, 90, 92, 95, 98, 100, 101, 102,116, 117, 132, 214, 291, 297, 323: n = A,T,C or G
aagggaanaaagctgggtccgggccccccctcgagagtcttctagaattaatnaaggngggnggggaaatnanancctaagacacaaatncntgncangnnntaatgtatagaccnngaatcctatgcctgngtggtgtgcctcagtatatttaaactcaagacaatgcacctagctgtgcaagaccctaggtgctcttaaggcctaaatgccntagaaatgtaaactgccatatataacagatacatttccctctttcttataatactctgttgtactatggaaaatcanctgctnaagcaacccttttcaccctttgtgtnttttttcaataataaaaaata

SEQ ID NO: 19202 - DNA, 322 bp, Homo sapiens
  misc_feature 9, 160, 290: n = A,T,C or G
ttaattaangcgggagttatcagactgagaactaagtttgcctactgcattaaaagaaacaaatgactagattgaaatttttgtcaaagaattagaaactatgccaaaaaaaagctaaatggaagttgtagaactgaaaaatacattagttaaaattaanacatcagaggatggattgtacactgccagagagagaatcggcaagctctaaagaaactaaagtaaaataaggataatgaaaacagtagaaaatagaaaagaggtgctaagaaatatagagattacagtgnagatggtcaaacatcatgtaattggagtccca

SEQ ID NO: 19203 - DNA, 193 bp, Homo sapiens
agtacttctagaattaattaaggcgggggtggacagggaggcagcttgtgaatttttgttttactgtttaactttattaaaaaagaaaaaaaaaaaagagaataaaatgttttgacccttcctgaaaaaaaaaaaaaaaaaaaaaaaaaaaaaaaaaaaaaaaaaaaaaaaaaaaaaaaaaaaaaaaaaaaaa

SEQ ID NO: 19204 - DNA, 275 bp, Homo sapiens
  misc_feature 187, 190, 215, 216, 233, 251, 253, 254, 260, 261, 265, 266,267: n = A,T,C or G
tccgggccccccctcgagagtacttctagaattaattaaggcgggggagtgactttttaaagagacacttataatttctactactgcactactgtccattgtgggatgattaaacatggtatttaactgtgaaaaaaaaaaaaaaaaaaaaaaaaaaaaaaaaaaaaaaaaaaaaaaaaaaaaaaanaanaaaaaaaaaaaaaaaaaaaaaaaannccccccccccccccccngggggccccccccccccncnnaaaaanngagnnncccccccc

SEQ ID NO: 19205 - DNA, 557 bp, Homo sapiens
  misc_feature 6, 18, 31, 53, 55, 58, 67, 69, 76, 165, 265, 309, 314, 351,371, 372, 397, 398, 418, 424, 461, 466, 471, 479, 487, 507,515, 519, 526, 533, 534, 542, 543, 545: n = A,T,C or G
tgggtnccgggccccccntcgagagtttttntagaattaattaaggcgggtgngntgnttttaaaanangagttcnccaccagcctgggcaacacagtgaagctgcctctgcacaaaccttaaaaattagctaagcatggtagcctgtgcctgtagtcccagctnttcaggaggctgaaggggatggatccattgaacccaggaatttggggcggcagtgatccgtgattatgccactgcactccagctgcctgggttacaaggngagacactgtctctaaaaaaagaaagaaataggccaggcgcggngcctnacacctgtaatcccagcacttttgggaggcccaggcngggtgggatcaccttgaggnnaggagtttgagaccagtcctggctnnacatgggagaaaacttccgncttttncttaaaaaataccaaaaattaagcccggggcatgggnggggngccantgccctgntaaattcntaagcttactttcccgggangtcttgangggnagggganaaaattnnggggaagnngncctttggaaccc

SEQ ID NO: 19206 - DNA, 382 bp, Homo sapiens
  misc_feature 18, 92, 101, 118, 132, 161, 234, 247, 281, 301, 335, 347,348, 350, 358, 359, 361, 371: n = A,T,C or G
accgggccccccctcganagtacttctagaattaattaaggcgggacgtccttaaggatgtactgctcccatggtacaatgcctatcgcttnttaatccanaacgttctgaggctccngaaggaggaagaantatgaatttctctacaatgagaacacggntagagaaagccccaacattacagaccggtggatcctgtccttcatgacatatctctcattggcttcttttganacttgaaatggcncggtgagcctcttcttggtctggcctcccagganataagggactattctctttngtaacttgccgccttttgatattttaataggcgngaaaaatattgnngnagatacannanaaatttactntaaatttgttt

SEQ ID NO: 19207 - DNA, 418 bp, Homo sapiens
taaaggcaacagtttttatacttcactcaaactttatgtattaatgtaatccataaagcaaccaaaaaagctatactaagtacattcaaaaacacaatagataaaccaaacaaaattctaaaggatgtacaagtaacccactggaagctgcaaaaaatgtaaacagaaactaaaaacagagaataaatgaaaaattaaaaacgaaatggcagacttaggccctaatatacaaattatcacattaaatataaatggtctaaatacaccaactgtaagacagagattagcaaagtcgatttaaaaacatgactcaactacgtgctgtctacaagaaactcacttcaaatataccaagataggaaggttgaaagtaaaaccgatggaaaaagatgtatcatgtgaacattaatcaaaggaa

SEQ ID NO: 19208 - DNA, 225 bp, Homo sapiens
  misc_feature 98, 151, 158, 171, 201, 202, 203, 206, 207, 208, 209: n = A,T,C or G
agtacttctagaattaattaaggcgggtgatggtggccaaggatgctggagctgaatcagacgctgacagttcttcaggcatttctatttcacaatcnaattgaacacattggccaaataaagttgaaattttaccaccaaaaaaaaaaanaaaaaanaaaaaaaaaaaanaaaaaaaaaaaaaaaaaaaaaaaaaaaaannnatnnnnataaaaaaaaaaaaaa

SEQ ID NO: 19209 - DNA, 235 bp, Homo sapiens
  misc_feature 118, 195: n = A,T,C or G
agtacttctagaattaattaagggggatcttgtaagctgaacccttcaaaaaaaaagagcaataaaaataaaaataaatccttataatatatgtcaatgagatatatatgtacataanaattgttcattaaataagtttatggatcactggtagatcgtttataatcaatttctttgttttcaaatttcattaanaaacctcagtcaggaactgaaaaaaaaaaaaaaaaaaaaa

SEQ ID NO: 19210 - DNA, 236 bp, Homo sapiens
  misc_feature 25, 42, 43, 46, 52, 84, 101, 135, 137, 157, 175, 178, 179,204: n = A,T,C or G
ttctagaattaattaaggcgggcgnggtggcaggtgcctgtnntantgtctnactggttttttaataaatccttttgttttggncaaaaaaaaaagaaatnaattctactattgctaggtgtgagaaagtggtgnanaaaaccttaaagcagtgganatttgctacctggtctgngtnntgaaaaaaagccccttagaaagttnaaagaatgtaggaaaagatactcagtcttaat

SEQ ID NO: 19211 - DNA, 710 bp, Homo sapiens
  misc_feature 505, 525, 647, 649, 660, 692: n = A,T,C or G
cccccctcgagagtacttctagaattaattaaggcgggaggatcacttgagcctaggaagtcaaggctgcagtgagctatgattgcaccactgcactccagcctgggcaacagaacgaggccccaactcattttatataaaggacttgagcatcctggggttttggtggaggaggagagttgtggaaccaatccttgaggatattgagaattggctgtaatttgaataaaatctttagttaatagtattacgcacatgtcaatttcctggttttcatcattgtactaggattatataagatgttcttggggaaatataatttaagacaaaaattcctgccacaacaaaaaacctctccattaaagtagaagagaaaaaaacaattttagtatttgaaaacctatcagaccagaatgtgatgtgcattacaggcaatctgctaaagaagattgcaaagacaacctaaccctcacccctggaaggcagaggttgcagtgagcccganattgcgctactgcactccancttgggtgacggagtgagactctgtctcaaaaaaataaaaaacactcacccctttatataaccaggcagatgccacccatgtcatacatgttttcaagataaacaactagtcctcaaataanangacttccagcncccctgtcacctgcgaatcggagtagtcaccnggggtttggtaattggct

SEQ ID NO: 19212 - DNA, 204 bp, Homo sapiens
  misc_feature 184: n = A,T,C or G
agtacttctagaattaattaaggcgggatctgttgtagctttgtctttttctttttcttttcattacatcaggtatattgccctgtaaattgtggtagtggtaccaggaataaaaaattaaggaatttttaaaaaaaaaaaaaaaaaaaaaaaaaaaaaaaaaaaaaaaaaaaaaaaaaaaaanaaaaaaaaaaaaaaaaaaaa

SEQ ID NO: 19213 - DNA, 351 bp, Homo sapiens
  misc_feature 60, 179, 269, 287, 329: n = A,T,C or G
ggtaccgggccccccctcgagagtacttctacaattaattaaggcggggaattattgtanttttgtttatttatgaatactaagtttatttcagtgtataactgttaatttctttgattatgggttgctgactgatatggtttggttgtgtccccacccatatctcatcttgaattgtngctcccataattcccacatgttgtgggagggacctggtgggagataactgaatcatggtggtgggtctttcccatgctattctcatgatnatgaataagtctcagaanatctgatggctttataagggggagtaaatttccctgcacaanttctcttatcttgtctgctgcc

SEQ ID NO: 19214 - DNA, 311 bp, Homo sapiens
agtacttctagaattaattaaggcagggaaagctttaggtcatgatgcagacctgacagaatcttggccaacaaaatcggggagctccagagcaaagactgcctgttagaggaatcttgcatgcacggaaatgctcctgcagagctagatcactaggcactgcccaggaaaagcatggccttggcttgaaagctgaggcagatcctgcagagggaacagctggaggctgtcagctcactacaccatttacagctgaacaattgttttcttgaagggacaactgaataacacatttccatacctgccactgg

SEQ ID NO: 19215 - DNA, 412 bp, Homo sapiens
  misc_feature 201, 206, 253, 265, 280, 286, 288, 330, 342, 351, 352, 360,367, 368, 378, 384, 398: n = A,T,C or G
aagtacttctagaattaattaaggcggggtgggcttggaacacaggtgtgtacagcgtgctgtagtggaagttttgtatcatagtaatcctgtttccactttgttatactctagccaagattgactgtattagatgaaatgtgaggatcttgttcaatcggaaacccccgttacctcctctttttctttctctttcttttnttttnttaacttaaccatttttatgaggattcaaatggaaattgttctttcntccctttaatgnggggtccagaccttnacctgncntaatctacttttaaaattaaaaaactaacccttttttaaaangggggggggggnggaaattcnntttaaccnttttccnnaaaaaaaagncttggnaaaaaaaaaaaaancccctttttttaaa

SEQ ID NO: 19216 - DNA, 342 bp, Homo sapiens
  misc_feature 169, 170, 171, 173, 182, 188, 194, 198, 203, 205, 206, 207,208, 209, 210, 211, 212, 214, 215, 216, 217, 219, 228, 229,230, 232, 243, 250, 252, 254, 255, 259, 260, 262, 267, 273,282, 291, 292, 294, 297, 301, 302, 304, 315, 317, 328: n = A,T,C or G
  misc_feature 329, 330, 335, 341: n = A,T,C or G
agtacttctagaattaattaaggcggggcatagtggctcactcctgtaatcccagcactttggaggccgaggcgggtagatcacctgaggttaggagttcaagaccagcctggccaacatggtgaaaccccttctctactaaaaaaaaaaaaaaaaaaaaaaaaaaaannngnccccccccngggggnaccccnaatnccccntnnnnnnnntnnnntnacccccccnnntnggccgtttttnaaaaaangntnncacnnanattancctgtncttatattngacattctnnantgnctgnngnttacctaccgnanctttttaccgnnnacttncccttnc

SEQ ID NO: 19217 - DNA, 475 bp, Homo sapiens
  misc_feature 152, 158, 180, 182, 183, 184, 185, 201, 207, 209, 217, 218,222, 223, 230, 231, 243, 247, 249, 250, 256, 280, 320, 326,328, 331, 335, 341, 345, 353, 364, 367, 383, 389, 395, 401,404, 407, 408, 409, 410, 413, 417, 418, 422, 423, 424: n = A,T,C or G
  misc_feature 427, 429, 439, 441, 442, 444, 446, 449, 450, 452, 454, 455,456, 457, 458: n = A,T,C or G
aagtacttctagaattaattaaggcgggaagccacaagcagactgacaacgtttctaggatcaggtgagctgtgtccagaaaaccaacgagaaggagtggaaggaggaatgaacgtttcgttctcgttaataaaggcattatcctaattaanaaaaanaaaaaaaaaaaaaaaaaatgancnnnncccccccccggggggncccccnancccccctnngagnnatttttnnaccccccccccngggncnntgtttnaaaaataggaaagagaaatgaatntgggaggattcaagttcaataagactttatgctccatganaggaananttncctnttacanaatnttgatttnaaaaggcaaanatntttactacttatgctncctganaggaanattttnctnttnnnnaantttnntttnnnaangnaaaaaatttncnncntnaannantnnnnnaaaaaaaaaaaaaaaaa

SEQ ID NO: 19218 - DNA, 344 bp, Homo sapiens
  misc_feature 343: n = A,T,C or G
cccccctcgagagtacttctagaattaattaagtcggggaacatctgaagaaataatggctaaaaagttcccaagcatgatgaaatacgtgaatctacacattccaaaatctcattgaattcatagtataaactcaaagaactctacaccaagacaaattacaataaaactttcaaaagctaaagagacaactttgaagaaagttatggagaaaagactactatttgcaatgcatctacactgacattaacaactcactaaaaactagagtccagaatataatttctcactaaaaactacggagtccagaatatgataggacaatatatttaaagtgtagaang

SEQ ID NO: 19219 - DNA, 211 bp, Homo sapiens
  misc_feature 2, 21, 26, 31, 43, 44, 48, 49, 59, 60, 70, 75: n = A,T,C or G
anactggccgtcgttttacanccggnaatanggggaacctttnntggnnggcgggcccnncctcgagagnacttntagaattaattaaggcgggtcagaaaaaatattcatttggtaccccagaagaaaaccaaacaacgaaacagaactaatatttaaaactgtaatccaagaaagcattccagaaacaaaaaaaaaaaaaaaaaaaaaa

SEQ ID NO: 19220 - DNA, 378 bp, Homo sapiens
  misc_feature 215, 216, 224, 225, 230, 231, 232, 234, 238, 242, 247, 249,252, 253, 258, 264, 265, 269, 270, 276, 279, 280, 281, 284,287, 290, 294, 303, 304, 305, 307, 311, 319, 323, 325, 328,333, 336, 339, 340, 344, 348, 349, 350, 353: n = A,T,C or G
agtacttctagaattaattaaggcgggctgacatttcaagtcattacagaagtaaaaaacgaaaacaaggcccagagctgtggctcatgcctgtaatcccagcactttgggaggccgaggcgggcagatcacgaggtcaggagatcgagaccatcctggctaacacggtgaaaccccgtctctactaaaaatacaaaaaaaaaaaaaaaaaattnncccggccnnggggnnngncccntttntcccnanttnntgggngggttnntccnnaaaaanggnnnaanccnggngggnaaattttgnnngnaccnaaaatggncccntngcnttttnccnggnncaanaaannnaantttttttttaaaaaaaaaaaaaaaa

SEQ ID NO: 19221 - DNA, 499 bp, Homo sapiens
  misc_feature 392: n = A,T,C or G
agtacttctagaattaattaaggcgggcatagaagagactgacttttttattagacttttcgttatttgcttttaactagagaaaattaagtttttaaaaattaccaaaaaagcaatgtaattacctgtcaaacttttgactcaccctggcagtaattgttccgtgcttttctcctctgttgtttatcatccgaatcccagccgactgaaacatctccttcatttgagtaggggtagcaagtggtggcaaaatctatatcctgaggctttactccatttaataaatccctcactgctcctcctgctattcttaattcgtgattctctttgacaaataattctgagatgaggagaaaataagatttttattcccaagttctttatttcaatgngtttattttaaccacaaaagtcaaggcttttccatctagttggaacagcagagattctttaactgagcttttcattatgaaaaatgagaaccaggccccaagaagta

SEQ ID NO: 19222 - DNA, 435 bp, Homo sapiens
  misc_feature 18, 19, 48, 60, 72, 90, 99, 151, 175, 179, 182, 198, 203,214, 240, 255, 275, 278, 299, 301, 320, 324, 330, 350, 358,364, 367, 384, 386, 387, 397, 402, 404, 415, 417, 422, 433,435: n = A,T,C or G
taccgggccccccctcgnnagtacttctagaattaattaaggcgggcngatcgtagaagncaggagatcaanaccatcctggctaacacngtgaaaccngtctctactaaaaatacaaaatattaaccaggtgtggtggcatgcacctgcngtcccagctgattgggaggctgangcanganaatcacttgaacccangaggnggaggttgcantgagctgagatcctgccactgtactncaacctgcgcaacantgagactctgccccaactgnatnttgaatgtttaaaaaagtatncnggcccccccggggggagcnaccntttgcnctttttattggctgtatttncccccccnccatgngcnattttttttaaaaatangnnaaactgaacnacttntnggaaaggtctntncacanggcttgttttncn

SEQ ID NO: 19223 - DNA, 560 bp, Homo sapiens
  misc_feature 8, 211, 512: n = A,T,C or G
agtacttntagaattaattaaggcgggagccttggggcagtcccagggcgccgtgaagaggtgacggagggctggctatgggcggccggccggggtgggggacgagcgccgggttccgtccaagccctgttgaagcaggaaacccctacgactctcggcgaagaacgtctctcatcagagactcttaatagcagagttgaccaagcagaanaattggcgagcttgacgacaggctatttgaaatatccactcagagataataaaagaaaaagcatgaagcatgcctacaagatctagaaaatagcctcaaaagggcaaatctaagagttattggccagtagagagagagatagcagagtagaaagtttattcaaagggataatcacagagaacttcccaaacctagagaaagacatcaatattcaagaacaagaaagttatataaaaacaagcagatttaaaccttattaaataagactacctcaagacatttagtaatcaaacttcaaaangttgagaataccagaaaggatcctaaaagaaagccaggagaataaaaa

SEQ ID NO: 19224 - DNA, 288 bp, Homo sapiens
  misc_feature 128, 136, 154, 160, 175, 179, 181, 183, 190, 198, 200, 219,237, 248, 250, 265, 267, 275, 280: n = A,T,C or G
agtacttctagaattaattaaggcggggagaggaggctctcaataaataatcgtgtaaccttaaaaaaaaaaaaaaaaaaaaaaaaaaaaaaaaatatatactaaatgtttttaaaaaaaaaaaaaantttctacnatctaaacacaatcattntccccncccgtaaaaaaaatnttanantngaataanaattcctnanttatggaaaggcccccccnaaacatattaaaggaccnttccccccttnantagggtttgaaaacncncccccccnttggncttcctta

SEQ ID NO: 19225 - DNA, 252 bp, Homo sapiens
  misc_feature 2, 30: n = A,T,C or G
angtacttctagaaattaattaaggcgggnagcagcgtgtgggggcccccgccacccccagagctagtctcagaccaggaagggagctgggcaccagagaagcgacatcacgtcggcacctgtaactcccgggatccgtaattgggccccgctccacccagcctgcgccactgtgttcttctcttaagaggcttccagagaaaacggcacaccaatcaataaagaactgagcagaaaccaaaaaaaaaaaaa

SEQ ID NO: 19226 - DNA, 378 bp, Homo sapiens
  misc_feature 134, 140, 159, 170, 173, 174, 177, 182, 184, 186, 189, 190,196, 198, 199, 200, 205, 207, 208, 211, 213, 221, 222, 224,227, 241, 248, 251, 252, 254, 255, 260, 262, 264, 268, 269,273, 275, 280, 284, 290, 296, 297, 298, 304, 308, 310: n = A,T,C or G
  misc_feature 312, 320, 321, 336, 337, 346, 351, 362, 363: n = A,T,C or G
agtacttctagaattaattaaggcgggagaatcgctttaacctgggaggtggaggttgcagtgtgccgagatcacatcattgcactccagcctgggcaacaagagtgaaattccatcttgaaaaaaaaaaaaangggttnaaattaaaaaattaaaaanccccaaatttntgnnggnaaatntnanttnntttttntnnnaaaantnnatngngaaaatanncnccnttttaaaaaaaaantaaaaanttnnannccccntntnaatnntttnanttaantggncttttntaaaannntccccnaaanantnggaaaatnnttttttttttaaaanncccttaaanttttncccaaaatggnncccttccaaaatttt

SEQ ID NO: 19227 - DNA, 437 bp, Homo sapiens
  misc_feature 429: n = A,T,C or G
agtacttctagaattaattaaggcggggtagtttatttatatacattttcttgaatgtagatttatctaatttttaaaaccttaaagttaatagtgaattcttcatttttaccagagttcattttaaacatgtttgtttaggttttactgcaatcacagcaaccaaccccatttggcttataaagactcggttacagcttgatgcaaggaaccgcggggaaaggcgaatgggtgcttttgaatgtgttcgtaaagtgtatcagacagatggactaaaaggattttataggggcatgtctgcttcatatgctggtatatcaaagactgttatccattttgttatttatgaaagtataaaacaaaaactactggaatataagactgcttctacaatggaaaatgatgaagagtctgtgaaagaagcatcanattttgtg

SEQ ID NO: 19228 - DNA, 661 bp, Homo sapiens
  misc_feature 255, 269, 270, 276, 300, 307, 308, 309, 310, 311, 312, 313,314, 315, 316, 317, 318, 319, 320, 321, 322, 323, 324, 325,326, 327, 328, 329, 330, 331, 332, 333, 334, 335, 336, 337,338, 340, 351, 372, 374, 390, 399, 409, 413, 424, 440: n = A,T,C or G
  misc_feature 445, 451, 452, 454, 486, 488, 504, 506, 507, 515, 520, 527,528, 599, 617, 625, 632, 646, 648: n = A,T,C or G
agtacttctagaattaattaaggcgggtggatcatctgaggttaggagttcgagaccagcctggtcaacatggaaaaaccttgtctctaacaaaaatacaaaaattagctgggaatggtggtaggtgccggtagttccagctactggagtggctgaagcaaaagaatcacttgaatcagggaggcagaggttgcagtgagcagagatcacatcactgcactccagactgggcagcaaagcaacactgtccccaanaaaaaaaaaaaaannaaaaanaaaaaggcggccgccacccgcggnggagctnnnnnnnnnnnnnnnnnnnnnnnnnnnnnnnncnccctcactggnccgtttgttttacaacgtttntnactgggaaaaaacctngggcgtttncccaactttnaatngcctttggagnacaatccccctttttnccaanttggcnntnatagcccaaaaaagggcccgcaccccgaattngncctttccaaaaaaaantnncccaaaanccttnaatgggnnaaatgggaaaaattgtaaaggccgttaaaaattttttgtttaaaaatttccccggtttaaattttttttgntttaaaacaagcttcaantttttttnacccaantagggccccaaaantngggaaaaaaatcc

SEQ ID NO: 19229 - DNA, 167 bp, Homo sapiens
  misc_feature 1, 94, 101, 123, 133, 148, 162: n = A,T,C or G
naagtacttctagaattaattaaggcggggaatgctttcttgttctttattcatttgctcacatacttattatttaatttggcctttttttttnccatcanaaatttcctgagtcctttcagngtcaccaagngctgggattacaaanatagaggagttcgngcttt

SEQ ID NO: 19230 - DNA, 298 bp, Homo sapiens
  misc_feature 23, 25, 37, 60, 115, 201, 212, 224, 267, 284, 294: n = A,T,C or G
ggtaccggggcccccccttcggngntactttcttagnaattaattaaggacgggccagcntggcaaatttcagggagcatgcagagaatattcactaaggatactccatggagcncatcaatcccaaggacacatagttcatcagtatttcttccaacattggaaatggaagggaaaaaatgtaaaggggcaacttagganaggaaaggccngggtcactttantaaaagggaagcccctcaggactaacaagcagaccctttttancaaaaaacttttcaagnccagaaaaanaatt

SEQ ID NO: 19231 - DNA, 372 bp, Homo sapiens
  misc_feature 353, 354, 355, 356: n = A,T,C or G
agtacttctagaattaattaaggcgggccatcaaaggaacgtaattccctagtaacacactccaatgggaaaaaaacttaatgaattgccagaaaaggaattcaaaattatgatcgtatggaaactcagagagatacaagaaaacgtgtagacaatcaatagagttggggaaacagttcacaatataaacaggaaattgaataaaagagaagtaagaatcaaatcctgcagctgaagaattcaatgaatgaaaaaacatacagtggagaatttcagcagcaaacttgatcatatgtaagaaagaatctctcaacttgaagataggttatttgaaattaacaagtcagagattnnnnaaaaaaaaaaaaaaaa

SEQ ID NO: 19232 - DNA, 277 bp, Homo sapiens
  misc_feature 112, 116, 117, 118, 124, 135, 137, 140, 143, 157, 161, 163,170, 181, 189, 190, 195, 205, 206, 216, 222, 223, 227, 228,233, 235, 236, 240, 243, 248, 261: n = A,T,C or G
agtacttctagaattaattaaggcgggcagatcacgaggtcaggagatcaagaccaatcctggctaacacggtgaaaccccgtctctactaaaaatacaaaaaaaaaaaaanttannngggcgnggggccggccncntgnggncccggttgttttgnaggntnaggcagnaaaatggtgtnacccaggnnggcgnattttgcagnnacccaaaatngccccnntgcnntccantnngggntanaaagngaaactccttttngaaaaaaaaaaaaaaa

SEQ ID NO: 19233 - DNA, 224 bp, Homo sapiens
agtacttctagaattaattaacttagtgacaccaccaagtgttttgatataactaaatttgtggtaataagactgtctgcacctgtattcattgtggaacttcctctttcattggaaactttcttactcaagaatgacggcagtattgttttcttatatgtgcaatgaagtggaatgataaacagtatgcctttaatttaaaaaaaaaaaaaaaaaaaaaaaaa

SEQ ID NO: 19234 - DNA, 377 bp, Homo sapiens
  misc_feature 1, 13, 31, 32, 39, 42, 52, 54, 76, 85, 98, 101, 105, 125,155, 161, 162, 172, 175, 196, 199, 202, 210, 216, 271, 291,334, 340, 343, 345, 347, 357, 358, 359, 360, 361, 362, 363,364, 366: n = A,T,C or G
nagtacttctagnaattaattaaggcgggcnnatgctcncanagacctacanangtctgttatctctcatgtctgntggtacctntcaagtcactgcncangcangcaagaaaagaaaacagcanagttgtaatctttctggctaagtaaacccnactgcnngaactagtanatntatatttgatgtgagcaggcnttnganaaaatctntgtcanatagctcgctcacatgaagctaataaagcagagatttttattgctaaacacgacnaaaggatgatattttaaaantaattttgaaaactcaccaaacaaacaagtaaaatttacaatncgcccnaanananaaaaaaaaannnnnnnntnggggggccccc

SEQ ID NO: 19235 - DNA, 338 bp, Homo sapiens
  misc_feature 177, 187, 189, 194, 202, 205, 209, 215, 223, 227, 229, 239,267, 269, 290, 307, 308, 312, 316: n = A,T,C or G
agtacttctagaattaattaaataaaagcactgaatgaaatgatacaaaaaacattttatcacttcaagtggtaaaagcttttctaactaagagtttttaagatttctggacttcatattgacatatttaactatataataatcagaaactctatatgcaaaaaaaaaaatcaaaangtaaattaancncttanaaaaatcnttngcancccatntcattacntaancncaaatagctncctgaaaaaaaatttttaaaaaaaaatntntctgcttgggggaactagggngttaaaaaaaaaaaaannaaantttngggaaaaaaaaaaaaaaaaaaa

SEQ ID NO: 19236 - DNA, 472 bp, Homo sapiens
  misc_feature 21, 28, 29, 30, 31, 36, 40, 48, 54, 55, 64, 67, 92, 114,124, 126, 129, 135, 138, 141, 145, 146, 148, 150, 152, 156,162, 165, 180, 183, 204, 249, 292, 302, 308, 311, 324, 331,358, 361, 364, 368, 395, 453: n = A,T,C or G
taattaaggcggggccgggangattgcnnnngcccnagangaagaagnttctgnntaccttggnttngttactgttctctatcctgggcaanaatattcacacgttcataatanttttctattnangtntggagnagncanactnntncngngganggaccnatntgggaagaactaagnctncaatagagtgactaaatgaanaaatctgatgatgaatcctgtcatttaaggaaagaatgaagacgnatgagaatacccagaactactaatagctcaaatagctaattangaaatttcgnggccgnccncctaggtaggcanttctctntgacctttaaaaataatttttattccnccnccntgcntaattgattttacacctcattactggnggataatttatgtgatgtgggattgctggtgtccagcatgacccataaaccaggtcanaaaaaatgatggaatgttt

SEQ ID NO: 19237 - DNA, 670 bp, Homo sapiens
  misc_feature 257, 279, 280, 281, 282, 283, 284, 285, 286, 287, 288, 289,290, 291, 292, 293, 294, 295, 296, 297, 298, 299, 300, 301,302, 303, 304, 305, 306, 307, 308, 309, 310, 311, 312, 313,314, 315, 316, 317, 318, 319, 320, 321, 322, 323, 324: n = A,T,C or G
  misc_feature 325, 326, 327, 328, 329, 330, 331, 332, 333, 334, 335, 361,365, 371, 373, 377, 378, 390, 398, 402, 409, 413, 421, 422,426, 443, 449, 462, 464, 468, 484, 492, 495, 499, 518, 530,531, 533, 538, 539, 544, 568, 587, 588, 590, 591, 597: n = A,T,C or G
  misc_feature 614, 636: n = A,T,C or G
agtacttctagaattaattaaggcgggcagatcatctgaggtcgggagttcaagaccagcctgaccaacctggagaaaccccatctctactaaaaatacaaaattagccgggtgtggtggcacatgactgcaatcccagctactcaggaggctgaggcaggagaatcacttgaacccgggaggcagaggttgcagtgagccaagatcacaccattgcactccagactgggcaacaagggtaaaattccatctaaaanaaaaaaaaaaaaaaaaaaaaannnnnnnnnnnnnnnnnnnnnnnnnnnnnnnnnnnnnnnnnnnnnnnnnnnnnnnnnccctcactggcccgtcgttttttacnaccntttttnantggnnaaaaaaccttgngcgttttncccnacttttnattnggcctttnnaaanaaaattccccctttttncccaanttgggcgttaaanancccnaaaaaagggccccgcnccccgganttngccncttcccaaaaaaaaatttngcccaacccttnnantgggnnaaatngggaaaaattgtaaaaggcgttanatatttttttttttaaaanntnnccgttnaaatttttttttttttnaaaaaaagctttaatttttttnaaccaaaatgggccccaaatttggggaaaaaatc

SEQ ID NO: 19238 - DNA, 107 bp, Homo sapiens
aacaaaagctgggtacccgggccccccctcgagagtacttctagaattaattaaggattaacactggctgctttcctcaacctgaatgtcagatgacttctgtgtgt

SEQ ID NO: 19239 - DNA, 572 bp, Homo sapiens
  misc_feature 14, 52, 64, 79, 108, 187, 217, 273, 279, 305, 310, 323, 331,334, 343, 350, 353, 356, 357, 363, 365, 373, 380, 392, 400,402, 403, 404, 405, 406, 408, 410, 411, 413, 426, 428, 429,430, 432, 433, 436, 437, 439, 440, 445, 450, 452: n = A,T,C or G
  misc_feature 457, 459, 463, 466, 468, 469, 481, 482, 486, 488, 489, 491,494, 496, 503, 504, 505, 506, 507, 511, 527, 528, 529, 540,542, 547, 557: n = A,T,C or G
gggccccccctcgngaagtacttctagaaattaattaaggcggggacttctnacatctgaccanaatcaagcactgaanatgggtttcttctgccagctcacttgctntgctaccagggctatacctgctttctaaaaatagcttcccacctatttccaaggtttccagttgttttacctacaaggnatctgtgccctgaaataactcacacataanaccatctgaacccagagccttttctagtgatagttaccataaaataatcccaacantttatntttttctaaataaggttcttgttttnagtgnctttttttttttngggaaatnaancggcttttnattcacnagnccnnaacagntnaaaaccanggatttnagggaaattttnggatgggntnnnnngncnntnaaaaaggaactgntnnncnnggnngnngaaanaaaantnaaaantncccnggntnnaaaaaaaaaaanncccnannanccntnaaaaccnnnnngggnattttaaaggaggccnnnaaaaacccttngntttgncccttttttnaaaaaaaaaaaaaaa

SEQ ID NO: 19240 - DNA, 234 bp, Homo sapiens
  misc_feature 1, 2, 34, 55, 75, 83, 88, 102, 111, 136, 137, 138, 154: n = A,T,C or G
nnaagtacttctagaattaattaaggcggggaanaaaagagtgtgtgcacagganctcccctttataaaaccatnagaatctnatganacttattcactatnctgaggaancacaggaaagacccacccccatgannnaattatctccaaccangtcatgcccatgacacatggggattatgggtgctacaattcaagattagatttgggtggggacacagccaaatcatatca

SEQ ID NO: 19241 - DNA, 362 bp, Homo sapiens
  misc_feature 162, 163, 164, 166, 171, 175, 176, 186, 194, 197, 198, 205,206, 220, 221, 222, 228, 233, 234, 239, 240, 245, 252, 253,255, 265, 271, 278, 284, 289, 290, 291, 292, 293, 294, 296,297, 298, 303, 309, 310, 316, 317, 324, 333, 336, 345: n = A,T,C or G
  misc_feature 346, 359: n = A,T,C or G
ggtaccgggccccccctcgagagtacttctagaattaattaaggcgggagcactaaaaccaaaatacatgtattatttatagaaaatattttctgttttaatcttttctttttaaacaaggactcatacttaaaaaaatgtttagcaaaaaaaaaaaaaaannngnaaacntttnnttttttttangggccggnaanncccgggnnattttttaatttgnnntttttngaaannacttnntttantaaaaanncnaaaaaaaaanttcccnccccttnaaaaanccccnnnnnntnnntttangggttnncttttnnccccaanttgaaaaanttnggggggaannagggaaaaaaaanttt

SEQ ID NO: 19242 - DNA, 447 bp, Homo sapiens
gaacaaaagctgggtacccgggccccccctcgagagtacttctagaattaattaaggcgggtagatcacttgaggccaggaattcaagaccaacctagccaatatggctaaactctgtctctactaaaaatacaaaaattagccaggcttggtggcacacgcctgtgatcccagctactcaaaaggctgaggcaggagaatcgcttgaacccaggcggcggaggttgcggtaagccaagatcatgccattgcactccagcctgggcaacagagcaaggttgtatctcaaaaaacacaacaaaaaaagttcaatttaattttaaaataaatcgtaaaactgccacaaagcttgtaggacaatgtataaattttttaaattataaataattttataattataaaatttcataacagcataaaattataaatcataaaagcatacataag

SEQ ID NO: 19243 - DNA, 291 bp, Homo sapiens
  misc_feature 1, 3, 13, 257: n = A,T,C or G
nantacttctagnaattaattaaggcggggacacgggggggtgggtgaaggttcgttaccttttctagtgcgttctatcatagttaacggttgcacacttttttaaaaaaagtaaatggatttgccacaattaaatgtcataacatttatgacagaatataaaatattaacatatttttaagccaagttttaggtgtattttttgaatcttggttataaacccaattttaaaggggcgatgtatccagcgttgtganggcaacagattgtaccccatatttatatttttta

SEQ ID NO: 19244 - DNA, 360 bp, Homo sapiens
  misc_feature 305, 306, 312, 313, 314, 337: n = A,T,C or G
agtacttctagaattaattaaggcggggtaagatttgccgagttccttttactttttttaacctttccttatgagcatgcctgtgttgggttgacagtgagggtaataatgaatgttgctgatagggataaatcttgaggctgagggcgggtggtacagatgtgtatgggaaaccccaacccctatatattgtaaatagatgggctgggctaaacattgttgccgtttcatacttctaccaactcagcttttacacaataaagctctactgtctctggaaaaaaaaaaaaaaaaaaaaaaaaaanntttttnnnaaaaaaaaaaaaaaacccccccnaaaaaaaaaaaaaaaaaaaaaaa

SEQ ID NO: 19245 - DNA, 446 bp, Homo sapiens
agtacttctagaattaattaaggcgggggtttttcacacttagtatttggcagatatttcttgaaaatgaagtgagcttgtcacttttaggaaaacaactgacagtatttattaccagtgataaaatttgggtgaaaattagaatttttaaaaagttgacagctggagtttgacagcttcctagtacttaaaagactttccttatgatatcagtggttaaggactgcaatattttaaaatgttgtttaatgaaatatgttatttggaagatgggcataactcagtaaatctaggctttgcaaatgaccaatgcatgatgttgcaaaatcaagcaaaggcaaaagatcctttgaaaattccagatatagcaatggattttaacagtaaaaaaagtggattgatgtggtttcagattccaaaatgttaactgtcctttaagaaactac

SEQ ID NO: 19246 - DNA, 199 bp, Homo sapiens
  misc_feature 51, 83, 95, 97, 111, 137, 160, 166: n = A,T,C or G
aaccttatcctactagtgaaacaggatcatcatttcactattatattaaanaacaaaaaactcattttcttccaaacaatganattactttaaananagcatttttggtancacagcacgatagacacagagactanactgcagagggctgacaagtcantttcanaaaacaaaaaagacactgattgtagacactttt

SEQ ID NO: 19247 - DNA, 493 bp, Homo sapiens
  misc_feature 1, 26, 38, 49, 54, 73, 74, 80, 91, 92, 93, 104, 105, 113,121, 123, 132, 140, 157, 160, 168, 171, 172, 178, 180, 182,183, 192, 193, 194, 196, 197, 198, 200, 204, 205, 206, 207,212, 230, 237, 243, 245, 255, 256, 259, 263, 270, 290: n = A,T,C or G
  misc_feature 295, 299, 399, 416, 433, 451, 467, 477, 480, 481, 486, 487,492: n = A,T,C or G
nagtacttctagaattaattaaggcngggcgcagtggntcatgcctgtngaccnaacgctcatgggagaccgnngtggtntggatcacctnnngtcaggatttnnacaccagnctggctancntggtgaaancccatgcnctaccacattaaaactncgngaaaaacntanncactcncntnnacagaagtnnntnnnancatnnnntaatntacaagggaaataccccnagtgttnttcaancnttgtactatnnaangagngccacangattgaaatccatgacattntattnatgnataaaaaagaatgaattcatgtcctttgcagggacatggatgcagctagaaaccatcattctgagcaaactatcacaaggacagaaaaccaaacaccacntgttctcactcataggngggaattgaataatganaacacctggacacagggnggagaacattacaccntggggccctnttnnggggnngggant

SEQ ID NO: 19248 - DNA, 322 bp, Homo sapiens
  misc_feature 39, 47, 63, 67, 75, 86, 118, 133, 190, 199, 210, 212, 218,224, 265, 280, 293: n = A,T,C or G
gaaagtacttctagaaattaattaaggcgggggaccggntatccgangccaaccgaggctccncggngctgccgnatcgtgtccgnctgggcggggattctgacttaaaggcgttcangtcataatcccacanatggtagcttcgccccattggctcactcacccaccacattaacaacataaaaccctnattcacacnaaaaaacaccntnatgttnatacanctatcccccattctcctcctatccctcaaccccgacataantaccgggttttcctnttaactgggcaanaaaaaaaaaaaaaaaaaaaaaaaaggggg

SEQ ID NO: 19249 - DNA, 431 bp, Homo sapiens
  misc_feature 24, 28, 49, 52, 55, 59, 60, 62, 71, 89, 144, 150, 162, 196,197, 203, 204, 213, 222, 223, 231, 234, 235, 239, 243, 244,250, 254, 259, 261, 269, 273, 274, 275, 276, 278, 281, 287,290, 293, 375, 414: n = A,T,C or G
agtacttctagaattaattaaggngggngaagccccggctggtttgaancanctncttnnantttgcaatncaatatgaaaatcacctnggagctggtaaaaagaggcctaacccctgtctttagatttacagtccaatgcttnactcanccattttacctnacccccaaagaaaaaaaaaaaaaaaaatccaaannaaaaannaaaaaaaanaaaagatgnncccccccnggnngggnacannggctcntgtntatangngccattanttcnnnncnctnagaccnggnttncaaaatcatttgagttcaggaatttgagattagcctggctaaaatggtgaaactccacctctactaaaactacaaaaattanccaggtgtggtggtgtgtgcctgtaatcccagctactanagaatcacttgaacctg

SEQ ID NO: 19250 - DNA, 241 bp, Homo sapiens
  misc_feature 18, 21, 25, 27, 29, 30, 31, 33, 35, 38, 43, 45, 46, 50, 55,57, 58, 60, 62, 71, 86: n = A,T,C or G
ctggccgtcgttttacanccngaancnannnananccntaatncnngccnggccntnncncnagagaactnatagaatccattaangcgggggcggaggatgggaactggctagtgagcactgaaatataaattctgaatcctcaaaaaaaaaaaaaaaaaaaaaaaaaaaaaaaaaaaaaaaaaaaaaaaaaaaaaaaaaaaaaaaaaaaaaaaaaaaaaaaaaaaaaaaaaaaaaaaaa

SEQ ID NO: 19251 - DNA, 198 bp, Homo sapiens
  misc_feature 2, 9, 34, 46: n = A,T,C or G
gnaacaaanctgggtaccgggcccccccctcganaatacttctagnaattaattaaaaaaatgcctgtatgcctttttttggtcggattgtaaataaatataccattgtcctacaaaaaaaaaaaaaaaaaaaaaaaaaaaaaaaaaaaaaaaaaaaaaaaaaaaaaaaaaaaaaaaaaaaaaaaaaaaaaaaaaaaa

SEQ ID NO: 19252 - DNA, 598 bp, Homo sapiens
  misc_feature 1, 32, 40, 52, 94, 437, 476, 501, 524, 560, 562: n = A,T,C or G
naagtacttctagaaattaattaaggcggggnttaatgtngcacagcagcancagtggcacaaacaccagccgggccagcaccaggcttggcanccagcggctgtccttcccaggctgtgggcaccaggcagggcctcagcccaggccgccaccccagggcacagccaggcccccaaggatccatctggggcccctcaggatctgaactgaaacctcaaagcctggttctccttagggggttactcttgaaaggggcatggtggagccttctggagtgctggaaatattctacatctcgatctgggcaggtatgtgtatatacatatattcattaagttgtacacttaagacttgtacttaactctgcgttgataccgtacatgcttttaaggcggggatactgattcagaaatcctgtagcgtgtaataaaagaanaagaaatggcatggaatcactgcctcctgtgatttgaangccattgtgaaagaaaacaatgcantgaaagaaagttcttcatattangacagatatcattgcatcacatttatttattttttntngggattttttatagccctttataaaaaaaaaaaaaa

SEQ ID NO: 19253 - DNA, 351 bp, Homo sapiens
  misc_feature 230, 241: n = A,T,C or G
agtacttctagaattaattaaggctggagggtttaaaactcttttttggggggttaagtggaggtaggggtcggagcctaacactcacagatacgtggggcctggaggaggcagcagtggggttggtcatggaatgagcacgtttgagtgtagggtcatcatggagcatcctgggggtagtgtcatgggactgttctggagaaatcaagactgttacaaatttggccggncacagtggctnaagcctgtaatcccagcactttgggcggccaatgtgggcggatcacctgaggtcaggagttcgcgaccagcctggacaacatgatgaaaccccatctctactaaagatac

SEQ ID NO: 19254 - DNA, 181 bp, Homo sapiens
  misc_feature 30, 45, 178: n = A,T,C or G
agtacttctagaattaattaatttttgttnggatggattatagtntttctggtttcttggtatggattggtgaattttttgttgagaaatcagacacttgaatctgataatgtggtagctctggaaatcagattctctctctttttcagggtttgctgttttgttttttttttccctnaac

SEQ ID NO: 19255 - DNA, 370 bp, Homo sapiens
agtacttctagaattaattaaggcggggatgcaactttccctttcctcttaaattttggtgttatccttttgttctaccatcctttcctacagcattaccatttcattatgcagattaaactttgggaagcaaagccttaaggaataagttaccagaatttatatttaagaagagagtgattggtagtgaaagaaaaaaggagtgatcacaacatgggggaggagtagggaagaaggagaaggaagagattgatctgtttagggagagaagttgtgccacatagaagacagatacagagagtgacaataaagaaaaatgattaaaaaatttttaaggtatctttgaggaaaaaaaaaaaaaaaaaaaaaa

SEQ ID NO: 19256 - DNA, 583 bp, Homo sapiens
  misc_feature 4, 18, 32, 35, 119, 128, 129, 140, 141, 148, 150, 164, 216,238, 252, 255, 256, 262, 271, 274, 291, 293, 295, 305, 306,312, 317, 319, 328, 333, 346, 352, 368, 371, 374, 376, 377,381, 384, 395, 396, 405, 408, 417, 418, 419, 421, 422: n = A,T,C or G
  misc_feature 423, 424, 425, 433, 435, 438, 449, 450, 451, 452, 456, 457,458, 465, 467, 474, 476, 481, 490, 499, 500, 513, 514, 515,519, 539, 540, 544, 549, 555, 558: n = A,T,C or G
ggcnaccaaaccagaganagccccaatccctncanttttgtggcttcaagtgtgggtggacagtcctaatggggatctccagctccttccctgtgggctgccacaaacagctacctccnaaagggtcnntgtttggagtnnttgtgtncnaaaactgcacctantcaaagcgaactactatactataattgatccaataacttgaccaacggaacnaggttaccctagggattaacantcgcaatcctattnttnnactccntatcaaaangtnccttttgttaccttgtntnangtcactgacnntatccntaggnanatccttttnttaanaaatttgtttttnttttancctaaattaaaagtanttncantnnattnttnaggttcaaaannccgaattanatngaatgcgtnnngnnnnnaaattttnanaanaaaaaaaaaannnncccnnncccaaantnggggccncnttgtnttttttggnccccttacnntaaaaaaaaaaannncccntccccccctttttttttcanntaanttttntggttnatnaaaaaaaaaaaaaaaaaaaaaaaaa

SEQ ID NO: 19257 - DNA, 289 bp, Homo sapiens
  misc_feature 21, 22, 24, 163, 164, 165, 166, 174, 184, 197, 199, 200,203, 204, 205, 206, 227, 229, 231, 232, 236, 244, 246, 247,258, 268: n = A,T,C or G
gggtaccgggccccccctcgnnantacttctagaaattaattaaggcgggggcattaatatctaggtatatacaaggaaactcaaacatcttaacagccaaataaataaataaataaataaataaataactcactaaaaaaaaaaaaaaaaaaaaaaaacggnnnncccccccngggggggacncaaacaggccccntnngannnnattttttacccccccccctcngncnnattnttaaaaangnnaatgtgttcanaagtcgctgnccttactacttttgcggaagt

SEQ ID NO: 19258 - DNA, 478 bp, Homo sapiens
  misc_feature 50, 53, 55, 66, 67, 78, 85, 87, 90, 95, 98, 101, 110, 118,123, 131, 138, 143, 145, 211, 215, 310, 340, 372, 375, 398,409, 428, 444: n = A,T,C or G
agtacttctagaattaattaaggcgggggggggttaaaaaaaaaaaaaanaananaaaaaatcatnnccccccccccngggggancnccntatgnccnttnaatatgccntattaccnccccntcccaggncctgccnttaanangatacccctgggcatacactatcttggggaaaaggtcaagaaagacctcctgactccatgttacangtanacaaaacaaggttggactcttttggacctataaaccctactctgaatacaacatacagcttccttactacatttttcaaagaacattaatgaggntgtttccagatcaattcattcattttgggnaaggagatgaagtgggaattttaaaattgttnagnaatcagattccaaaaaatttcantgatttcatgnagggcaaaaaaggcttttngcccaaatttttgaangaaactagaatctttcttacattcaaaaaagggt

SEQ ID NO: 19259 - DNA, 176 bp, Homo sapiens
  misc_feature 150, 156: n = A,T,C or G
agtacttctagaattaattaaggcggggggacgtgccgcgccaggaagggcctcctcccgctgcgtcgtcgggagcgccctcgccaaatcgacctcgtacgactcttagcggtggatcactcggctcgtgcgtcgatgaaaaaaaaaaanattttnaaaaaagggaaagggggggg

SEQ ID NO: 19260 - DNA, 418 bp, Homo sapiens
  misc_feature 20, 23, 33, 34, 97, 98, 103, 104, 109, 112, 128, 129, 135,150, 152, 154, 162, 164, 165, 166, 167, 169, 173, 177, 178,180, 181, 183, 184, 186, 189, 196, 200, 201, 202, 203, 205,207, 208, 209, 212, 216, 217, 218, 219, 227, 229, 230: n = A,T,C or G
  misc_feature 233, 237, 238, 243, 246, 247, 249, 254, 256, 259, 260, 261,262, 263, 266, 268, 272, 275, 278, 285, 286, 290, 292, 296,299, 303, 304, 308, 309, 316, 318, 319, 328, 332, 341, 342,398, 402, 410: n = A,T,C or G
ccccccctcgagagtacttntanaattaattanngcgggtgtgggccactgtggtggcagtggaggtggggtgtttgggaggctgcgtgccaatcannaatannaaggnttncattctcacattgtcnngatganaacttcctttccttnantntaaagaancnnnngnaccngaanncnntnncnccncccggcntttnnnncnannnacntcannnntttacctntnnggnaaannggggnccnngnaaaantnacnnnnnccngncccnaanganttgaaannctancntatnttntttnnagannaggcttngnnttttttttnttgnataggatgnncataaggccagtatgatttataaatgcaatctccccttgatttaaacacacagatncacncacacacncacaccac

SEQ ID NO: 19261 - DNA, 138 bp, Homo sapiens
  misc_feature 1, 52, 56, 60, 67, 72, 95, 96, 102, 103, 105, 110, 135: n = A,T,C or G
naagtacttctagaattaattaaggctggagaattgaatccaggaaggcggngatngcantgagccnatatngcaccactgaactacagcctggnnacactnncnctttnacactatacaccaggggctcttggngga

SEQ ID NO: 19262 - DNA, 340 bp, Homo sapiens
  misc_feature 23, 36, 60, 65, 72, 79: n = A,T,C or G
tgggtaccgggcccccccctcgngggtacttctagnaattaattaaggcggggaaaaagnacagnaactagnacaaagnatcagaatcaaaacacaaatcgcctaagaaaaagactggaaaggattctgtaagtatttagaattgtttcatgcctgtattttcaaaatgcaaaaatgtattctgtggttaaaccatgatggtgttgaaagaataggcttttttccaggtgtgctaccattgaagaaaacagtgaaaattcagttaagtacatttcacacaatatcatagtttttggtcatgcatgatcctagattttattctcctaaatttgatattttt

SEQ ID NO: 19263 - DNA, 202 bp, Homo sapiens
agtacttctagaattaattaaggcgggggatgaaattgtttttattcttttagaattttttttatcaggaaaacagaggtaaagtgctatcaattactatttaagagttctattttgaaaagtgagaattaaggatttttcttttctttttaaaaaaaacttttttaaaaatcaaaaaaaaaaaaaaaaaaaaaaaaaaaaa

SEQ ID NO: 19264 - DNA, 600 bp, Homo sapiens
  misc_feature 498, 555, 561, 562, 563, 569, 572, 573, 574, 575, 576, 578,588, 589: n = A,T,C or G
aaatagcttcaaatatgtttgtaaaggatttaagaacagccattacaaaaataagaagcatatatataactactagaacacttaaagaaaaaagaaatagcacaaataatcccaaggaaaggaaaaaaggaaagaatgatcaacagaaaatataacatatgatgtcataaataatttgaaacatatcaatatttgcaataaatatttgcatggaaacctaacaaatacatctagaaggagaacctaagacttcagactaactctcatcttatggcaaagccaataacgatctacagaatttacttgatatagtacttaataagctttatttaataaggtatatatctatatcttaattattaatacatatttatttatataaaataaatatcaacttttgtgctgtccagaggctttgtatttttctcaaacatcaaaatatttggtcatacattattagggtcacaaaaattcagtaacactgcaaaagaaagtttncgtattatgtcataaccctctggtcataatgcattaaaaacttggaagttatatgcnaaaaannnaggagnagnnnnnanaaaaaagggnngcccccccccg

SEQ ID NO: 19265 - DNA, 544 bp, Homo sapiens
  misc_feature 36, 37, 40, 60, 61, 62, 85, 98, 114, 125, 144, 149, 151,155, 165, 174, 175, 176, 190, 197, 198, 199, 201, 217, 235,237, 238, 240, 245, 247, 255, 256, 268, 274, 282, 293, 299,300, 302, 308, 320, 341, 357, 363, 373, 397, 400, 401: n = A,T,C or G
  misc_feature 407, 411, 424, 427, 428, 430, 435, 441, 445, 447, 448, 456,463, 467, 474, 480, 487, 488, 494, 495, 500, 514, 521, 528,532, 533, 540: n = A,T,C or G
agtacttctagaattaattaaggcggggacctgctnnggngtgagggcactagggagggnnnccatgaaggaacttgggattttnaatggaataaatnaaacataaagtctatncttgggaaaanactttaaaatgaaaaaggntggancnaaancccccaaccntaagtattnnnaatgccaagctttnacttctnnngngcctacccagacttgnagcatgaaaattcacctntnnangagtntnaaacccgnnatacctccttantattangaatggcntatactgatgnggtcgnnantcttancttttaaaattntaggttaaaagactttgctcnttgcccaggatttggnaaaaantgtattttcncatgggctttccttcctccttttnggnnaatgcnaggngaaaaaacttttnaanntnaaaanttttgncctntnnggggaaanggaaaancccnccccctnaaaaanttttttnnattttnncccgnaaaaaaaccccccntttttgnttttttncccnncttttcnaata

SEQ ID NO: 19266 - DNA, 423 bp, Homo sapiens
  misc_feature 78, 94, 187, 405, 406, 407, 409: n = A,T,C or G
agtacttctagaattaattaaggcgggggagagagagagagagagaagaagaaaagaaagagaaaaagagaagtgtanggggtgggaggagaanaaaactcttaactggaaaagtcagaaaaaaagcagaatccagagttgctacagtatatcatctaaaatatccagtgtttaacaaaaatagaanacatgtaaagaaataagaaagtgtgaccaatacttgggaggaaaaagcagtaaatagaaacttttgagtaggcttatattttggttttattagatagacttcagagcagccattataaatatattcaaagattgaaggaaactatgcacatatagtgtaaatgtaaatggctaaaagaaaatattatgaaaatgacaaatcaggaatctcagtaaatnnnanaaaaaaaaaaaaaa

SEQ ID NO: 19267 - DNA, 408 bp, Homo sapiens
  misc_feature 108, 111, 112, 121, 128, 129, 133, 135, 136, 137, 143, 144,145, 146, 147, 148, 149, 150, 151, 152, 158, 159, 168, 169,170, 171, 173, 176, 182, 203, 207, 210, 216, 220, 222, 224,227, 234, 235, 241, 249, 251, 253, 255, 256, 257, 263: n = A,T,C or G
  misc_feature 266, 269, 270, 275, 277, 278, 280, 283, 285, 288, 294, 297,298, 299, 302, 308, 309, 311, 313, 315, 317, 319, 323, 324,325, 333, 334, 337, 348, 354, 357, 358, 363, 374, 377, 381,384, 387, 390, 391: n = A,T,C or G
agtacttctagaattaattaaggcgggctcgcaggtcgtaggttagtacaaagaatttactgatgtcagcataggtttgaaaaaaaaaaaaaaaaaaaaaaaaaaaanggnnccccccccnggggggnncccnannncccccnnnnnnnnnntttttnnccccccccnnnngnccntttttnaaaaaaaatttttataaaaantttnggnttttanaaanananttncacacanncttgtnacttaaananantnnnaaaatnttnacnngatananngntgnanganatatanttnnntgntagatnnancntntnanacannngatgacannganagtgaataganttttcnctnntttanggaaatttttnagngaanaanggngannttgattttaaaaacccc

SEQ ID NO: 19268 - DNA, 415 bp, Homo sapiens
  misc_feature 8, 198, 200, 201, 203, 212, 218, 224, 225, 228, 232, 233,235, 236, 237, 241, 242, 245, 246, 250, 258, 259, 260, 261,264, 266, 267, 268, 289, 324, 335, 361, 364, 365, 369, 370,371, 372, 374, 375, 381, 383, 384, 386, 389, 393, 396: n = A,T,C or G
  misc_feature 398, 399, 407: n = A,T,C or G
agtacttntagaattaattaagagcgggcgcctgtaatccaagctactggggaggctgaggcaggagaattgcttaaatccaggaggcggaggttgcagtgagccaagattgtgccactgcactccagcctgggtgacagagtaagactccgtctcaaataaataaattaaaaaaaaaaaaaaaaaaaaaaaaaaaangnngnccccccccngggggnaccccnnttncccnntnnngggnngannttancccccccnnnnggncnnntttttaaaaaatttacataanggaaaaaaaaaactgtctattttgaatggctgaanctaaagcaacnttagtttctcttaccctgcttttttntannaaannnntnnatggtnanntnaanaaantantnntttttgcnaaaaaaaa

SEQ ID NO: 19269 - DNA, 293 bp, Homo sapiens
  misc_feature 8, 19, 20, 23, 28, 30, 40, 45, 60, 95, 100, 122, 123, 125,148, 184, 193, 204, 235, 266: n = A,T,C or G
ggccgtcnttttacacacnngantaagngnaacactatgntgggngccgggccccccctngagagtacttatagaattaattaaggcgggatccnaatanggtctatacattgtacattagnncntctattaagtttggtaaagcctntttttcatagtattggcatgaagagttactaggatnggggctggncatggtggctnatgcccaaaatcccagcactttgcgaggcanaggcggatggatcacctgaggtcaggagttnaagaccagcctggccaacacggtgaaa

SEQ ID NO: 19270 - DNA, 249 bp, Homo sapiens
agtacttctagaattaattaaggcggggccttttgattattgctatatctccaaatactaacacagggtctggcattcaaaaatatttgttgaatagtgtatttaccttagtttataaaaaaaattaaagtctatttagctacatctcacacaccacaaatttagggggcagaccagttttcagttacattatacattaggaatccctctgaaacaacatattttcccaaaaaaaaaaaaaaaaaaaaa

SEQ ID NO: 19271 - DNA, 645 bp, Homo sapiens
  misc_feature 13, 97, 114, 124, 145, 150, 172, 175, 193, 219, 239, 250,289, 298, 326, 328, 340, 345, 346, 355, 368, 385, 386, 403,410, 411, 416, 418, 421, 427, 431, 435, 438, 442, 443, 444,447, 451, 452, 458, 459, 464, 468, 485, 493, 494, 495: n = A,T,C or G
  misc_feature 496, 502, 504, 507, 509, 512, 513, 515, 516, 522, 525, 527,531, 532, 535, 542, 544, 545, 547, 549, 550, 553, 555, 556,563, 564, 565, 570, 587, 588, 593, 594, 595, 604, 606, 609,610, 611, 612, 618, 620, 621, 622, 624, 625, 628, 630: n = A,T,C or G
  misc_feature 631, 632, 633: n = A,T,C or G
aagtacttctagnaattaattaaggcggggatcctccgtatgctgaacgctggccccctgggcccccttatttctttctctaaaaaaaaaaaaaaanaaaaaaaaaaaattccngttttaattnccaaaaaaaaaaaaaaaaaangaaancaccagtctgaaccagaaatgnctncagcccagcccctgctangaacactcaactattactgagctttncctacacacagacacaactncagggcaagancaactggacagtggggcctggcccgtgggacctgccacncaagtgccntgagggccaggtgccaccccaggtgttntnaaggaccaaggngccanncaagggggngggggggacaaanaaaaaacttgggatttnncccttgccccatgggtnaaaaggnngtccntnccntgcctngatncaanggncctnnnggnaccnnaatggnntcccnaaantttgggtttttttgggntaaaaaannnnaagggngnccnanttnngnngggggnccnanaaannggnaaagggncnncnanntgncnnaaagggnnnccccnttttttttttaaaaacnnttttnnntaaaaaaananttnnnnaaaaantnnnannagngnnnntaaaaaaaaaaa

SEQ ID NO: 19272 - DNA, 434 bp, Homo sapiens
  misc_feature 8, 102, 141, 164, 170, 175, 176, 178, 183, 188, 189, 193,212, 231, 258, 269, 282, 291, 308, 311, 313, 319, 320, 321,322, 341, 375, 395: n = A,T,C or G
agtacttntagaattaattaaggcggggcgggtaaagggtattttaacttatgggtagttcctgctgtgagtggttacagctgatcctcgggaagaacaaanctaaagctgccttttgtctgttattttatttttttgaantttaaataaagtttactaatttngaccangaaanngnaactncaaanntgcncattgacaccaagctcaanaaaactgtctgggccaaangaataaggaatgtgccatacccaaatncctgtgcggcngccccaaaaccgnatgaggatnaaaattccccaaataanctntntactcnnnnacctatgtcctgttaccanttttaaaaatctacagacagtcaatgtggatganaactaatcgctgatcgtcanatcaaataaagttataaaattgccttcaaaaaaaaaaaa

SEQ ID NO: 19273 - DNA, 525 bp, Homo sapiens
  misc_feature 22, 267, 270, 291, 338, 340, 342, 378, 384, 404, 405, 412,414, 421, 431, 432, 436, 442, 443, 462, 469, 470, 474, 492,495: n = A,T,C or G
gggtggccgggccccccctcgngggtacttctagaaattaattaaggcgggggggagggcaaaacaaattgtttttagtaatccatttaaaaaacacagcagtaatataaacatcatttatgtttgaacattttcatgttgatccatataaacatgaaaatgaaataccagaccacgtctataatttagtgctacgacagtatagaaagaacattaagctgagagttaggaaacaatgcgaaaagcacttttatagcttttttttgntgnttttttggggtttttttgganacaggatctggctctgttttcccacccgggccacagaacagacttcntntnaaaaaaaaaaaaaaaaaattttttaaaaattttttntttaangtttggccccttttcaaaannaaaattntnaattttntgggcaaaanngggnaatttnncaaaatttttaaattaaanccccggnncccnaaaaaaaaaatttaaaangtngcaaaaaaaaaaaaaaaaaaaaaaaaaaaa

SEQ ID NO: 19274 - DNA, 354 bp, Homo sapiens
  misc_feature 11, 32, 48, 63, 99, 128, 219, 222, 226, 230, 231, 233, 235,238, 246, 250, 258, 261, 264, 271, 277, 292, 297, 298, 300,302, 307, 314, 316, 317, 322, 330, 334: n = A,T,C or G
aaagctgggtnccgggccccccctcaagagtncttctagaattaattnaggcgggcatagtancaggtgcctgtaatcccaggtactcgggaggctganacagagaactgcttgaaaccaggaggcanaggttgtggtgagccaagatcacaccactgcactccagtctaggtgacagagcgagactccgtcttatttaaaaaaaaaaaaaaaaaaatnccntttntttnntnanggnaaaaggantaantttttaanttnaangtttttnataaantttttataaacgggnttccnngncntttangggttantnnggtanccatttgngcgngcttttttttttaaaaaaaa

SEQ ID NO: 19275 - DNA, 371 bp, Homo sapiens
agtacttctagaattaattaaggcggggaaagactgcttgagctcacgagttcgagactagcctggcaatatactgacattctgtctctacaaaaactgaaaaaattagcaagtgcggtggcatgtgcctgtagtcccgactacccaggaggctgaagtgggagaatcgcttgagcccaggaggtgaagttgtagtgagctgaaactgtgccactgcactccagcctgggcgacagtgagaccctgtctcaaaacaaacaacaacaaaactcagaatggctgaataaatagcagcttagtgtaaaagccaaaatttatgaccttcagttcctcctaagatctgcaccctgatctcttctgaccctagctcg

SEQ ID NO: 19276 - DNA, 464 bp, Homo sapiens
  misc_feature 1, 14, 28, 32, 37, 49, 57, 65, 79, 89, 102, 106, 108, 112,113, 114, 118, 121, 131, 133, 140, 141, 142, 144, 146, 154,170, 203, 207, 217, 233, 246, 299, 302, 324, 329, 331, 345,356, 360, 367, 372, 373, 376, 397, 402, 430, 445, 449: n = A,T,C or G
naagtacttctagnaattaattaaggcnggcngcatnacttgaggccangagttcanggaccagnctggccaacattgngataaccccntctgtactgaaantacnanattnnnccanacntggtggtacntncctgtannncnanctactcangaggctaaggcacaanaattatttgaacccatgaggcggaggttgcagngagntgatagggcnccactgtactcgcatnctgggtgacaaancaagactctgtctcaagacatacaacagatctataaaatgaatgaggtgtccnacnggggttaaaagatgtgggactncactnanagtaccactgtggntccgatgcagngctnagtttanaaatnntanccaatcaaaaaggctgaaacnggaanattgcttgacctaggaattcaaaaccancctgggcaatttaancaanaccccttccttcaaa

SEQ ID NO: 19277 - DNA, 402 bp, Homo sapiens
  misc_feature 11, 22, 23, 32, 54, 56, 57, 59, 64, 107, 111, 130, 167, 192,274, 285, 286, 288, 290, 293, 294, 295, 300, 306, 310, 313,318, 337, 341, 342, 343, 346, 347, 349, 354, 357, 361, 369,370, 373, 378, 381: n = A,T,C or G
agtacttctanaatgggggaanngagggcggntcacaagggcaaaatttttttncnntnctggntaacacggtgaaaccccgactctactaaaactacaaaaaaaanttanctgggcgtggtggcgggcncctgtagtcccagctactcaggaggctgaggcagganaaaagtgtgaacccaggaggcggancttgcagtgagccgagatcacaccactgcactccatccagcctgggtgacagggtgagactctgtctcaaaaaaaaaaaaangggacccccanncntnccnnnaaaantttttncccnggnttttngaaaaaaaaattccccttntttnnnaanntnggganccnaaanccaaaaannttncccanttntaaatttgggtttcccccccc

SEQ ID NO: 19278 - DNA, 240 bp, Homo sapiens
agtacttctagaattaattaaggcggggaaaggccacagcacactggcgctccagcaaagccaaatcatgtctcctctggccactgcggtcctctccttggtacatgtcatcccccagaggagtatccaaagctattccactatgcactcatcaaccctggcttgtcagccttggggaaggtcactttattcataaaaatgcctctttgagtttctaaaaaaaaaaaaaaaaaaaaaaaa

SEQ ID NO: 19279 - DNA, 271 bp, Homo sapiens
  misc_feature 5, 26, 30, 31, 36, 39, 40, 46, 52, 62, 63, 65, 78, 80, 84,86, 160, 181, 184: n = A,T,C or G
cttantagaaattaattaaggcgggngcannatgangtnnggacancgaaancatgactagnntntctcggaagaaancncttntntactaatattacacacactatacacccacacacttttgtattacaggtgtggtggcgggtgcctgtaatcccanctactcgggaggctgaagcanganaatggcgtgaacccggtgggcggagcttgcagatcacaccactgcactccagcctgggtgacagagcgagactccgtctcaaaaaaa

SEQ ID NO: 19280 - DNA, 695 bp, Homo sapiens
  misc_feature 563, 619, 632, 640, 645, 647, 652, 655, 656, 661, 662: n = A,T,C or G
agtacttctagaattaattaaggcgggaggggcatccaccttattaaggcttgagtggtggttttcccctcacaatgtaaaacaagccacctggatattaggactgggtggagcccacctcagtgcctcaaagcccctgtagccacactgcctctctagattcctcctctccgggcagggcatctctgaaagaaaggcagcagccccagtcaggggcttatagataaaactcgcatctccatgggacagagccccagggggaaggggcggttgtgggtgcagctacagcagacttaaacattcctgcttgctggctctgaagagaggagtggatctccaagcacagtgcttgacctctggtaagggacagactgcctcctcaagtgggtccctgaccccatacctccagatggggagaaacctcacagcagggttcaacagacaccttatacaggagagcttcagctggcatctggtgggtgcccctctgggacgaagattccataagaaggaacaggcagcaatctttgctgttctgcaacctccaatggtgatacccagcnaacatggcctggagtggactcccaccaaactccacaaatgtccaaaaaagggtttntttaagggaaacntcccaccnaaagncnttggnttnnatttnnaagggcccccccaaaaaaaaaaaaaaaaaaaaa

SEQ ID NO: 19281 - DNA, 593 bp, Homo sapiens
  misc_feature 1, 14, 33, 40, 41, 43, 44, 48, 49, 53, 57, 64, 65, 73, 75,76, 78, 81, 82, 88, 98, 100, 102, 103, 104, 105, 115, 116,118, 127, 130, 135, 136, 140, 143, 147, 148, 149, 154, 168,172, 175, 182, 184, 201, 203, 221, 266, 307, 319, 353: n = A,T,C or G
  misc_feature 362, 374, 400, 449, 450, 453, 462, 469, 470, 480, 488, 510,512, 523, 531, 534, 546, 557, 558, 560, 563, 564, 567, 578,580: n = A,T,C or G
naagtacttctagnaattaattaaggcgggggngacaganncnnactnnttcnctancactggnntgcagaananncnaannccggtnactgaagtcncngnnnnctgagttcanncnattgtactnctncctgnnacangancgannntattnctggtgcacaccancacnccnggctaantnttgtctttttactagananggggtttcaccatgttgntcaggctggtcttgaactcctgacctcgttcctgcctttagcctnctaaagtgccgggattacaggcgtgaaccaccgcacctggncagtactacatncatttttattgaatgattttgaatgacttaaagntcaactatnaaaaaacctttnttttacatgtactttttgattaaggnttatcaacttttaaaacttgaaaatttaaatgaaaggtttgcatgggannaangtttttgtnaaaaaannaatttgaaanttaacccntaaatcctttttttggaacccntntttaaggggantttaaaanccnaggctttttttnttttttggaanncnaannaanaaacctttttntnaaaaaaaaaaaaa

SEQ ID NO: 19282 - DNA, 337 bp, Homo sapiens
  misc_feature 22, 32, 34, 37, 41, 45, 47, 58, 62, 64, 65, 68, 76, 77, 84,88, 92, 93, 95, 97, 99, 100, 106, 118, 122, 136, 270, 300,315: n = A,T,C or G
attactggccgtcgttttacancaggaaacangnatnaccnttantnctggccggcgntttncnntanagaaaaannaaaaacnttanttcnngncnanncctttnaaccctggaagnagangatgcaatgagccnagatcacaccactacactccagcctaggcaacagagcaagactctgtctcaaaaaaaacaaaacaaaaaggaggcacaaaaccccaggcttcaagtctctgcagcctgctccacatttgggcacagaaggactnagacaggctctgtgtgggcaccgaggtttnacaggggtggtcacnacctcaggctttaatgaataaa

SEQ ID NO: 19283 - DNA, 441 bp, Homo sapiens
agtacttctagaattaattaaggcgggaagacatttctccgagttctcccgaagggagccaggcgcgagcgcgacctggggaaagtccagagtgccagccacggggaagggcgggcagtgcagagtggaagagaagccagcaagttagacacagcccctctctgggaggccgcctctaaaatggaactagcggacgtaccttggtttgtacatttgaccatggacacacgtaaagattttgaaaaaaaatctttgaaaaaaaatttttttaacgcaattcctaaacttttaactaacgcaattttgtggacctctgaatcttaattcaaatgaactggagaacaactataaagcaatttcgataatatgatcagtgacattttatattgcagaattgtaaattttgttgtcattatactgtaattttatttctttaaaaga

SEQ ID NO: 19284 - DNA, 707 bp, Homo sapiens
  misc_feature 271, 276, 277, 289, 291, 297, 314, 316, 320, 325, 329, 333,337, 343, 345, 348, 349, 353, 358, 359, 363, 375, 378, 386,387, 394, 405, 409, 410, 412, 417, 429, 432, 438, 439, 442,451, 452, 454, 460, 461, 462, 470, 482, 489, 490, 493: n = A,T,C or G
  misc_feature 519, 526, 533, 542, 552, 556, 557, 558, 560, 563, 566, 570,574, 584, 587, 601, 605, 608, 621, 625, 629, 653, 654, 658,668, 676, 678, 685, 692: n = A,T,C or G
agtacttctagaattaattaaggcgggcagatcacctgaggtcaggagttcgagaccagcctgaccgacatggagacaccccgtctctactaaaaatacaaaattagccaggtgtggtggtacatgcctgtaatctcagctactcgggaagctgaggcaggagaatctcttgaacccgggagacggaggttacggtgagccaagattgtgccattgcactccagcctgggcaacaagagtgaaactcttgtctcaaaaaaaaaaaaaaaanttttnnggggaaaaaagnanaaaaanccttttcaaattttttnancttnaaaangggnaaantttngggggnanttnntttnaaaannaatncctttttttggnttnaaaaaaannttccccnggccggggggntaanncntgaantcccaccctttnggnaggttnnggnggccaaatnncntggggnnnggatttcnaaaccaccttgnccgaatnnggnaaacccccctttttttttaaaattanaaatttnccccggnggggggggnaaatgcctgnaatnnnanttnctngggnaacnttgggggccnggnaaaatttttttaancccnggnaaaacgggggttncggnggancccaaaaattggcccctttggccnntccnccccggggcnaaaaaaangnaaaattnttttttnaaaaaaaaaaaaaaa

SEQ ID NO: 19285 - DNA, 201 bp, Homo sapiens
  misc_feature 185, 186, 201: n = A,T,C or G
agagatgttacgtcaaagaacacaaaatttcagttaagtgaaataagttcaagagatctattatacaacatggtggctacagctaataacaatacattgtatagagttgacctactgcaaccacaaattcaaacaggcatggatcaaaaatatttttaaaaaagtaagatttaacaaaaaaaaannaaaaaaaaaaaaaan

SEQ ID NO: 19286 - DNA, 303 bp, Homo sapiens
  misc_feature 19, 20, 21, 22, 250, 253, 261, 275, 281, 282, 283, 284, 285,286, 287, 288, 301, 302: n = A,T,C or G
tgaccgggccccccctcgnnnntacttctagaaattaattaaggcgggtgggggcagaaatcaaatcagcccaaggatatagttaggattaattacttaatagagaaatcctaactatatcacacaaagggatacaactataaatgtaataaaatttatgtctagaagttaaaaaaaaaaaaaaaaaaaaaaaaaaaaaaaaaaaaaaaaaaaaaaaaaaaaaaaaaaaaaaaacaaaaaaaaaaaaaanaancccccccnaaaaaaaaaaaaanaaaaannnnnnnngcccccccccccnng

SEQ ID NO: 19287 - DNA, 411 bp, Homo sapiens
  misc_feature 1, 2, 187, 188, 189, 190, 192, 207, 208, 214, 216, 222, 224,226, 227, 229, 230, 232, 237, 238, 247, 248, 250, 253, 261,262, 273, 280, 281, 287, 289, 293, 297, 298, 304, 317, 321,323, 336, 346, 349, 375, 381, 383, 385, 388, 392: n = A,T,C or G
  misc_feature 394, 401: n = A,T,C or G
nnggtacttctagaattaattaaggcgggtgtctataataccagctgtttgggaagctgaggcaggagaatcgcttgaatctgggggacggaggttgcagtgagccaagatcgtgccactgcactccagcctgggcgacagaagtgagtactccatcgaaaaaaaaaaaaaaaaaaaaaaaaaaaannnngnccccccccggggggnnccccantncccccntntnngnngnttttnnccccccccnncnggnccattttnncaaaaaaaatnaaaaaannaaaaananaaanaaannaaaaanaataaaaaaaaanaaananaagaaaaaatatnaaaaaaaaanaanaaaaaaaaaaaaaaaaaataaaaatnaaaatntnanaanaaananagaaaanttataaataa

SEQ ID NO: 19288 - DNA, 669 bp, Homo sapiens
  misc_feature 277, 309, 310, 311, 312, 313, 314, 315, 316, 317, 318, 319,320, 321, 322, 323, 324, 325, 326, 327, 328, 329, 330, 331,332, 333, 334, 335, 336, 337, 338, 339, 340, 341, 342, 343,344, 345, 346, 347, 348, 349, 350, 351, 352, 353, 354: n = A,T,C or G
  misc_feature 355, 356, 357, 358, 359, 360, 361, 362, 363, 364, 365, 366,367, 368, 369, 370, 371, 372, 373, 374, 375, 376, 377, 378,379, 380, 381, 382, 383, 384, 385, 386, 387, 388, 389, 390,391, 392, 393, 394, 395, 396, 397, 398, 399, 400, 401: n = A,T,C or G
  misc_feature 402, 403, 404, 405, 406, 407, 408, 409, 410, 411, 412, 413,414, 415, 416, 417, 418, 419, 420, 421, 422, 423, 424, 425,426, 427, 428, 429, 430, 431, 432, 433, 434, 435, 436, 437,438, 444, 448, 454, 459, 470, 471, 473, 487, 500, 503: n = A,T,C or G
  misc_feature 505, 517, 537, 538, 539, 543, 557, 573, 612, 627, 634, 643,649: n = A,T,C or G
agtacttctagaattaattaaggcgggcagatcacctgaggtcgggagttcgagaccagcctgaccaacacagagaaacctcgtctctactaaaaatacaaaattagccaggcgtgatggtgcatgcctgtaatcccagctactgggaaaggctgaggcaggagaatcgcttgaacccgggaggcagaggttgtagtgagccaagatcacaccattgcactccagcctggacaacaagagcaaaagtctgtctcaaaaaaaaaaaaaaaaaaggatnagaaaaaaaaaaggttgaaacaaacagaaaannnnnnnnnnnnnnnnnnnnnnnnnnnnnnnnnnnnnnnnnnnnnnnnnnnnnnnnnnnnnnnnnnnnnnnnnnnnnnnnnnnnnnnnnnnnnnnnnnnnnnnnnnnnnnnnnnnnnnnnnnnnnnnnnnaacatncccnttttcnccagntggcgtaatanncnaaaaggccccaccnatcgccttttccnaananttgcccaccttnatgggcaaatgaaaatttgnnngccntaaatttttttgtnaaaattcgcgtaaaantttttttgttaaaccagctttttttttttaacaaaattnggcccaaaaattcgnaaaaaanttttttttntaaatnaaaaataatccccccccaga

SEQ ID NO: 19289 - DNA, 262 bp, Homo sapiens
  misc_feature 3: n = A,T,C or G
ttntagaattaattaaggcgggggctggcaggtaggagttctaaaactttttggtcttgggcccctgttatactcttaaattagtaaggaccccaaggagatttgtttatgggcttattatcaatatttatcatttctaatacaattagaaattaaaattgaataatcaaaaatgttaatttattaatttctttaaaaataatagtaaacccattacagattaaaataaataaaatttgtaccgaaaaaaaaaaaaaaaaaa

SEQ ID NO: 19290 - DNA, 751 bp, Homo sapiens
  misc_feature 264, 265, 269, 271, 273, 275, 276, 278, 279, 283, 293, 297,298, 299, 308, 320, 322, 327, 336, 340, 349, 351, 354, 357,358, 361, 372, 376, 385, 386, 387, 389, 394, 401, 403, 406,409, 410, 432, 438, 446, 454, 458, 460, 470, 472, 476: n = A,T,C or G
  misc_feature 477, 480, 482, 484, 486, 489, 492, 495, 503, 506, 510, 512,517, 518, 530, 533, 544, 547, 548, 555, 573, 577, 581, 585,587, 589, 590, 604, 606, 634, 635, 647, 648, 650, 654, 658,659, 661, 663, 669, 670, 677, 682, 685, 687, 694, 696: n = A,T,C or G
  misc_feature 700, 703, 704, 715, 722, 726, 728, 741: n = A,T,C or G
agtacttctagaattaattaaggcgggtcaagattcattaggcaaactttggtttaagtaaacatatgttcaaaatcagattaacagatacaggtttcatagagaacaaaggtgatcatttgaagggcatgctgtaatttcacacaattttccagttcaaaaatggagaatacttcgcctaaaatactgttaagtgggttaattgatacaagtttctgtggtggaaaatttatgcaggttttcacgaatccttttttttttttnnaaangnantnncnntttnttcccccccngaannncataaccgnaatttgggttantnggaancctcccccncccnatttaaggnanttntcnngcntaacccccctnaaanacctggggnnnanggggnccccccncnttnccnngaaaaatttttgttttttgaanaaaaangggggttncccccgtntggncnggggaggggntntttnnttngncntnggnaanccncccccttnaancctncnaaaannggcggggaattnaangggggaaaaanccnntggcccncgggggggggggtttttnaaanaaantttngnannaaaccttttaaaancngttttttttttttccagggggggggggnngacatttttggnntncttnggannananccccannggttttnaaaanttncnatccccntngaantcnnaaaattttttnaaaaaanagangngcccgggtttttntttaaaaaaa

SEQ ID NO: 19291 - DNA, 327 bp, Homo sapiens
  misc_feature 29, 34, 45, 46, 54, 55, 56, 68, 88, 92, 93, 110, 130, 136,218, 236, 237, 260, 264, 271, 275, 299, 304, 320: n = A,T,C or G
agtacttctagaattaattaaggcggggngattntctcctagggnnatgtccannnggggtttttaanacagcacaaactgccaagtnctgnntttttcaaccgactganatcactttgggatattcttnctgcancactgcaaagttttagttttttaagaaaatactcatgcaccatatatatatatatattcattcccacccctttttttaaaanacggtctttattggggtnngcacctccatccttgatcttgtnagcnatgctgntttngctgattagacgggttagagtagnctctncgcgaggtttgttaanaaaagtt

SEQ ID NO: 19292 - DNA, 244 bp, Homo sapiens
  misc_feature 41, 89, 96, 98, 106, 111, 115, 130, 133, 140, 145, 146, 147,148, 149, 153, 156, 158, 160, 163, 171, 172, 175, 189, 192,204, 206, 208: n = A,T,C or G
agtacttctagaattaattaaggcgggctaatttaactagncactcacagatgacttttctttaataaagtcccttttcctatctctantaaaaananaaaaaaanaaaanaaanataaaaaaaaagggnccnccccccnggggnnnnnccangcncncncangagaatgnnttntacccccccccacngangttgtttttaantnanatcatgccactgcactccagcctgggcaacagagca

SEQ ID NO: 19293 - DNA, 429 bp, Homo sapiens
agtacttctagaattaattaaggcggggtgggggtggtcagacacttttgttagaaccatgtgaatggcattgttttttctgtattgcaaattagtatttctaccactctccccaggcctacacgcccagacacacacatacccaaccaaaaaaatctcccaagctcctctcttaggtatgtttccttattattcagtttttctgggaacaactgattgcataagaatatagaaccacctggaaggtgttaaatagaatctctaagaaattaggaataatttggatttgattagaatgaaagttttaaaaatcaagaatgccagtgagcgtttgtcatataaaactatctatagatactattggtactgatcctgggttgatttaataatcttagaaatgatttagagacaaagacatatttgaaaata

SEQ ID NO: 19294 - DNA, 119 bp, Homo sapiens
ggtgaccgggccccccctcgaaagtacttctagaaattaattaaggcgggggaggggcggcctgccctcatctcatttctattaaacgcctttgccagctaaaaaaaaaaaaaaaaaaa

SEQ ID NO: 19295 - DNA, 421 bp, Homo sapiens
agtacttctagaattaattaaggcgggcttgacgacaggctatttgaaatatccactcagagataataaaagaaaaagcatgaagcatgcctacaagatctagaaaatagcctcaaaagggcaaatctaagagttattggccagtagagagagagatagcagagtagaaagtttattcaaagggataatcacagagaacttcccaaacctagagaaagacatcaatattcaagaacaagaaagttatataaaaacaagcagatttaaaccttattaaataagactacctcaagacatttagtaatcaaacttcaaaagggtggagaatacagaaaggatcctaaaagaagcaagagaataaaaacaaataacatgccaagaaccttctatatgactggcagcaaatttctcagtgaaaacc

SEQ ID NO: 19296 - DNA, 639 bp, Homo sapiens
  misc_feature 244, 245, 278, 279, 310, 322, 352, 380, 386, 406, 420, 442,448, 476, 484, 493, 522, 533, 548, 566, 592, 594, 595, 596,598, 602, 637: n = A,T,C or G
agtacttctagaattaattaagggggggcgttcttcgtaaagataaggatcagttcatcaagaagatacaacagtcctaaatgtgtaacttttataaaacagtatacccaacaattgcagaatattgttttaagtagacatgaactgctcaacaatatagaccaaatgctggaccataaaataagtcacactataattccaaaagggaataaaatcattacatggtatattgttaaacccacannagaaaaaaaaaaaataaaaaaaaaaagagcggnncgccacccgcgggggggaggcttccaatttncgccctataggnggaggtccgttattacgccgccgcctcacntggcccgtcgttttttacaaaccgtcgntgactngggggaaaaaccccttgggncgttacccaacttnaaattcgccttgcagccacatncccccntttttcgcccagctgggccgtaaattangccgaaanaagggcccngcacccggattcggccctttcccaaacantttgccgccancccttgaatgggccnaatgggaaattgtaagcngtttaaattatttttgttaaaaaatntnnntntttnaaacttttttggttttaaaatcagggcttattttntt

SEQ ID NO: 19297 - DNA, 447 bp, Homo sapiens
  misc_feature 1, 3, 13, 32, 38, 39, 43, 52, 72, 74, 75, 89, 111, 134, 139,152, 179, 192, 223, 245, 269, 290, 298, 299, 310, 330, 339,347, 359, 374, 375, 378, 382, 393, 394, 396, 397, 401, 405,406, 407, 408, 409, 410, 411, 412, 413, 414, 415: n = A,T,C or G
  misc_feature 416, 417, 418, 419, 420, 421, 422, 423, 424, 425, 426, 427,428, 429, 430, 434, 435, 439: n = A,T,C or G
nantacttctagnaattaattaaggcggggtnagaatnngccnagttccctnaactttctctttacccttancnnaaatgtatacatancttctggcagatatcttttcangatttaatatgctcttaaaatgncgatngatgtgacacctnataaaagaggagctatgaactgtgaanaactcttaaaganaatgtcattgaacaacaataaaaatatgcantgctcaactgcttgattctggncctcttattgatataccttctganacagaaaggtctgtttttatngaaactcnngtgcccccccnagaaaggactccctaaatgnaatggtttntaaaaatnaccttggccccnacctttttggaggtnnttnaatnaaaaaaaaatnncnngggncaannnnnnnnnnnnnnnnnnnnnnnnnnaaanngccncccccccc

SEQ ID NO: 19298 - DNA, 388 bp, Homo sapiens
  misc_feature 89, 99, 126, 183, 269, 305, 332, 358: n = A,T,C or G
agtacttctagaattaattaaggcgggtccatagacacatttatttttacttttatatttacatttaatttaatttttttttttcaaanacagggtctnactctgctgtcctggctggagtgcagnggtgcaatcatggcttactcaacataccttaaaaatttttttattctgaaataaaancgggatgcttttaaaaaaagaaaaaagaagagaacaaaaaagtcctccagtaaatttaaaatatggtagtcaaggccgggcacggnggctcacacctgtaatcccaatactttgggaggccnaggcaggtggatcattagggtcagganatcgagaccatcctggctaacatggngaaaccctgtctctactaaaaaatacaaaa

SEQ ID NO: 19299 - DNA, 223 bp, Homo sapiens
taccgggccccccctcgagagtacttctagaattaattaaggcgggagaatcagagatcttgaagatacggctgttgaaattatgcagttggaggaggagcagaaagaaaaatgaatgaagaaaagtgaatagagcctaagggacctgtagaacatcatctgatgtaccaatattcacattaaggggaagcccaaagaagagcagagaacaaaaaaaaaaaaa

SEQ ID NO: 19300 - DNA, 159 bp, Homo sapiens
  misc_feature 62, 125, 128, 148, 157: n = A,T,C or G
agtacttctagaattaattaaggcggggttctagagagaaaggtgatcgttttagattattngtctctctgtaatctaaaatccactgtgcctggcctataacactatttcttaaaacaaaacanaangaccaaagaacaagctttanacaaccaanat

SEQ ID NO: 19301 - DNA, 542 bp, Homo sapiens
  misc_feature 3, 312, 314, 333, 344, 353, 365, 366, 378, 387, 402, 419,441, 447, 464, 470, 487, 492, 514, 519: n = A,T,C or G
agnaattaattaaggcggggtgcggtggttcatacctgtaatctcagcactttgggaggttgaggcaggaggatcatttgggcccaggagttcgagatcagcctgggcaacataggggggcccatctctataaaaaatacaaaaattagccaggcgtgggtcacagctacttgggaggctaaggtgggaggatcgattgagtccaggagtatgaggctgcagtgagctgtgattgcaccactgcactccagtctcggcgacagagcgagaccctgcctctgattaattaattaaaggagaggacagcaagantngattcctgaccaggcaaanaccaaatgctnttagggaanaaaaaggaggtnncattttattcancttcctttntttcaaaaggctaanccctaagtagttgaatnccaaaaaaaattggcctttggngggggntggtttaaaaacagggntttacnccccccctcccttcccnccttntttttttttttttttgccaaanatttnccaaaaaaaaaaaaaaaaaaaaa

SEQ ID NO: 19302 - DNA, 367 bp, Homo sapiens
  misc_feature 24, 26, 207, 212, 213, 214, 220, 222, 223, 226, 235, 236,245, 247, 248, 250, 253, 256, 266, 271, 272, 273, 275, 286,288, 289, 294, 314, 321, 323, 324, 325, 326, 333, 334, 335,336, 347, 348, 352, 355: n = A,T,C or G
tctgggtaccgggccccccctcgnantacttctagaaattaattaaggcgggcgcctgtggtcccagctactaggcaggttgaggcagaagtattgcttgaacctaggaggcagagtttgcagtgagccaagattgcaccattgcactccagcctgggcaacaagagcgaaactccatctcaaaaaaaaaaaaaaaaaaaaaaaccnttttnnntttttnannaantttcccccnnaattttttngnncnggnaantttttttttnaaaannntnaaaaaaaaaantnnaaacntttttttttttttttttttnaaaaaangnnnngggggannnnttttttaaaannaaanccnaaaaaaaaaaaa

SEQ ID NO: 19303 - DNA, 328 bp, Homo sapiens
  misc_feature 1, 5, 225, 232, 254, 319: n = A,T,C or G
ntagnaattaattaaggcgggtgtggtggcacgcacctgtaatcccagctactcgggaggctgagacaggagaattgcttgaacccaggagatggaggttgcagagagctgagatcacaccactgcactctactagcctgggtgacagagcaagactcccatctcaatctcaaaaaaaaaatagtcatgaattatgcaattattctaattgtatctgcacttacnaagtcanaggtctcctttttcagtccctntgatagtcccacctaagtgctgtcctgctcctgtgaacactttcctgtgcaaccaaacaggaggngccaggttc

SEQ ID NO: 19304 - DNA, 287 bp, Homo sapiens
  misc_feature 29, 37, 38, 46, 47, 63, 92, 96, 109, 110, 135, 142, 162,165, 191, 199, 206, 212, 215, 222, 224, 231, 250, 252, 253,254, 255, 257, 258, 260, 261, 263, 266: n = A,T,C or G
atacttctagaaattaattaaggcgggcngcataggnngggatatnnagaccatcctggctcncgcacaagtgaacgcgaaactctactctntatncaaaatacaaatnngatccgcgctgtgtgtgctggcgcncgcctgnccagctactcgggtaggctnagncagggagaattggccttgaactcccnggaaggcngaacttncagtgngcngagttcncnccactgnactccagcctgggcgactngnnnnanntnngnctnaacaacaacaaaaagttttaa

SEQ ID NO: 19305 - DNA, 263 bp, Homo sapiens
  misc_feature 2, 28, 37, 88, 93, 97, 98, 112, 122, 135, 164, 165, 177,204, 213, 228, 235, 241, 250, 254: n = A,T,C or G
tntaaaattgtcagtctttgagactgcnaaggaattnactagttttcttactataagtatcaaattagatcttaagtgaatcttattnatttntatnnattataaggaacanttttctgggntttttgttgttgntttgtgatggggtcttgtctatagcccannctggagagcagngatgcaatcatagctcactgcagtctnaacctccanggtctggcaatcctnctccctncagcantccaagtantgangtgggagga

SEQ ID NO: 19306 - DNA, 882 bp, Homo sapiens
  misc_feature 159, 161, 162, 163, 164, 173, 180, 186, 187, 189, 194, 196,197, 199, 201, 202, 203, 204, 207, 210, 211, 221, 222, 223,226, 227, 228, 234, 242, 245, 247, 251, 253, 254, 259, 262,263, 265, 267, 268, 271, 277, 278, 280, 288, 289, 300: n = A,T,C or G
  misc_feature 302, 304, 307, 311, 312, 315, 316, 318, 321, 323, 325, 326,327, 328, 335, 342, 348, 349, 351, 352, 355, 357, 358, 360,361, 362, 367, 384, 392, 398, 399, 403, 405, 414, 424, 429,434, 435, 436, 437, 441, 442, 445, 446, 449, 454, 455: n = A,T,C or G
  misc_feature 456, 458, 461, 462, 463, 465, 466, 468, 474, 475, 479, 485,491, 492, 493, 495, 499, 506, 508, 510, 515, 516, 519, 522,523, 525, 527, 528, 534, 539, 545, 547, 548, 549, 552, 554,560, 561, 574, 576, 583, 585, 587, 588, 592, 593, 595: n = A,T,C or G
  misc_feature 596, 600, 613, 625, 628, 631, 639, 640, 641, 644, 652, 658,669, 670, 679, 680, 681, 685, 689, 691, 693, 694, 698, 699,711, 712, 713, 715, 716, 717, 718, 719, 722, 724, 726, 727,731, 741, 743, 744, 746, 756, 764, 765, 767, 769, 771: n = A,T,C or G
  misc_feature 776, 787, 789, 792, 795, 807, 815, 818, 822, 828, 834, 839,847, 849, 853, 869: n = A,T,C or G
agtacttctagaattaattaaggtgggagtgtaaattagttcaaccattggggaagacagtgtggcgattcctaagacctaaagacagaaatactgtttgacccagcaatcccattagtgggtatatacccaaaaaaaaaaaaaaaaaaaaaaaaaaangnnnnccccccccnggggggncccccnntnccccntnnangnnnnttnttnngccccccccnnnggnnngttttnaaaaaaanaantnttantnntagantannantnnttntcatgnntntagatatnntagtacgcttntntnttnaccnntgnnanttntntnnnnattcttntctgatntactanntnntgntnntnnnattangacatattttaggctcnattttttnaatcannatgntnattaagtgnggataagatnatatnataannnntttnntannaanatttnnnantgnnnannanaaggtnnatgnatatcntaaatnnnanatgnaattacntntnttacnnttnaanntncnngggatntaacntacaantnnnccnangttctnnattttaggtattncngggtccntngnnatannanngggncccccagtgatanaaattctttttnatnacntttagccnnnaanagatgggnattttnttttgtacaanntccctttcnnnaggntgtntntnnttgnngaccatctttannngnnnnnccnangnntccnttttgttaantnncnttaggggatnaccccccnntngntnctagnatacatgttananttntgntaattactcaangtctcccnccncccngggggngaaagnccccnaattcgtncnttantaaatagaggtgattnttccccccccccc

SEQ ID NO: 19307 - DNA, 332 bp, Homo sapiens
  misc_feature 39, 44, 46, 51, 56, 61, 64, 65, 86, 95, 102, 106, 110, 129,131, 186, 188, 199, 245, 257, 258, 259, 276, 282, 305, 306,307, 308, 309, 310, 311, 312, 313, 314, 315: n = A,T,C or G
agtacttctagaattaattaaggcggggtgggggaggantatantnagganaaatncctanagnnaatgacaagttgatgggtgcngcaagccancatggcncatntatncctatgtaacaaacctgcncnttgtgcacatgtaccgtagaacttaaagtacaattaaaaaaaaggtaaaaaaatntnaacaggaacantttgttttaaaaaggcttgaatggctttgattggaagatcttttantgtgataaattnnnggaggaaaaattacatnagtctntaagttgccaaaaaaaaaaaaannnnnnnnnnnccccccccccccccccg

SEQ ID NO: 19308 - DNA, 525 bp, Homo sapiens
  misc_feature 23, 30, 35, 36, 38, 42, 44, 46, 52, 58, 69, 72, 87, 90, 93,96, 98, 99, 102, 103, 104, 105, 106, 107, 110, 111, 112,119, 120, 121, 123, 124, 129, 130, 154, 158, 168, 171, 172: n = A,T,C or G
agtacttctagaattaattaagncgagctncctannancagntnanagagcncacccntctatgtagcncantgaagaaaggctatnganatnatngnnccnnnnnnggnnngggacgnnnannccccnngaaggggttggctattaccgggcncttntccatacaanctnnactttttctaggcactaaaagggggaaaaggcttaatagccaaaataattatcaaaagaccctaaagctggggtcctgtacaccatgaaaggattactttcattctcatgtaagggcatgcttttataaaaaacaaacatgggctaggcgcagtgactcacgcctgtaatcccagcaccttgggaggctgaggcgggcagatcacgaggtcaggagattgagatcatcctggctaacatggtgaaaccctgtctctactaaaaatacaaaaagttagccaggcgtggtggcaggtgcctgtagtcccagctactcggaaggcttgagcaagagaatggcgtgaacccggtagg

SEQ ID NO: 19309 - DNA, 554 bp, Homo sapiens
  misc_feature 5, 22, 23, 27, 35, 38, 45, 50, 224, 287, 292, 295, 304, 329,357, 359, 372, 378, 380, 401, 408, 424, 441, 462, 475, 477,478, 479, 488, 489, 497, 498, 499, 500, 501, 502, 503, 504,505, 506, 507, 508, 509, 510, 511, 512, 513, 514: n = A,T,C or G
  misc_feature 515, 516, 517, 518, 519, 520, 521, 522, 523, 524, 525, 526,527, 528, 547, 548: n = A,T,C or G
ccgtncgtttttcacccctganncaanggtaacancangctgggntaccnggccccccctcgaaagtacttctagaattaattaaggcggggtagcagcttcccctggaacagccaggcacatccggggcaggggcctgtgccagtgtggcagccagcacgcttagcagtaggcccagtcgaagttcccagggcagaggctgtcccctccctctttcccttgangtcagctccatcctgaagaggggaacaggggataaggggaggtgaacggtctcgggccccganccctnctncttgctttngggttccgtgtcaactctgcctgtnggtcttttgcctgtttccttcaggcctntntaatttccaagtntttcancngtcccccctcctttttggtcnggttggnttggttgccaacaatnccaattctgtttggaanccttggtccccccggtttttnttttaaaaaaaantnnnttacccccnnaaaaaaannnnnnnnnnnnnnnnnnnnnnnnnnnnnnnnaaaaaaaaaaaaaaaaaannaaaaaa

SEQ ID NO: 19310 - DNA, 218 bp, Homo sapiens
  misc_feature 81, 84, 96: n = A,T,C or G
agtacttctagaattaattaagggggcagggatttagggtcagtgagacggacctcttaatcacttattttgtacacatcnaancagtgacattgngtttctttaaaaatactaggggccagcccgggcacagtggcatgcctgtaatcccagcactttgggaggccaaggtgggcagttcacctaagatcaggagttcaagaccagcctgccaacat

SEQ ID NO: 19311 - DNA, 384 bp, Homo sapiens
  misc_feature 290: n = A,T,C or G
agtacttctagaattaattaaggcggggatgagaaatggacagggaggaccacatagggcataggaaagacagtagagaaggaaattcattccaaatagaggtaagaagatagcagtaatgtgacacatgattttataaaccattccttaatttaagatcttggcagtcttgagaattccattgaagggaatattgtcttctaaaacctacgtcacagccaaaaagccctgcatgttaaacttaccttcagaatgacttttatggtgtgttcagaagtatacaggaagtnttcagccaagactagggcctaactcagcactaggcacagaggtactgaattataagtttttggtgcctattaacatatacgtgttttgaaaccc

SEQ ID NO: 19312 - DNA, 681 bp, Homo sapiens
  misc_feature 305, 307, 308, 324, 325, 326, 330, 331, 333, 337, 338, 340,342, 343, 348, 349, 355, 364, 365, 366, 367, 371, 373, 379,383, 384, 385, 386, 390, 395, 397, 399, 400, 403, 405, 406,407, 408, 411, 412, 413, 414, 415, 416, 418, 419, 421: n = A,T,C or G
  misc_feature 422, 423, 426, 429, 430, 431, 432, 433, 435, 436, 438, 439,440, 441, 443, 445, 446, 447, 451, 453, 454, 457, 459, 463,465, 467, 469, 471, 478, 481, 482, 484, 493, 494, 498, 500,502, 504, 506, 508, 513, 514, 525, 529, 531, 536, 539: n = A,T,C or G
  misc_feature 540, 541, 543, 544, 548, 554, 561, 569, 583, 588, 592, 602,617, 618, 625, 627, 632, 633, 637, 640, 646, 647, 662, 664,665, 673: n = A,T,C or G
agtacttctagaattaattaaggcggggaacatcacacaccagaccctgttgctgggtgggggactgtgggaggtatagcattaggagaaatacctaatgtaaatgacgagttgatgggtgcagccaatcaacatggcacatgtatacctatgtaacaaacctgcacgttgtgcacatgtaccctagaacttaaagtataattttaaaaaaaaaggaataattaatcacctatcaaattttaaaaaaaaaaaaaaaaaaaaaaaaaaaaaaaaaaaaaaaaaaaaaaaaaaaaaaaaaaaaaaangnncccccccccggggggnnncccnnancccnntntnnagggnntttttnccccccccnnnngggncnttttanaaannnnaaangatanantnnttntnnnnatnnnnnntnntnnnatnatnnnnnanntnnnnancnnnggtnannttntnaatntncncncnataaatnttnnangggattatnnggtntnantnanantggcnnaattggaccancaananccttncannnanngggnccttangtcaccncttagatnaaaaaatttttatnggctnccanaaatctccanttttgaaacattcannttgaacncnaaaannttcnccnggaacnntacccttggaagtantnnggaaaaanattaacca

SEQ ID NO: 19313 - DNA, 559 bp, Homo sapiens
agtacttctagaattaattaagggggaaatagggaataaacaacgctaagcatagttgtactatctcagatagtgatagaccaggataagaggttagaaagtgaaggtgaagtgctcttgttttcctgagtaacactcttactccagatacatatacaggtcactcaactccttcaatttgtaaatctctggttaaatagaaaggtagcagatcagccctccttgatctctgccaacttaatatttgaacagagatttaaaggaaaaaatattacagaagtgggaatcctcaaaatactttctaaaactagcaaagtgctgggattataggcataagctactgcacccatctcagaatttgtctatgtttacaatattatcaatgggtagacagctaattgcacagaatataaatgaggagaggtagatttttattaatgtgtacattttccttaattcctgatttactcaggcccaggcttctttgtttctggtcttggatctatgggcctgtgtaaatctttgtcacttagctaaaaagggatttctttgaaaatcc

SEQ ID NO: 19314 - DNA, 184 bp, Homo sapiens
  misc_feature 134, 145: n = A,T,C or G
ggttaccgggccccccctcgtaaagtacttctagaaattaattaaggcggggtttatatgcactttcttccgatctgtacctgagaggtttgtggaaaagatggcaaatggggaataaaaagattttgtgtcancaaaaaaacanaaaaaaaaaaaaaaaaaaaaaaaaaaaaaaaaaaaaaaa

SEQ ID NO: 19315 - DNA, 441 bp, Homo sapiens
  misc_feature 379: n = A,T,C or G
agtacttctagaattaattaaggcgggggatgaagtcaaagtgtacagtttttattacgttttctttctgagtgtttgtttatgcagttagtgataagttatcatcagtttaaaataatgggttataagatattatttgcaagcctcgtggaaacctcaaatcaaaaactacaacagttacaaaataaataaataaataaaaggcaagaagttaaaacataccaccagagaaaatcacctttgctgaaaggaagacagaaagaaagtgaagatcacaaaacaaccagaaaacaaataacaaaatggcaggagtatgtttttacttattaaaaataagatttaatgtaaatgaactaaactctcccgtcaaaagacatanagtggatgagtgaataaaaaaaaaaaaagaccaaatgatctgttgcatgcaagaaacacact

SEQ ID NO: 19316 - DNA, 346 bp, Homo sapiens
  misc_feature 13, 55, 61, 63, 87, 93, 101, 114, 149, 155, 187, 196, 198,203, 212, 221, 227, 231, 232, 246, 257, 259, 270, 281, 284,293, 300, 306, 317, 322, 324, 327, 329, 334, 335, 337, 341,342: n = A,T,C or G
aagtacttctagnaattaattaaggcggggaacatgactgatcccctcaaagcangctcangnctggagtctgcccccaaaagtttnacatanggccaggnatcctctgtgttnctttccctggtcctgaactgtggaaatgccattanactctntctataatgtaactgaaactgctggctgggcncactggctncnacctntaatctcancccttcccnaggctnacgnngaaggattgctcanggccatgtgtncnaaaccagcctngggaacatagnaanaccctgtcnatatttntttggntgatgaacatncccancngananaattnntnggcnngaaa

SEQ ID NO: 19317 - DNA, 429 bp, Homo sapiens
  misc_feature 159, 254, 255, 256, 257, 258, 259, 279, 281, 282, 283, 292,304, 306, 323, 341, 342, 344, 345, 346, 348, 353, 360, 361,362, 363, 364, 365, 366, 368, 369, 370, 371, 372, 373, 374,375, 381, 385, 386, 387, 388, 391, 394, 400, 402, 406: n = A,T,C or G
  misc_feature 419: n = A,T,C or G
agtacttctagaattaattaaggcgggcggatcatgtggtcaggagatcgagaccatcttggccaacacggtgaaaccctgtctctactaaaaatacaaaaattagctgggtatggtggcaggcgcctgtagtcccagctatttgggaggctgaggcanaagaatggcatgaacccaggaggtggagcttgcagtgagccaagatcatgccaccgcactccagcctgggtgacagagcgagactccgtctcatnnnnnnaaaaaaaaaaaaaaaaaaangnnnccccccccngggggggacccnantcccccttaaaaggagntttttccccccccccccnngnnngnttttnaaaaaannnnnnntnnnnnnnntttttncatnnnncanatncgctancnttcnttattgaaggctnaacttttttt

SEQ ID NO: 19318 - DNA, 631 bp, Homo sapiens
  misc_feature 226, 360, 381, 383, 387, 390, 391, 405, 408, 409, 410, 411,414, 426, 433, 434, 436, 438, 443, 444, 445, 449, 450, 455,463, 466, 477, 478, 484, 485, 486, 489, 490, 500, 501, 502,503, 506, 509, 510, 511, 512, 516, 527, 550, 556, 568: n = A,T,C or G
  misc_feature 598: n = A,T,C or G
agtacttctagaattaattaaggcgggggacgggtgggtgcagtggctcacatctgtaaccccagcactttgggaggctgagatgggcagatcacttgaggtcaggagttcgagaccagcctggccaacatggtgaaaccccatatccattaaaaatatttaaaaattagccagacatggtggcacgcgtctgtggtcctagctcctcgggaggctgaggcagganaatcgcttgaactcgggaggcagaggttgtcatgagctgagctaacaccacggcacttcagcctgggtgacagaatgagactctgtgtcaaaaaaataaaaaataaaaaatctaagggctcaggaaaaaaaaanaaaaaaaaaaaaaaaaaaaancncccnaannccaaaaaaaaaatnaannnnccncccccccccccnggggggnnancnaattnnncctnngaggngggggttnttnccccccccccnncggggnnnttnnaaaaaaaaannnnggnttnnnnaaanccttggtttgngggggccccaaacccaaactatnaatttngtttcttggaanataaagttttatttgaaaacataaccaccntcagcccaacccacttttaaggtccattttttt

SEQ ID NO: 19319 - DNA, 465 bp, Homo sapiens
  misc_feature 285, 288, 289, 290, 299, 300, 314, 317, 319, 320, 323, 326,330, 344, 347, 350, 354, 362, 367, 369, 371, 385, 435, 445,451: n = A,T,C or G
agtacttctagaattaattaaggcggggtggtcatcaaaatagctacaaaccatactaaattattccatttgcaacttatccccaacaggtggtgaagcagtattttccaatttgaagattcatttgaaggtggctcctgccacctgctaatagcagttcaaactaaattttttgtatcaagtccctgaatggaagtatgacgttgggtccctctgaagtttaattctgagttctcattaaaagaaatttgctttataaaaaaaaaaaatctttaaaaatttaanggnnnccccccccnnggggggcccccatnccncnnttnagngggntcatttaccccccnccnagnggcngatttttnaaatntnanaatatgacatgctntggaaatcactgtatacgaattcatctgcttatggatatgttattgcttnttatttttgnctgttnggaataaaactgct

SEQ ID NO: 19320 - DNA, 320 bp, Homo sapiens
  misc_feature 39, 41, 42, 46, 52, 67, 140, 153, 158, 159, 161, 182, 183,185, 189, 195, 199, 205, 206, 207, 216, 217, 220, 221, 230,232, 240, 243, 246, 251, 253, 256, 273, 278, 308: n = A,T,C or G
ccccctcgagagtacttctagaattaattaaggcgggangnnatanctccanctaaaaattacagantaaagttccctgattcttaatgtgtaatgtctgccctatgtgtacatacacaatataattatacatctgtgcntataagagaaaancaaannanaaaaaaaaaaaaaaaaaattnngncccnccccgngggnggcccnnnaacccccannagnngggattgtntncccccccnccnggnggtcnanatnaaaaaaaaaattggaangatanaaacaagatagaaaatgaaaattttgtcangagtttcagata

SEQ ID NO: 19321 - DNA, 509 bp, Homo sapiens
  misc_feature 187, 335, 341: n = A,T,C or G
agtacttctagaattaattaaggcggggtttcaccatactgaccaggctggagtgcagtagtacaatcacagctcactacagccttgacctccccaggctcaggagatcttcccatctcagcctcccaagtagctgagactaaaggtgcacaccaccatgcccatctaatttttttgtatttttcanagatagggttttgctctgttggccaggctggtttcaaactcctggcctcaagcacctcggccccccgcagtgtgctgggattacaggcatgagccaccatgcctggccaaaattttttttatgtaaatctttctgataaaaatttcanatccanatggcttgactggtaaatcctttcaaataattaaggagggagtaatatgaatcccacaaaaacttttagaaaacatagaagacaatacttcccaaagtaattttatgaggccagtgttaactctgataccaaaaccaaacacctaacaaatagaccaggagtcagcaa

SEQ ID NO: 19322 - DNA, 361 bp, Homo sapiens
  misc_feature 20, 21: n = A,T,C or G
ggtaccgggccccccctcgnnaagtacttctagaattaattaaggcgggaatatcatcgccccattcagcctgaagaagttacagaagatggatctttgtccctctacgactgttaggattaagggttctgctgtaaaagggaggggggaaacatgtcaggggtgtctgaaccagagaaactccatcttgaatagggggtgagtaaaataaggctgagacccactgggctacattcccaggaggttaggcattctaagtcacaggatgagacaggaggtcggcacaagatacaggtaataaagaccttaatgatgaaacaggctgcagtgaagaagctgaccaaaaccaagatggcgatga

SEQ ID NO: 19323 - DNA, 309 bp, Homo sapiens
  misc_feature 291: n = A,T,C or G
agtacttctagaattaattaaggcgggagagcagacatctcttttctttaaataaacatgcccccagcattcggccttagggctctcaccttctctttctttccctaagtcaaagcaaacctctctttcacctgttatagaagtctagctaattcccacttcttaggatgagggaaagatagagcacttccaatgatagtgaatctaaaaagaaatggaagaatttttattatagtggtcacctgtatgagttcttattagacaggtatttttaaaggaaaaaaaaaaaanaaaaaaaaaaaaaaaaag

SEQ ID NO: 19324 - DNA, 512 bp, Homo sapiens
  misc_feature 24, 28, 33, 35, 38, 39, 40, 45, 51, 59, 61, 62, 64, 70, 74,75, 76, 82, 83, 93, 97, 103, 105, 107, 121, 122, 136, 143,242, 281, 288, 291, 331, 339, 349, 354, 356, 390, 414, 417,433, 459, 469, 472, 483: n = A,T,C or G
agtacttctagaattaattaaggngggnggatnanctnnngtcangagttngagaccancnngnctaacntggnnnaacccnntctctactanaaanacaaanananttatccgggcttannggcaggcgcctgtnttcccanctactcaggaggctgaggcaggggaattgcttgaaccagggaggtgaaggtcgaagtgagccaagatcgtgccactgcactccatcctgggcgacagancgagactccgtctcaaaaagagaaaacaaacaaacaacnccaacancanaacaaattatccgggagtggtggtgcacacctgtaatccnagctctcnggaggctganacacnanatttcctggaacccggaagggaagctcaaggganacccttggattcccaccttgggcnaantaacccaaaacttttntttaaaaaaaaaaaacccctgggggnaaaaaaaaanaanaattttttttnaaaaaaaaaaaaaaaaaaaaaaaaaaaaa

SEQ ID NO: 19325 - DNA, 305 bp, Homo sapiens
  misc_feature 286, 287, 288, 289, 290, 291, 292, 296, 297: n = A,T,C or G
agtacttctagaattaattaaggcgggaaagacaatggtaggggcctgtttagggaagagctaggaagagattagcatctcatttctaatgatgtaatacatagaatcttgcaggagcctttagtgaagtgtagtttaagtcatttaatactaaaatttatataaagtgtccagaatgccttttactgtaaataacttattaaaataataaactgcccaaaaaaaaaaaaaaaaaaaaaaaaaaaaaaaaaaaaaaaaaaaaaaaaaaaaaaaaaaaaaaaaaaannnnnnngggnncccccccc

SEQ ID NO: 19326 - DNA, 499 bp, Homo sapiens
  misc_feature 28, 30, 33, 36, 37, 41, 42, 43, 45, 46, 47, 49, 51, 54, 68,71, 83, 85, 87, 90, 91, 92, 94, 96, 97, 100, 106, 112, 113,118, 122, 133, 134, 139, 141, 142, 143, 148, 159, 164, 165,178, 195, 218, 294, 339, 397, 420, 423, 426, 453, 481: n = A,T,C or G
  misc_feature 485, 488: n = A,T,C or G
agtacttctagaattaattaaggcgggngnggnccnntgtnnngnnncngnacntggggaggcagagncgntcagatcacctnantnagnnnangnnttncatacnaacctnnccaanatgntgaaacccttnnctttncnnnaaatncaaaaattatncaggnntctttggtgccanctggtgtttgaaagtanggacctcataggtttacctaaanaacaggtggtttttaagggttatcttagatgtttcacaccggaaggtttttaaacactaagggtagataatttatnagttaccgctcaaaagtatatttattgcaccaggatgttcataangccagtatgatttataaatgcaatctccccttgatttaaacacacagatacacacacncacacacacacacacacaaaacnttntgncttttgatgttacaagatttaatacantttatttttaaagatagatccttttatnggtnganaaaaaaacaat

SEQ ID NO: 19327 - DNA, 114 bp, Homo sapiens
  misc_feature 64: n = A,T,C or G
tgccccccctcgagagtacttctagaattaattaaggagggggggtttggtggaaattttttgntatgatgtctgtgtggaaagcggctgtgcagacattcaattgttattaaa

SEQ ID NO: 19328 - DNA, 579 bp, Homo sapiens
  misc_feature 21, 22, 253, 352, 354, 359, 375, 383, 386, 399, 441, 445,461, 462, 466, 495, 502, 520, 549, 550, 552, 553, 557, 560,561, 562, 564, 565, 569: n = A,T,C or G
ggctaccgggccccccctcgnnaagtacttctagaattaattaaggcgggaaatgcatcaaaagacttaaaggtaaagcgtattacccctcgtcacttgcaacttgctattcgtggagatgaagaattggattctctcatcaaggctacaattgctggtggtggtgtcattccacacatccacaaatctctgattgggaagaaaggacaacagaagactgtctaaaggatgcctggattccttgttatctcangactctaaatactctaacagctgtccagtgttggtgattccagtggactgtatctctgtgaaaacacaatttgccttttggaattctattgaccaagtngnagttnattacctttcaaccancaaatttngcntccaattttaccnttttaaggttccggggcttcaaaaaacctttgttttaaaaangggntttaattaattaccgnntttnaaaaaacgggtggattttattgggggccnaaatttnttacccacctttggtttntcaaaaatttttccccctgggggggaaanncnnaaanggnnntnncccnaaaaaaaaaa

SEQ ID NO: 19329 - DNA, 613 bp, Homo sapiens
  misc_feature 269, 273, 274, 277, 280, 285, 290, 311, 317, 325, 326, 329,336, 339, 342, 345, 347, 351, 354, 357, 359, 369, 370, 376,379, 383, 393, 415, 421, 427, 428, 430, 431, 445, 455, 466,477, 497, 510, 533, 556: n = A,T,C or G
agtacttctagaattaattaaggcgggaggatcacttgagctctggagttcaaaaccaacctaggcaacatagcgagaccctctctctacaaaaaaataataataataataattagctgggcatagtgacacacacctgtagctcctgcttcttgcgaagctgaggccagaaggtaaaggctacagttacctatgattgtgcctctgcactccagcctgggcaacagagcagactcagtgtctcccaaaaaaaggaaaaaaaaaaaatntgtnncancanttttnaaaanggctttaaaaatcgtgggaangatttntttcaaannatnggggctntanctngtntnactnganaancntttttgtaanncccttnttngganattttaaganaataaatttccttaaatttttngagttntaaatnnannctggttagtaaatnttttaaatgncccccctgatnttctctatttngcataaaagcataatggcanactttctttgggngggggttatattcggggggtctntgaaatgcccccataaaaattcncggaattgataaaaattgggcccgtcttaaaggacccaaggggttctttttttaaag

SEQ ID NO: 19330 - DNA, 536 bp, Homo sapiens
  misc_feature 1, 21, 29, 30, 32, 37, 40, 41, 45, 51, 55, 60, 63, 69, 72,75, 79, 86, 93, 96, 157, 164, 172, 194, 195, 200, 201, 205,206, 207, 209, 210, 213, 214, 215, 216, 218, 219, 221, 223,230, 243, 247, 253, 255, 256, 257, 264, 273, 276, 283: n = A,T,C or G
  misc_feature 284, 289, 300, 303, 308, 309, 311, 321, 329, 403, 431: n = A,T,C or G
nactggccgtcgttttccccngaaacaanntntaccnttnnttcntgcccntccnttccnccncagaanaantanaatncattaangcggggnggnagagggggccaaaaaaaaaatattttttttactgtcgggccaattgtgaaaatgaatatcntgcaaanaaattatnctatttttttttcaaagtaatnnctatnncttnnnannctnnnnanntntnaccttanccccaaccctaanctanatgaancnnnccccccncccactcanggntaaatgnnttaanggcggtgcaanatnccccnncntaaacagatncttttaangcagcatgctcgttaagagtcaccaccaatccctaatctcaagtaatcagggacacaaacactgaggaaggccncagggtcctctacctaggaaaaccaganacctttgttcacttgtttatctgctgaccttccctccactattgtcccatgaccctgccaaatccccctctgtgagaaacacccaagaattatcaattaaaaaaa

SEQ ID NO: 19331 - DNA, 387 bp, Homo sapiens
  misc_feature 167, 168, 170, 171, 179, 188, 189, 192, 194, 195, 196, 202,203, 209, 215, 217, 228, 230, 232, 237, 244, 249, 250, 264,275, 280, 283, 284, 289, 292, 293, 296, 297, 300, 307, 318,320, 324, 327, 330, 333, 341, 344, 345, 346, 361, 362: n = A,T,C or G
  misc_feature 363, 365, 366, 368, 374, 375: n = A,T,C or G
agtacttctagaattaattaaggcggggtaagatttgccgagttccttttactttttttaaccttaccttatgtgcctttcttcattgctgattttaatctgtatcctttcactgtaataaactgtaactatgagtgcaaaaaaaaaaaaaaaaaaaaaaaaaaaanngnncccccccngggggggannccnannncccccnnatgggngctttntnccccccccccngngnccganttttaanaaaannacccaaaaaaaaanaaaaaacttangagtnggnnactanccnnggnnacnccccgangacccccaatntngaanaanatnacncccccccnggnnnagggggggcacctgnnncnnantggttnngaggctgagatg

SEQ ID NO: 19332 - DNA, 309 bp, Homo sapiens
  misc_feature 167, 168, 184, 185, 188, 189, 191, 198, 200, 201, 203, 204,206, 207, 215, 223, 224, 225, 226, 227, 229, 232, 239, 245,247, 248, 253, 263, 264, 293: n = A,T,C or G
agtacttctagaattaattaaggcgggaggattgcctgggcctgggagtcagaggctgcagtgagccaggagcaagcctgtgaatagccactgcagtgcagtgggcagtgtggaatagaccccatttcaattaaacaaaaaaaaaaaaaaaaaaaaaaaaaaggggnnccccccccgggggggnnccnnanttccccntnnanngnntttttttncccccccnnnnngnccnttttttnaaaaangnnggggntaatgcctgnnattccaggattttgggaggctgaaacggnaggataacttgaggcc

SEQ ID NO: 19333 - DNA, 775 bp, Homo sapiens
  misc_feature 235, 262, 263, 264, 265, 266, 275, 283, 287, 288, 289, 296,298, 299, 300, 301, 313, 321, 323, 325, 326, 329, 330, 337,343, 345, 347, 349, 350, 352, 354, 355, 356, 357, 358, 359,360, 361, 362, 363, 364, 365, 366, 367, 368, 369, 370: n = A,T,C or G
  misc_feature 371, 372, 373, 374, 377, 378, 379, 381, 382, 384, 388, 391,392, 393, 394, 397, 398, 400, 401, 402, 403, 404, 405, 406,407, 408, 409, 410, 411, 412, 413, 414, 415, 416, 419, 420,423, 424, 425, 426, 428, 430, 431, 435, 436, 437, 438: n = A,T,C or G
  misc_feature 440, 441, 442, 443, 444, 446, 447, 448, 449, 450, 451, 452,453, 454, 456, 457, 458, 459, 460, 462, 464, 465, 466, 468,469, 470, 471, 472, 473, 474, 476, 477, 479, 480, 482, 484,486, 489, 490, 495, 496, 497, 498, 499, 500, 501, 502: n = A,T,C or G
  misc_feature 503, 505, 506, 513, 517, 526, 537, 540, 541, 542, 543, 544,545, 546, 547, 549, 550, 551, 553, 557, 558, 559, 563, 564,566, 568, 569, 570, 571, 575, 576, 577, 580, 581, 583, 584,586, 587, 594, 595, 600, 604, 606, 607, 608, 614, 615: n = A,T,C or G
  misc_feature 618, 620, 622, 627, 632, 637, 644, 645, 658, 664, 665, 673,676, 681, 689, 691, 701, 707, 713, 717, 721, 724, 735, 736,737, 739, 741, 757: n = A,T,C or G
agtacttctagaattaattaaggcgggagatcaaggccatcctggccaacatggtgaaaccctgtctctactaaaaatacaaaaattagccgggtgtggtggcgcacacctgtaatcccagctattcgggaggctgaggcaggagaatcagttgaacccggggggcagaggttgcagcgagccaagatcacaccactgcactccagcctggcgacacagtgagattccgtcgcanaaaaaaaaaaaaaaaaaaaaaaaaaannnnnccccccccngggggggncccnnnttccccntnnnnggggtttttttncccccccntntnnggnnttttttnaaaaanantntnngngnnnnnnnnnnnnnnnnnnnnntannntnntnattnatnnnnttnntnnnnnnnnnnnnnnnnnttnnttnnnntntnntttnnnntnnnnntnnnnnnnnntnnnnntnannntnnnnnnncnntnntntntntanntgggnnnnnnnnntnnttttatnttanaaaactttnaaggggccccnggnnnnnnnntnnntntatnnntttnntnannnncttnnnatnnanntnnatatttnnttttnaaantnnntttttnnccnantnaaaanttttnttttnaaaaatnnggggaaaaaaatnaaaaanntttttttnaanaaaanttaaaatnanggggtttttntttaanttcacnaatntttntcnttttaaaaaannntngnaaaaaaattttttttnttttttaaaaaaaaaagg

SEQ ID NO: 19334 - DNA, 640 bp, Homo sapiens
  misc_feature 106, 108, 124, 141, 143, 145, 164, 167, 178, 199, 211, 224,237, 239, 242, 266, 277, 295, 302, 308, 311, 313, 315, 319,325, 327, 344, 362, 368, 373, 376, 378, 416, 434, 449, 458,461, 475, 526, 552, 572, 574, 598: n = A,T,C or G
agtacttctagaattaattaaggcgggggttgcagtgagcagagagcgggccattacactccagcctgggtaacagagcaagacttcgtctaaaaaaaaaaagcantntaactgaggttttttntaaacaaaagtaatgancntnctaacaagttaatggcaanccnttttgtaaatnttaccaacagggacttcaaanaaacactttganatggtcccatgtnaactgaggattgngngtnggttttcacttgtttcctgatccncagatgaattnccatcggcaatgtttttnttaaacntaaaanccntntncctntttgcncnctacaaattcaaagagngcttttaacgtaaaaagnggaatntaagngantntgaagttcataacaatttctaaaaaatgaaaataaaancctaaagtagttgctttntttaaatagggaatnttataaaanatntgaaattcaacatntactggactttaagcctatatcttatttgataatttaaaattataattagngttcttggggactgaatgcttcctanaaaacctaaatttgcccctntnttttaaaatgtgaaaaagctgctnccaggaaaaaaaaaaccctttttttaaaggcaaaaaaaaaaa

SEQ ID NO: 19335 - DNA, 434 bp, Homo sapiens
agtacttctagaattaattaaggcgggggaactatcattctgagcaaactatcgcaaggacagaaaaccaaacaccgcatgttctcacacataggtgggaattgaacaatgagaacacttggacccagggcggggaacatcacacaccagggcctgtcgtggggtggggacatgggtgagagatagtattaggagaaatatgtaatgtaaatgaagagttaatgggtacagcaaaccaacacggcacatgtatacatatgtaacctgcacattgtgcacatgtaccctagaacttaaagtataatttaaaaaataaataaaaataaaaggataataaagaaatactaagaaaaactgctctgcccatgtatttgataacttagatgaaatttctttaatcaagacacaaacttccaaaatatacacaaggagaa

SEQ ID NO: 19336 - DNA, 159 bp, Homo sapiens
  misc_feature 1, 5: n = A,T,C or G
nttcnagagtttttctagaattaattaaaagtaaatattcaagttataggtatatttaaaggagtgatagacagcttttgaaactgtcattgcaaaactgtcactgagacagtcaaagagatcccacccaaaaaaaaaaaaaaaaaaaaaaaaaaaaaa

SEQ ID NO: 19337 - DNA, 601 bp, Homo sapiens
  misc_feature 430, 443, 540, 544, 567, 579: n = A,T,C or G
agtacttctagaattaattaaggcgggacgactctcggcgaagaacgtctctcatcagagactcttaatagcagagttgaccaagcagaagaattggcgagcttgacgacaggctatttgaaatatccactcagagataataaaagaaaaagcatgaagcatgcctacaagatctagaaaatagcctcaaaagggcaaatctaagagttattggccagtagagagagagatagcagagtagaaagtttattcaaagggataatcacagagaacttccccaaacctagagaaagacatcaatattcaagaacaagaaagttatataaaaaccaagcagatttaaaccttattaaataagactacctccaaggacatttagttaatcaaacttcaaaaagggttgagaaattccagaaagggatccttaaanggaagccaggagnattaaaaaccaaatttaccatgcccaaggaaccctttcttttattgactgggccagccaaaattttcttcagttgaaaaaccctttaaggggcccangganaagaagtgggcatggaccattangctttaaagccncttggaggggaaaaaaagtttt

SEQ ID NO: 19338 - DNA, 423 bp, Homo sapiens
agtacttctagaattaattaaggcgggtgaaactttgttgaggaacaggatatttatatagtttcaatgtatttctccatcaaatacttcttaactaccaaagagaaagaagtgatttttataatgaagaaacctggaagataataccttaatcaaatgtttaaagttgacatcacttgtaaaagcacaactcaacatcatgtgtctccttgacatgatacaaggagacagacaatatgacttctgtgttatttcttgtaaaaatgaaaaacctgcatcatcatgaacaaatagaaaattcaaatttaagggtatttgaaaaaataactggtctgtattcttcaaaaatgtcaaggtcctgaaagacaaggaaatagtaaaaaactattctacattgaagaacattaaaagtaacaaggcaac

SEQ ID NO: 19339 - DNA, 537 bp, Homo sapiens
  misc_feature 137, 139, 140, 141, 142, 151, 158, 159, 164, 165, 166, 172,173, 174, 175, 176, 177, 178, 179, 180, 181, 187, 188, 189,198, 199, 200, 201, 204, 213, 219, 220, 221, 222, 223, 224,225, 226, 227, 228, 231, 233, 234, 235, 238, 240, 243: n = A,T,C or G
  misc_feature 249, 251, 253, 254, 255, 257, 258, 260, 261, 263, 265, 266,267, 268, 270, 272, 273, 274, 277, 281, 289, 290, 301, 302,307, 313, 327, 331, 342, 343, 345, 346, 347, 348, 350, 352,356, 357, 360, 361, 362, 363, 369, 370, 372, 374, 387: n = A,T,C or G
  misc_feature 392, 397, 398, 413, 421, 427, 432, 433, 436, 443, 448, 449,453, 454, 455, 456, 457, 459, 460, 461, 462, 463, 464, 467,469, 471, 472, 479, 484, 485, 487, 490, 493, 494, 498, 499,501, 506, 507, 514, 520: n = A,T,C or G
agtacttctagaattaattaaggcgggtggatcacgaggtcaggagatcgagatcatcctggctaacacggtgaaaccccgtctctactaaaaaaaaaaaaaaaaaaaaaaaaaaaaaaaaaaaaaaaaaaaaaaangnnnnccccccccnggggggnnccccnnncccccnnnnnnnnnntttttnnnccccccccnnnnggnccttttttnaaaaannnnnnnnnnttntnnnggngncanaaagangnannntnngnnanannnncnannngtntggnccctgttnngggctttatanncaagnttctanaaccttttttttcnccangcctttcccanngnnnnancncggnnggnnnnattganntngnattgaaaaagcanagtgncgggnngtgtttggaccgaantgagaacnggttgnagaannatngccccanttttnnattnnnnngnnnnnntgngnanngaatctntcctnnanaanggnnaacnncnccggnnaaaaaanaaaaanggtttcaccgggaaaaa

SEQ ID NO: 19340 - DNA, 329 bp, Homo sapiens
  misc_feature 305: n = A,T,C or G
ggtgccgggccccccctcgagagtacttctagaattaattaaggcgggagagcagacatctcttttctttaaataaacatgcccccagcattcggccttagggctctcaccttctctttctttccctaagtcaaagcaaacctctctttcacctgttatagaagtctagctaattcccacttcttaggatgagggaaagatagagcacttccaatgatagtgaatctaaaaagaaatggaagaatttttattatagtggtcacctgtatgagttcttattagacaggtatttttaaaggaaaaanaaaaaaaaaaaaaaaaaaaaaaaa

SEQ ID NO: 19341 - DNA, 516 bp, Homo sapiens
  misc_feature 52, 54, 57, 75, 283, 312, 324, 335, 352, 357, 368, 369, 372,377, 379, 383, 394, 395, 407, 409, 412, 414, 416, 424, 447,454, 456, 467, 471, 488, 496, 497, 505, 512: n = A,T,C or G
ggtaccgggccccccctcgagagtacttctagaattaattaaggcggggggncnaangataagccttaggaaaanaaaatgaaactatttcatctttggacttttcaatactattggagtgatttttttctttctaaacagggaaaataatgttacaaaagcatcttttttgttatttgtttgcatccctcccccacaccctggtgttttaaaatgaagaaaaaaaccatcaccttttgtacaaaaactcttaatgattaaaaaaacaaacaaaacataaaanaaaaaaaaaaaaaaaaaaaaaaaaaaaanaaaaaaaaaaanaaaacccaaanataaaaaaaaataaagnaaaanatttataagtnnagncgacnancctnccgatcctggnnatatctggaagnanaanananattcttanttcaactttaaatttgcccacanaaccctntnatccccttgtnaatntaactgttagtccaaanaggaacanntctttggnacactangaaa

SEQ ID NO: 19342 - DNA, 211 bp, Homo sapiens
  misc_feature 14, 18, 22, 23, 27, 49, 65: n = A,T,C or G
cgtgcgtttttcancccngcanncaanggtaacaccaggctgggtaccnggtccccccctcgagngtacttctagaaattaattaagggggggcacggtgcctgtaattattaaacatgaattcaattaaaaaaaaaaaaaaaaaaaaaaacccaaaaaaaaaaaaaaaaaaaaaaaaaaaaaaaaaaaaaaaaaaaaaaaaaaaaaaaaa

SEQ ID NO: 19343 - DNA, 304 bp, Homo sapiens
  misc_feature 4, 41, 43, 45, 46, 49, 56, 68, 70, 71, 72, 82, 84, 89, 92,93, 101, 102, 113, 138, 159, 178, 179, 250, 254, 261, 267,285: n = A,T,C or G
gcanttaaccctcctaaaggggccccccctcgagagcgctncncnnctnaataaangctgtgggaggngnnntatgtgcctntnccttntcnnaaccactnncctccctgaangactgaacagaacacattttatatntggatttttacgactaatganggctatcctaatggaaatnnactcactgaaccagttaatttcaaagctttacacagtgctttgagaggataagacttgctggaacaggacnagtngaagtangagatnttttttttttctaatcanacatccacaggaggaaaat

SEQ ID NO: 19344 - DNA, 542 bp, Homo sapiens
  misc_feature 450: n = A,T,C or G
agtacttctagaattaattaaggggggaagtgttcagaaacttattatacacggattcttccaaatggtgaaaaaaccactagatcctggttactttattcaacctcaaaagattctgtgttttgtctatattgcaaactctttggggaaggaaaaaatcaactgaaaaatgaaaatgggtgcaaagattggcaacatttaccacatattcttagtaaacatgaagaaagtgaaatgcacatcaacaatagtgttaagtactcaaaattaaaatctgatctgaaaaaaataaagctattgatgctgcagaacgcagattatatgaaaatgagaaaaatgatggtgtgctgttgttgtacaccgtaatatacctgagttgttttttggcatgatgatcagaatcttacattactcagaaaacatctgtcctgcaatagtcagtactattgngttgtaagtctcctctacagagtaacttgcagcagttccttagcaataagtatgatagccaataaatagccaaagaatgtttcccttcttaa

SEQ ID NO: 19345 - DNA, 455 bp, Homo sapiens
agtacttctagaattaattaaggcgggcagtccactcccctggcttctcctaatagctcctcatagtggcaatgcccagacccagatgtcccatccccaccagatgcccatggctgcttcacagcaaacacgtcccaatctaagcccacttctctgttcttcctcctgcatctcccatttcagtgaataggaacgccccccactcaggcccccaagccatgaacgtgggcataatccaatgtcgtcctgcttggcgagcccaatcaccaagcttcctgaacagctcctaaccacaccccactccatgctcatgtcctttccctggtctgcctcatctcctctcacctagactcatcatggcactgacagaggaagatgagtggtgacaagccaagaactcaggccaggctgcccagggtcaaaccccagctctaccactggggaaccttgggcaa

SEQ ID NO: 19346 - DNA, 431 bp, Homo sapiens
  misc_feature 19, 20, 21, 33, 53, 409, 411, 412, 413, 414, 415, 416, 419,420, 421, 422: n = A,T,C or G
gtgccgggccccccctcgnnnagtacttctagnaattaattaaggcgggcagnatcacgaggtctggagattgagaccgtcctggctaacacagtgaaaccccgtctctactaaaaatacaaaaaattagctgggcgtggtggcgggcgcctgtagtcccagctattcgggaggtgaggcagtagaatggcatgaacccgggaggcggagcttgcagtgagctgagatcctgccactgcactccagcctgggtgacagagcgagactctgtctcaaaaaaataaaaaagcttttgccaatatttaaaatatgacttgatgtgagagtcttaatttcttctacgcagtatacagatatatagcattcctgtcatttagcaggggtgatagcaaaaaaaaaaaaaaaaaanannnnnnggnnnnccccccccg

SEQ ID NO: 19347 - DNA, 438 bp, Homo sapiens
  misc_feature 271, 296, 300, 301, 308, 309, 310, 320, 321, 325, 326, 331,336, 338, 342, 349, 355, 357, 362, 369, 375, 377, 381, 385,389, 394, 397, 402, 403, 420, 421, 423: n = A,T,C or G
gtaccgggccccccctcgagagtacttctagaattaattaaggcgggtggatcacgtcaggagatcgagaccatcctgactaacacagtgaaaccccatctctactaaaaatacagaaaattagctgggcgtggtggcaggcgcctgtagtcccagctactcgggagactgaggcaggagactggcatgaacccgggaggcggagcttgaagtgagctgagatcgcgccactgcactccagcctgggcgacagaacgagactccgtctcanaaaaaaaaaaaaaaaaaaagggggngggnnggggggnnnccccctttanncccnnccttnggggngncccnggggggnggtttntnggggngggaaantaaaancntttnggtnaaanggggnaanccccnnttttttttaaattcccnnanaaaaaaaaaaaaaaa

SEQ ID NO: 19348 - DNA, 487 bp, Homo sapiens
  misc_feature 46, 52, 59, 62, 75, 81, 86, 96, 102, 108, 116, 117, 119,123, 125, 130, 136, 137, 140, 154, 155, 156, 160, 170, 179,182, 187, 193, 200, 203, 212, 213, 227, 229, 235, 237, 252,267, 269, 274, 276, 277, 278, 284, 300, 308, 309, 311: n = A,T,C or G
  misc_feature 319, 323, 326, 327, 341, 356: n = A,T,C or G
ctcgagagtacttctagaattaattaaggcgggagctacaccaccnactttnctgggtntgnagcttgcggggtncaaatnactgnacttagcctncataantgtttnaaccaatnncntatnanaaatntctctnnctnccccgcaacaactnnntctntctccctatntactatctnttntgatnttctgnagaaccntanaaaagcagnncatgttttatacanantgattncntgatgccatatatangaaaatgaccataangngtgangnnncccccnccgggggggagcccanacaccccnnanaaggagtnttancanncacccccgttgggntaggccatgcatggnggctcatgcctgtaatcctagcactttgggaggccaaggtgggcagatcacttgaggtcaggagttcgagaccagtctggccaacatggtgaaaccctgtctctactaaaaatacaaaaattagccaggca

SEQ ID NO: 19349 - DNA, 570 bp, Homo sapiens
  misc_feature 1, 14, 41, 42, 43, 46, 61, 76, 80, 90, 111, 133, 134, 137,138, 139, 140, 142, 145, 164, 165, 167, 179, 183, 195, 197,201, 211, 234, 254, 269, 294, 312, 333, 338, 388, 392, 409,425, 430, 432, 443, 470, 474, 485, 488, 512, 521, 530: n = A,T,C or G
  misc_feature 531, 538, 539, 540: n = A,T,C or G
naagtacttctagnaattaattaaggcgggggggggttaannnaantactaaagaaaactnaaacaagaaaaatgncatnaacctgggangcaaaacttgcaagatgaacnaaaattacaccactgcactccnnccnnnncnacngagagagactccatcctcnnanaaaaaaacaaanttcntccccccccctntncttngttacttgancaatttttaaaaaatagcttaanataaaatttatcctatgcanctgggcacggggggntcacaccttttattcccaaaggganccaaggcaggggggaacnctttgaggtcaggaattcaanaaccnccttgcccacctgggaaaaaccctttttttttcttaaaattccaaatttncccngggttgggggggttttnccttttattcccaccntcttnangaagctttagngaaaaaaaattccttttaaccctggangggngaaatttttgnttnaggaaatttttccccccccctttnaccttgggnaaaaaaaannaaaattnnnttttaaaaaaaaaaaaaaaaaaaaaaaaaa

SEQ ID NO: 19350 - DNA, 198 bp, Homo sapiens
  misc_feature 181, 184, 186, 187: n = A,T,C or G
aagctgggtacccgggccccccctcgagagtacttctagaattaattaaggcgggggcaggttggggggcacaaagttaacatattcttggttaaccatggttaaatatgctattttaataaaatattgaaactcaaaaaaaaaaaaaaaaaaaaaaaaaaaaaaaaaaaaaaaaaaaaanaanannaaaaaaaaaaa

SEQ ID NO: 19351 - DNA, 261 bp, Homo sapiens
  misc_feature 19, 32, 33, 35, 44, 45, 57, 58, 61, 63, 65, 68, 72, 82, 83,86, 93, 251: n = A,T,C or G
attggccgtcgttttacantcaggaaacagcnntnaccatgatnnctggcgcgcccnnccncnanagnactnatagaatacnntgngcggggngggacttccttcctctgtccggagaggcacaggtgtcaccagttccagccaaaggctcctcacaggcgctgtgaatttttgtacaagtcttgtaattatcgaatcaacaacttgtttcaatttaataaaaatgctcatgggaagtgcaaaaaaaaaanaaaaaaaaaa

SEQ ID NO: 19352 - DNA, 190 bp, Homo sapiens
gggtaccgggccccccctcgagagtacttctagaattaattaaggcgggctaatttaactagtcactcacagatgacttttctttaataaagtcccttttcctaaaaaaaaaaaaaaaaaaaaaaaaaaaaaaaaaaaaaaaaaaaaaaaaaaaaaaaaaaaaaaaaaaaaaaaaaaaaaaaaaaaaaaa

SEQ ID NO: 19353 - DNA, 782 bp, Homo sapiens
  misc_feature 31, 37, 42, 45, 47, 60, 68, 83, 85, 110, 120, 277, 281, 288,289, 303, 306, 338, 344, 404, 408, 414, 422, 429, 435, 438,462, 465, 471, 504, 517, 518, 525, 536, 537, 538, 553, 568,578, 586, 587, 601, 608, 616, 620, 626, 635, 651: n = A,T,C or G
  misc_feature 667, 673, 683, 697, 709, 711, 712, 721, 730, 733, 738, 739,746, 775: n = A,T,C or G
agtacttctagaattaattaaggcggggganaggcangcggngancncaccactattgcngaagccanataaaggcctgaatnangagggtggaagggagagaaattctngaggacttgngggatttggcagttgaatgctaagtatgaaagaaggagggaaaaaaaaaagttgaaggcagctttaatattttatgcctaggctaggtgtggtggcttacacctgtaatcccagcactttgggaggctgaggcgggtggatcacctgaggtcaagantttnaaaccannctgaacactgaaantanccatgatcacccttgctgcactctagcatggntgacanaatgagactcaatcccttacttgttttacattcccaaaaaaaaaaagcggccgccaccgngggnggagcnccaattcnccctatngatgantcntattaccctgcgctcaattggccnttngttttncaacgttggtgactggggaaaaccctggcgttncccaaaataaatnngctttgnagcaaaatttnnnttttttttgcagccnggttttaaatttttnaaaaaaggcnccgccatnnatatccgacctttncccaaanaaatttcnccancccttngaattggcnaatttgggaaaatttntaaagcgtttaaattntttttnttaaaaaaancccccggtttaaantttttttaatananntccgctttnatttttttnaanccaannagggccnaaattttgaaaaaaattccctttttaaanttcaaaa

SEQ ID NO: 19354 - DNA, 321 bp, Homo sapiens
  misc_feature 292, 293, 303: n = A,T,C or G
agtacttctagaattaattaaggcgggagggaaaggtaaaggatgatattatgacttgggtgagtaattgagcagttcaattagataaggacaaaaaaaaggagaagttttgggaaacacatccatatttattgaagttttgggagagaggaagaataagccgagtgaaagtccatgggatgggatcaagagaggtccccaaactggaacctgatgaaaaaattaaagaattactactgaatggcccacaaccaaacttaaccaaaccaaaccaccaacaaaacaaaccggnnaaaaaaaaanaaaaaaaaaaaaaaaaaa

SEQ ID NO: 19355 - DNA, 342 bp, Homo sapiens
  misc_feature 15, 17, 29, 31, 33, 34, 45, 49, 54, 83, 108, 112, 132, 146,161, 170, 177, 181, 225, 234, 239, 254, 256, 266, 271, 280,286, 294, 299, 302, 323: n = A,T,C or G
cgcgtgcgtctttcnanccctgcaaacanangnnaacaccatgcngggntaccnggtccccccctcgtaaagtacttactagnaattaattaaggcggggtccgcccncttncttacggctaaaaaaaaaanataccttgtttttncctgtagcgcagcantttaacagnatacctncctnacagccctcagaagaaactgaccctgcctttaccttttctctgnctcctaatnttcanaactatgaaaaagtncntttctcttgnttaantcatccaanttgtgnaactttgntaaancanctctaacaaactaatgcaagntctttaaaattgtattatc

SEQ ID NO: 19356 - DNA, 281 bp, Homo sapiens
  misc_feature 4, 5, 8, 124, 129, 131, 134, 150, 157, 163, 167, 173, 177,180, 185, 186, 187, 190, 210, 215, 216, 217, 223, 227, 232,234, 238, 240, 241, 242, 249, 250, 258, 263, 267, 270: n = A,T,C or G
agtnnttntagaattaattaaggcgggtggatcacggatcacctgaggttaggaattcaagaccagcctggccaacatggcgaaacccccgactctactaaaaaaaaaaaaaaaaaaaaaattnccccngncgngggggggggcccctgnaaccccncctccngggnacccgngggnggnaaaannnttnaaccccaggaaaaaaagggngcagnnncccggnaacnccccntngccncnnnccggggnnaaaaaagnaaaantttntcnaaaaaaaaaaa

SEQ ID NO: 19357 - DNA, 379 bp, Homo sapiens
  misc_feature 6, 22, 30, 38, 65, 66, 67: n = A,T,C or G
cgcgtncgtctttccaaccctncactcaanggtaacantaggctgggtgccgggccccccctcgnnngtacttctagaattaattaaggcgggagaatcgctgggacctgggaggcggaggttgcggtgagccgggatcgctccagtgcactccagcctgggtgatggagggagaccgtctcaaaagaaaagaacagaaatatttgtctaacccaaggccccagagattttctcctatgttttatagatttagaagttttatagttttagctctaacctatagttaagggtcagagtttttccatgtgaatatccagttgttccagcactattattgaaaagtctatcttttcccccattgaattacattggctgcttt

SEQ ID NO: 19358 - DNA, 474 bp, Homo sapiens
  misc_feature 365, 366, 423: n = A,T,C or G
agtacttctagaattaattaaggcggggaggattcgcgcctccatttttccaggagagagcgggataccaagagaaccggaccagctgctggcagggaaactgtcttccttttctccaagatgtacagaaccaaagtgggcttgaaggaccgccagcagctctacaagctgatcattagccagctgctatatgacggctacatcagcatcgccaatggcctcatcaatgaaatcaagcctcagtctgtgtgtgcaccctcggagcagctcctgcatctcatcaaactcggtagattgtgaacacaaatccatacgtcccatggcaagggtttagatattttcatatggcagaatttttcaaagannattcttgttttgtttcagtacctaatattgagcccgggtacttcagttaaagtaaantagttcagccatgaagttccagggaagtaagctcaataaagtaaggggggt

SEQ ID NO: 19359 - DNA, 445 bp, Homo sapiens
  misc_feature 199, 255, 256, 257, 259, 262, 266, 268, 276, 278, 280, 281,282, 283, 291, 298, 299, 313, 315, 316, 318, 319, 321, 323,325, 329, 331, 337, 338, 340, 342, 353, 360, 374, 390: n = A,T,C or G
acttctagaattaattaaggcgggcggatcacgaggtcaggagatcgagaccatcccggctaaaacggcgaaaccccgtctctactaaaaatacaaaaaattagccgggcgtagtggcgggcgcctgtagtcccagctacttgggaggctgaggcaggagaatggcgtgaacccgggaggcggagcttgcagtgagccnagatcccgccactgcactccagcctgggcgacagagcgagactccgtctaatgaannnanatnaagntnaaaaaaanangnnnncccccccnggggggnnccccaattctcccntnngnngngnantttngncccccnncngnggcggtttttnaaaatgnggagcaaaccacantttcattgcccatcgncctagaattaattcccctaaaaatctttgaaatagggcccgtatttaccctatag

SEQ ID NO: 19360 - DNA, 762 bp, Homo sapiens
  misc_feature 205, 206, 207, 208, 209, 210, 211, 212, 213, 214, 215, 216,217, 218, 219, 220, 221, 222, 223, 224, 225, 226, 227, 228,229, 230, 231, 232, 233, 234, 235, 236, 237, 238, 239, 240,241, 242, 243, 244, 245, 246, 247, 248, 249, 250, 251: n = A,T,C or G
  misc_feature 252, 253, 254, 255, 256, 257, 258, 259, 260, 261, 262, 263,264, 265, 268, 295, 296, 378, 382, 387, 388, 420, 434, 438,440, 447, 474, 497, 501, 519, 557, 629, 634, 686, 692, 693,698, 716, 717, 747: n = A,T,C or G
agtacttctagaattaattaaggcggggactaggggagggatagcattaagagaaatacctaatacggatgacgggttgatgggtgcagctaaccagcatgtcacgtgtatacctatgtaacaaacctgcatattctgcacatgtaccccagaacttaaaagtataattggaaaaaaaaaaaaaaaaaaaaaaaaaaaaaaaaannnnnnnnnnnnnnnnnnnnnnnnnnnnnnnnnnnnnnnnnnnnnnnnnnnnnnnnnnnnnttnactggccgtccgttttacaaacgtccnnggactgggaaaaaaccctggcggttacccaaccttaaattcgccttggcaagcaccatccccctttccgcccagctggccgntaanaagcnnaaaaaggcccgcacccgatcgcccttcccaanaagtttgccgccancccngnaatgggnggaatggggaaaattggttaaagccgntaaatatttttggttaaaaaatntcgncggtttaaaatttttttngtttaaaaatcaagccttcattttttttaaaacccaantaagggccccgaaaaattcgggccaaaaaaatccccctttaattaaaaattcaaaaaaagggaaattaggancccgnagaattagggggtttggaagttggttttgtttcccaagtttttggggaaacnaaaagnnaggtnccaccttattttaaaaannaaaccggtggggacctttccaaaccgtttnaaaaagggggcggaa

SEQ ID NO: 19361 - DNA, 297 bp, Homo sapiens
  misc_feature 56, 65, 70, 72, 88, 92, 98, 141, 200, 249: n = A,T,C or G
ccccccctcgagagtacttctagaattaattaaggcgggggatgaagtcaaagtgnccagttttnattantnttctttctgagtgttngttnatgcanttagtgataacttatcatcatgtttaaaataatgggttataanatattatttgcaagcctcgtggaaacctcaaatcaaaaactacaacagttacaaaatanataaataaataaaaggcaagaagttaaaacataccaccagagaaaatcncctttgctgaaaggaagacagaaagaaagtgaagatcacaaaacaacc

SEQ ID NO: 19362 - DNA, 439 bp, Homo sapiens
agtacttctagaattaattaaggcggggtaggctagtttataatagtaacaataatataattgccagggaataaatcaaaatgttaagaatgtatatgattttagtaaaattgataagtgagtgaataaaaaatcatatgccactgtgatggaagatatgtcataaaggtgtcaatatttttataatatgcaaacataatgtaattccacttaagattctggtgcagttttaagaaaatgataaaattattctaaaattcatggaaagaacaaatgtaaaaaaactgtaaataaaattataaaaaaaaggaaagaagaaaagctttgtctagtcatatatttaaagtattataaaggaacaaattttttaaaagtataagacaagggtaaaaagacttatggggattgtctgcaaaatgtaaaaagcagatatcttttg

SEQ ID NO: 19363 - DNA, 524 bp, Homo sapiens
  misc_feature 11, 55: n = A,T,C or G
gtacttctagnaattaattaaggcgggaggatcacctgaggctgggagttcaagnaccagcctgaccaatctggagaaactccgtctctactaaaaatacaaaattagctgggtgtggtgatgcatgcctgtaatcctagctacttgggaggctgaggcaggagaatcgcttgaacctgggaggcataggttgcagtgaacccagatcttgccactgcatgccagcctggacacagagaacgactccgtctaaaaaattaaaaaaaaaagcaaagtggatgataaatgtgaaaagattctgaattttgctaacaaagtcaggttttggagatctaatttctagtcagtaaaattcatcctttctaggatacaatgctaagagttttgataaatgcatagaactgtgttacactgttgtgtaattaccacaatcatggcttagaacatttccatcgttcacccagattccctcctgtcccttcacagccagtctccttctccacccccagctttaaccaacccct

SEQ ID NO: 19364 - DNA, 282 bp, Homo sapiens
  misc_feature 254, 255: n = A,T,C or G
acttctagaattaattaaggcgggcaagttctcgttgatttccacgggccatgccgaccaccaacggagcctggaagaagagcaactcggaaaagcaacggttctctggcactctgggataccgtcaccaccgctgaccgggaaggctgagccctcgtggaggttgcagtgagctgagatcgtgccattgtgatatgaatatgccttatatgctgatatgaatatgccttaaaataaagtgttccccacccgcnnaaaaaaaaaaaaaaaaaaaaaaaaaaa

SEQ ID NO: 19365 - DNA, 769 bp, Homo sapiens
  misc_feature 161, 185, 262, 284, 286, 287, 290, 293, 301, 306, 307, 308,309, 325, 328, 330, 331, 333, 338, 339, 341, 342, 343, 347,350, 351, 354, 355, 358, 366, 369, 371, 382, 385, 405, 410,413, 423, 432, 433, 440, 443, 449, 457, 470, 473, 476: n = A,T,C or G
  misc_feature 482, 488, 489, 494, 506, 513, 520, 521, 522, 524, 533, 539,545, 546, 552, 553, 554, 557, 563, 568, 569, 570, 575, 589,599, 603, 605, 606, 608, 609, 611, 612, 618, 632, 633, 638,640, 641, 642, 645, 649, 653, 654, 658, 659, 663, 664: n = A,T,C or G
  misc_feature 665, 666, 668, 669, 670, 676, 680, 686, 690, 695, 697, 698,699, 703, 706, 707, 725, 733, 738, 742, 744, 745, 746, 748,754, 756, 763: n = A,T,C or G
gtgccgggccccccctcgagagtacttctagaattaattaaggcgggtggatcacctgaggtcaggggttcgagaccagcttgaccaacaaggtgaaacctcgtctctactaaaaaatacaaaaattagccagttgtgatggcgggcgtctgtagtcccanctactcggaaggctgatacagganaattgcttgaacccgggaggcagaagttgcagtgagccaagatcgcgccactgcactccagcctgggtgacagagcnagaccccatcccagaaaaaaanannaanaanaaaaaaanatgcnnnnccccccccgggggggnccncnntntcccnntnnntaanggnngtnnagncccccccngcngncctgtatttanaanctgcgtgtgtgcttttattnctgcntanactagggttntgcacactnnaagttanacnttaganaacttaanagggattactttntgncancttctncatggnntaccnatggcaatttcnttgggantgttctnnngncccaaaaanacttgnattggnnacccannnggnggtttnccccnnnccctnggggaagcccccgnaaaaggcctncctntnnanntnnactttngttaaaccctcccnnaaccntnnncanggtntttnnaaanncccnnnnannnttcccntttnggcccntatngaaanannntttnaanncactttttaccgaaaaancctttttnccccnaggncnnnangaaaangnctgaaanaaaaaa

SEQ ID NO: 19366 - DNA, 441 bp, Homo sapiens
  misc_feature 13, 17, 19, 25, 27, 35, 36, 40, 46, 60, 88, 89, 99, 103,116, 127, 181, 184, 186, 322: n = A,T,C or G
agtacttctaganttantnaaggcngngggggggnnaaanaaaaangcattcaagaatangttacaacaatttcaagcataatgcatnnctaactgctnattnattattgcggccntcctgtcaggntggacatacaggaaataaatgcacttacttggaaaggacggggcaggtttttanacncntgttttacgcgtagcgttcagcatacatcacgttcggctacaagaagctatcataattgtccatcacctggggagggttttcggcgtgggggacaaggctcagggttatcttctcttgctaacttaatcttaatanaaattcctgtttggtgaagggcaggcccaccatctaagcagtgtttcttcttacggagggaaaggaagaaataaaatttattacgccgacccctgagtacctgcccgggcggccgctct

SEQ ID NO: 19367 - DNA, 436 bp, Homo sapiens
  misc_feature 15, 38, 48, 63, 75, 88, 90, 96, 103, 105, 111, 119, 124,125, 127, 131, 132, 135, 140, 152, 172, 173, 175, 200, 201,202, 205, 211, 212, 213, 215, 227, 231, 238, 262, 269, 430: n = A,T,C or G
agtacttctagaatnaattaaggcggggagggaggttngtgagagccnaggctgagcctacanatgaactctttntggcctgccttcntnaactgngtatgtncntatatntatttttnaattnnangaannctnattantgtcaataaacnccttcaatgcctttgtcctnnangttgaaaataaagtaatactcccgnnngancccccnnngngtataataattncctnacaagangttttgtactcatgagctgtgccnacattangcttaaaaacagatgcaattcccggacgtctaaaccaaaccactttcaccgctacacgaccgggggtatactaccggtcaatgctctgaaatctgtggagcaaaccacagtttcatgcccatcgtcctagaattaattcccctaaaaatcttttgaaatanggcccg

SEQ ID NO: 19368 - DNA, 554 bp, Homo sapiens
  misc_feature 295, 319, 351, 361, 389, 393, 395, 404, 418, 435, 442, 445,477, 488, 505, 509, 510: n = A,T,C or G
tagaattaattaaggcgggcgtggcggcacatgcctgtaatcccagctacatgggaggctggggtgggagaattgcttgaacccaggaggcggaggcagaggctgcagtgacccaagattgtgccactgcactccaccctgggcaacagagcaagaccccatctcaaaaaataaataaatatatataaaaaataaaaagctatttctagtttatttcactataaagttttgctttattaaaaagctaataaacagctattaatcacagtgtattaagtatttggtacatttttgnatttcactatctttatactatatnaaatgggaacttgggtacccggggaacctttnaaaattcatntcaaaataaatttttaaaaacctgaggntgantngccttaaanaatgggatgaaaanttttttcctggagccgnatactcnttnaaaatttacttctttttggacccccattaaanactgctgaatncttttcacccctccttntaannaaggaccttccggatttccaaaaaaaaaaaaaaaaaaaaaaaag

SEQ ID NO: 19369 - DNA, 467 bp, Homo sapiens
  misc_feature 37, 38, 41, 46, 48, 53, 54, 56, 57, 65, 66, 102: n = A,T,C or G
tttggattactggccgtcgttttacatccggaaacanntgngaccntngctgnngnncgggcccnncctctagagaacttctagaattaattaagggggatncaatctgatccgagaaatgcattgctaggtaatttcctcattgtgtgaacatcacagagtgtattacacaacacctacacagctaggctacagacctatacaacatattaatgcactgaacagcaactgtaacataatggcaagtatctgtgtatctaaatatatctaaacataggaaaggtacagtaaaaaaaggaaacaatcttatgtggccactacactacaccgcggtcggtcattgaccaaaacatcgttattgtagtgcatgactgcatatctcctcaaatctgacgattctaaacaaagtaaagatgtggaagaattagataaacagaaagaaagtacatccttcaaatagagaatct

SEQ ID NO: 19370 - DNA, 285 bp, Homo sapiens
  misc_feature 206, 218, 224, 225, 226, 227, 228, 232, 240, 241, 242, 245,247, 248, 249, 250, 253, 254, 255, 267, 268, 270, 271, 272,274, 277: n = A,T,C or G
gccccccctcgagagtacttctagaattaattaaggtgggggactagaactgggatgtcttggcttgtatgttttttgaagcttcgattatgatttttaaacaataaaaagttctccacagtgaaaaaaaaaaaaaaaaaaaaaaaaaaaaaaaaaaaaaaaaaaaaaaaaaaaaaaaaaaaaaaaaaaaaaaaaaaaaaaaaccncccccccccccngggggnnnnncccncccccccnnnaangnnnnttnnncccccccccccnngnnngnaanaaaaaaaa

SEQ ID NO: 19371 - DNA, 589 bp, Homo sapiens
  misc_feature 35, 49, 54, 71, 74, 79, 86, 95, 104, 107, 108, 110, 115,118, 124, 126, 140, 153, 156, 161, 178, 181, 211, 213, 223,226, 233, 238, 247, 253, 254, 262, 298, 358, 360, 364, 369,376, 379, 384, 385, 386, 390, 391, 393, 398, 400, 404: n = A,T,C or G
  misc_feature 408, 411, 414, 416, 430, 440, 442, 449, 455, 460, 469, 472,473, 474, 478, 480, 491, 492, 497, 499, 503, 505, 519, 520,560, 568, 576: n = A,T,C or G
agtacttctagaattaattaaggcggggttggatntccgggcacacttnaaganactctatggaaagtctntgnactcnttcatcnagggtgacncatctgganacnncnggaangtnctgctngntctctgtggagganatgattaaaatcnaantcccncaaggacaggaggattntcnacactttgaatttttttaacttcatttttntncactgctatnatnattatcncaaantgcttattnccaatnnaaacgccnacagctgcctcctagaatataaactgtcctgtagtnttattcacctataataacgacttatgatgctttaaagctgtacttgcatttccaagcttntnacanatagntggaganttnaaagnnnaaannantatgnantccntgtnttnaantntgcgttggccaaanccaacaacgncnccccccncgatgngaacncccaactcnccnnnttgngnggtcatatggnnccccncnccgntntgttttaaccaaannagcaaacctgaaagacctgcaggacttacccaaagatgcngagaatanaacagccntcaagttcaacca

SEQ ID NO: 19372 - DNA, 374 bp, Homo sapiens
agtacttctagaattaattaaggcgggagatgtgggtgtgaagtgcaaagctgaacgcctgtttgcttttcaacctcgctttgatcaagattgaaaggcaaggcatggcctccttggggaagaaggagagagatgcggcactgtcctccccttaggagggtttagggacacactcattcatgaaaaccagagagggcggggcgccgtggcgcacacctgtggtcccagcactttgggaggccgggacgggaggatcgcttgatcccaggagttcgaggctgcagtgaacgttgatcgcaccactgcacacaagcctaggcgacagaaaggtcctgcctctttaaaaacaaaaacaaaaaaaaacccttttttta

SEQ ID NO: 19373 - DNA, 652 bp, Homo sapiens
  misc_feature 8, 24, 29, 30, 36, 38, 45, 48, 49, 56, 57, 60, 62, 64, 67,68, 77, 81, 92, 94, 96, 97, 120, 124, 184, 196, 197, 198,199, 202, 209, 213, 221, 222, 225, 228, 230, 238, 243, 245,246, 248, 249, 254, 260, 262, 410, 442, 459, 480, 496: n = A,T,C or G
  misc_feature 529, 559, 568, 570, 583, 594, 600, 601, 604, 620: n = A,T,C or G
agtacttntagaattaattaaggnggggnnccctangnattcatntgnnttcttannttncntntgnntctgaaatnctgntggaaaccacntnannctgcatccaccataatcgaggtnaaantcatataaatggcccatccatttgtgttgtggcttaagatgggataaaaaaggaaaaaanaaatattggagnnnnccngactaantacnacggtccnnccntantntagtcatnataangnncnntcatncccatntnaactaaattcttggatatggagatggtgacatcaatttgaggatgataggtcaaaaagcactggttaactgagtttgtatgattagagtcaccatacattggaagaggaggttgttctcttttgttaatgtgagaaaggaagaggacngagatgaaaatctttcacttcctgttaactgnttgtatctttcatgggngactgtgggggagttaagganacatgttcaaaaagtnatttaaccaggacttgggggcctgaatgggttnttggggaaaagtaaaagtggaattagtccncttttaaangntctttaccctttnggatttttggnttttannccnccctaaaacttttatnttgaaatttaaataaaatggcatttttcctaa

SEQ ID NO: 19374 - DNA, 377 bp, Homo sapiens
  misc_feature 135, 136, 137, 138, 139, 140, 141, 142, 143, 144, 145, 146,147, 148, 149, 150, 151, 152, 153, 154, 155, 156, 157, 158,159, 160, 161, 162, 163, 164, 165, 166, 167, 168, 169, 170,171, 172, 173, 174, 175, 176, 177, 178, 179, 180, 181: n = A,T,C or G
  misc_feature 182, 183, 184, 185, 186, 187, 188, 189, 190, 191, 192, 193,194, 195, 196, 197, 198, 199, 200, 201, 202, 203, 204, 205,206, 207, 208, 209, 210, 211, 212, 213, 214, 215, 216, 217,218, 219, 220, 221, 222, 223, 224, 225, 226, 227, 228: n = A,T,C or G
  misc_feature 229, 230, 231, 232, 233, 234, 235, 236, 237, 238, 239, 240,241, 242, 243, 244, 245, 246, 247, 248, 249, 250, 251, 252,253, 254, 255, 256, 257, 258, 259, 260, 261, 262, 263, 264,265, 266, 267, 268, 269, 270, 271, 272, 273, 274, 275: n = A,T,C or G
  misc_feature 276, 282, 289, 292, 297, 298, 299, 302, 305, 315, 330, 347,356, 359: n = A,T,C or G
agtacttctagaattaattaaggcgggggagaaatcaactgctattttatactgattctgttaaaaaaaaaaaaaaaaaaattttgtaactattaaaataattttctgactcaaaaaaaaaaaaaaaaaaaaaannnnnnnnnnnnnnnnnnnnnnnnnnnnnnnnnnnnnnnnnnnnnnnnnnnnnnnnnnnnnnnnnnnnnnnnnnnnnnnnnnnnnnnnnnnnnnnnnnnnnnnnnnnnnnnnnnnnnnnnnnnnnnnnnnnnnnnnnnnnnntcgccnagcctgncgntaatnnncanaanagggccccgnacccgatcgcccttnccaacagtttgcgcaancctgaatgngcnaatggaaattgtaagcgt

SEQ ID NO: 19375 - DNA, 106 bp, Homo sapiens
  misc_feature 31: n = A,T,C or G
gaacaaaagctgggtacccgggccccccctngagagtacttctagaattaattaatgctaggtgaaagtggacaggggagaaaatgttggaaggagtaggaaggaa

SEQ ID NO: 19376 - DNA, 187 bp, Homo sapiens
  misc_feature 9, 27, 31, 37, 52, 54, 55, 59, 68, 76, 78, 85, 129, 135,137, 142, 144, 145, 149, 165, 168, 169, 170, 180, 181, 182: n = A,T,C or G
acttctagnaattaattaaggcgggangaanggttcngccattacaggaccngnngcanaggcagtgngcagactngnggccccngcattgcatccaatgctggcagcattgcatgattctccagtgtntttgtnanaaatnannaaanaactctgccgcagganaannnattgaaaccnnnaaaga

SEQ ID NO: 19377 - DNA, 358 bp, Homo sapiens
  misc_feature 132, 144, 154, 165, 166, 178, 179, 196, 197, 200, 203, 215,216, 222, 224, 238, 249: n = A,T,C or G
agtacttctagaattaattaaggcgggggcaggttggggggcacaaagttaacatattcttggttaaccatggttaaatatgctattttaataaaatattgaaactcacctgcaacaaaaaatgtaaaaatnaattgagcaaanggaaaaaaanaaaagctgccnncccccccgtggnnggtgtcccaagaccctnncantgnagaacgggcccnncccttncngagcacggttgtanccaacagtctncatgtcaagaccaagggcctcctggaaacaccaactctgacaaaaaggagtcatctgggagcccgagaatcctactcctggccgggcacagtggctcacgcaccaacat

SEQ ID NO: 19378 - DNA, 681 bp, Homo sapiens
  misc_feature 241, 262, 319, 343, 344, 380, 413, 415, 418, 430, 436, 439,440, 457, 460, 461, 466, 477, 478, 481, 490, 496, 500, 509,514, 517, 522, 523, 524, 531, 534, 537, 540, 556, 564, 574,586, 587, 589, 591, 594, 597, 599, 602, 616, 617, 619: n = A,T,C or G
  misc_feature 629, 634, 638, 640, 654, 659, 660, 668, 674: n = A,T,C or G
agtacttctagaattaattaaggcgggtggatcacctgaggtcaggaacttgagaccatcctggccaacatggcatctctactgaaccctgtctctactaaaaatagaaaaatttaaggccaggtgcagtggctcatgcctgtaattccagcactttgggaggccgaggcgggcagaccatgagatcaggagttttgagaccagcctggccaacatggtgaaacctcgtcacttactaaanaatacaggaaatttagcccgngcatggtgggtccgtgccctgtaagtctcagctacctcggggagggcttggaggccngcgaagaatcgcttgaaacccggnnagggtggaagggtttgcaaatgacccaaggatgggnaccacctgcacctccaggcctgggggaaaacangnagncgagcactgttntcattnggnnttggaaaggaacaatcntcnnttttntgcccagaatnnttnttaaaattngtcagnaaanaaggccccnaaatncantattnnnggcgggnccngcnaancccggggggggggggnaggcttcncaaaatttgngcccccttattnngngnganggncnggnaattttaacccccnncncctttcaacntgggncccntncgggtttttaaacnaaacnnttttgtgnggaacngggggga

SEQ ID NO: 19379 - DNA, 208 bp, Homo sapiens
agtacttctagaattaattaaggcgggtaggattatggtggtccaaagcagttaacgttgacttcaggcatttctaagttacatgaccttgggcaaattacctaatttctctgccacaatatttacctcacagattattgggggtattaaatgaaatttatcctttgagtttgcttttttaaaaaaaaaaaaaaaaaaaaaaaaaaaa

SEQ ID NO: 19380 - DNA, 556 bp, Homo sapiens
  misc_feature 385, 392, 401, 412, 413, 423, 427, 441, 450, 460, 467, 470,482, 494, 505, 521, 544, 553: n = A,T,C or G
agtacttctagaattaattaaggggggaagataaaaaatatactagttgttcaaagtcacagtccagtatgaattactgccataaggtagcactaaagatacaaatgagttacaagttatgattccaatctaatctcttctttttgttttatttttatttatgtgtctatttttgagatagagtctagctctgtcgcctagactggagtgcagttggcgctgtctcagttcagtgcagcctctgcctcccgggttctagccgattctcctgcctcacccttccaagtacctgggactacaggcacgtgtcaccacaatcggctgatttttgtatttttagtattttgtgtttttaaacctctttacttgaaatttgctggaaaanaaaaacncaaatgatngatttgctgtnnaaaatagggnaaanggagtacatacccntatttcgancatttttttnttttttnccncaaacattaagnggccttttttgngccaggccccngatcattaaatccctntgccctcaaaaagctctggtctntttaggggnaaa

SEQ ID NO: 19381 - DNA, 212 bp, Homo sapiens
  misc_feature 2, 165, 169, 206: n = A,T,C or G
gnaagtacttctagaaattaattaaggcggggtaagaaaagctggtctggagttgctgaatgttgcattaattgtgctgtttgcttgtagttgaataaaaatagaaacctgaatgaagaaaaaaaaaaaaaaaaaaaaaaaaaaaaaaaaaaaaaaaaaaaaacncccnaaaaaaaaaaaaaaaaaaaaaaaggcccccccccccngggggg

SEQ ID NO: 19382 - DNA, 457 bp, Homo sapiens
  misc_feature 172, 257, 310, 330, 344, 385, 390, 397, 399, 408, 410, 418,421, 425, 428, 439: n = A,T,C or G
agtacttctagaattaattaaggcggggtccactgtccggcagaggaaaaatgccagctgtgggacaaggagtgcaggccgcacaacctcggcaggcaccggggggatgtggcgattctacacagaagattcacctgggctcaaagttggccctgttccagtattggttatngagtcttctgttcatcgcttctgtatttatgttagcacatttggggcaagtacactcgttcgtagattcagttacatccatctgncatctgaagaaggaggaaaaaaacccaacatttcttgggaccaaaaagtatantgactatctgttcatgaganaaaattttcttgtnagcttgcttgtttacaggggggattttattcaaataattgnttttngaggaantnagttttttntntatgggcnaanaaanctnttttaaattcnctttaaaaaaaaaaaaaa

SEQ ID NO: 19383 - DNA, 428 bp, Homo sapiens
  misc_feature 19, 36, 42, 47, 64, 74, 85, 92, 99, 101, 107, 112, 114, 116,184, 187, 254, 302, 348, 353, 355, 359, 379, 381, 382, 383,385, 390, 404, 406: n = A,T,C or G
aattaattaaggcgggtcnctgcaagttggtagaancatttnaaaanaagaaggctgagggtcnagtatctctngattcaactgntcaactnagtccangnagtgtnatggntnanctgtttgtttattttattgcttcaaaagcagtggactgtcttttggattcaaagtgggcaaaggcccncanaggagaggaagctttatttacaaccagggagtctgtggttgactactgcaacaggcttttaaagaancagttttttcaccgagccctaaagtaatgaaatgaatttgataagacntaagaagaaaagataaggaaagctgaagtgggaaagaagaagatanaagancngaangaaattttagggttggaagncnnnangaaanggggaaaaaaggtngngaaaaaaaaaaaaaaaaaaaaa

SEQ ID NO: 19384 - DNA, 487 bp, Homo sapiens
  misc_feature 13, 26, 28, 35, 39, 41, 43, 44, 46, 69, 73, 432, 443, 458,470, 486: n = A,T,C or G
cgtcgtttttcancccggaaaaaggntngacactngctngntnncnggcccctcctcgtaaagtacttntagnaattaattaaggcggggagcaattgcttgaacccggaaggcggaggttgcagggagccaggatcgtgccactgcactccagcctggtgacacagtaagactccgtctcaaaaaaaccaaaaccaaaaacaaacaaaaaaagttaatatacaaataccaaaaacagaaactgcagaatatctgagtacttactaaggagcagtcaccattttaagtactttactcatttaattctcacaacagccatgtgaggtaagtagtattatctccattttccaaaaggggaaaattagagagatctaacaactttactaaggtcacaaagatattaagggtgaatgtgggattaaagtctttctntttatgactanccatcatgcctactnttgttttgtaancctaaggtccaattcng

SEQ ID NO: 19385 - DNA, 161 bp, Homo sapiens
  misc_feature 9, 56: n = A,T,C or G
cccctcganagtacttctagaattaattaaggcgggggaggacaagaactcagggnaggccgggcgggacaaggcggggctccaggaaccccacagggctaggaacagatgccggtgcaacccagttttgaggctgggagcaaatgtcgaagggcttcctc

SEQ ID NO: 19386 - DNA, 131 bp, Homo sapiens
  misc_feature 19, 20, 73: n = A,T,C or G
cccttctaaagggaacttnngctgggttctcgggccccccctcgagagtacttctagaattaattaaggcggngaggaaccgtcccaaaatgtcccttgctcagaagaaggatcgggtagctcaaaagaag

SEQ ID NO: 19387 - DNA, 172 bp, Homo sapiens
  misc_feature 51, 94: n = A,T,C or G
agtacttctagaattaattaaggcgggaaacactgaagcatctttcagcanaatgctacaaaattgctgaggaagtaatgatttctaataatantagtggttgatgcaatccttagttgtaaatatttattttgttgtagtgctaacaaatggagatttttaaacaccttaa

SEQ ID NO: 19388 - DNA, 424 bp, Homo sapiens
  misc_feature 409, 410, 411, 412, 413: n = A,T,C or G
ggtgccgggccccccctcgagagtacttctagaattaattaaggcaggttcttagaaaggataaataaaattgataaacctttagttaatttatgaaggaaaaaagatacaagttttaaatatcaggaatgaaaaagtagatgttactacagatcgtacataaaaggataataaaggaacattatggacaactttatgccaataaattcaacaagatgaaatggacaaattccttaaaagagacaaactagcaaaactgactcaggaagaaatagaaaacttgaatatccctgtatctatttaaaaattcttaatttaaaatattcccaaaatgaaaactccagaccagatggcatcagtcgtgaattgtgtaagagttttaagaaagaaaaaatactaattgctcatnnnnnaaaaaaaaaaa

SEQ ID NO: 19389 - DNA, 221 bp, Homo sapiens
atatttcatgaatcctaagggaggtatagaagaaggaaaaaggaaatcaaagcagaagtgacaaatggtacagtgatagttttaaacccaaatatagcagtaatcatactacatgtaggccaggtgcggggggctcatgcctgtaatcccagcactttaggaggctgaggtggactgatcatgtggggccaggagttcgagaccagcctaaccaacgtaat

SEQ ID NO: 19390 - DNA, 203 bp, Homo sapiens
  misc_feature 131, 147, 149, 153, 156, 159, 185: n = A,T,C or G
agtacttctagaattaattaaggcggggggttgttagggagtatgcccaagtcttggagtcttggttcctgttcgcggtgtttatgggttatttccctctccatccctcattttttttttttaaaaaaaancaaaaatgaaaataancncaantanacntgtcaaaaaaaaaaaaaaaaaaaaanaaaaaaaaaaaaaaaaaa

SEQ ID NO: 19391 - DNA, 373 bp, Homo sapiens
agtacttctagaattaattaaggcggggaaaggatgttccagaatgtttcagaagaatatcgctgaaagggttggaaccaattattatgaacataccttaaagcaggagtcagcaaatgttttctgcaaaggtattgacttttcagacagtacatatcttaggctttggggaggacatataatctttgttgaaacgattcagctttgccagtggagtgcacaaacagacctcgatgattatatataaaatgaacaagcatggttgttaaaataaaactttatttatagactaaaattttaattcctgtaattttcacatgtcacaaagtatcagtcttcatttgatttttttttcccaccagccacctaaaaa

SEQ ID NO: 19392 - DNA, 560 bp, Homo sapiens
  misc_feature 338, 347, 352, 365, 387, 391, 393, 396, 401, 408, 409, 412,431, 440, 442, 444, 449, 468, 472, 478, 487, 489, 492, 498,500, 503, 507, 510, 512, 514, 518, 520, 521, 523, 538, 539,544, 545, 549: n = A,T,C or G
acttctagaattaattaaggcggggtaggataaattacggatatagtcattctaggggtttcagtcttttccatctcaaggcattgtgtgttttgttccgggactggtttggctgggacaaagttagaactgcctgaagttcgcacattcagattgttgtgtccatggagttttaggaggggatggcctttccggtcttcgcacttccatcctctcccacttccatctggcgtcccacaccttgtcccctgcacttctggatgacacagggtgctgctgcctcctagtctttgcctttgctgggccctctgtgcaggagacttggtctcaaactcaanagagccagnccggnccaactccttggnccttcttaaaggcctccttganatcntntanacacnacccttnnaanggttaagctaattctttanaaaacttcntnanacatnaatgttggggtttttggcntggngattgntaagggttncnttnaccccngnccnaaanccnanancccngnntnatttaaaacccccannttttnncccnaaaaaaaaaaa

SEQ ID NO: 19393 - DNA, 420 bp, Homo sapiens
  misc_feature 38, 52, 66, 79, 97, 109, 120, 126, 135, 151, 184, 190, 193,202, 203, 205, 207, 208, 209, 211, 221, 233, 239, 240, 243,249, 250, 255, 258, 259, 264, 267, 268, 271, 273, 274, 282,288, 289, 294, 298, 299, 302, 313, 319, 324, 335, 337: n = A,T,C or G
  misc_feature 367, 390: n = A,T,C or G
agtacttctagaattaattaaggcggggaagtagtctngggtatgctgttgngaaattgaaactgnaaaagtagatggntgaaagtactggtatgtncctctgtatggnaagaactaatnctgttncctcatgtncataattactaatcanttttcttcccctttacagcacaaataaagttgngagttncanaaaaaaaannanannnanccattgcgcncccccccgggcngggganncanactccnnctcanaanntaatnaanntgncnncccctggngggccnntatanaatnntanttcaactttanatttgnccacngaaccctctcncnccccttgtgaatttaactgttagtccaaanaggaacagctctttggacactangaaaaaaaccttgtagagagagtaaaaatt

SEQ ID NO: 19394 - DNA, 436 bp, Homo sapiens
agtacttctagaattaattaaggcggggcagggcattttcacttcttttgtgattcttcagttatttcaggccatctgggcgtatatgtgcaagtcaccggggatgcgatggcttagcttgggctcagaggcctgacaagaacagaatttgtgaattgcattttatttctcataagaagtatttgtttagattgttaaaagtaagaaattggattgttgagagtaggcagtcttctcaattttaacttccgcatgtctttgcagttgacggtattgtctgtttttaaaaatttcttatttcagattaatcctaaatccttgagattgtggattattgaatagccatatatggtatatacgacattttggataattctgttttaacctggtctttggttaatcatgttatttgcttaaccaggtctcccattcctgg

SEQ ID NO: 19395 - DNA, 599 bp, Homo sapiens
  misc_feature 10, 14, 19, 25, 39, 47, 53, 63, 89, 100, 108, 146, 176, 177,195, 213, 222, 223, 234, 240, 256, 265, 328, 357, 362, 371,373, 386, 394, 406, 408, 409, 414, 426, 443, 446, 457, 459,462, 485, 488, 490, 492, 493, 502, 503, 515, 518: n = A,T,C or G
  misc_feature 526, 529, 531, 533, 536, 537, 539, 546, 550, 555, 556, 565,574: n = A,T,C or G
gaattaatgngggnggggnggggangttccagaatgttncccaaaantatcgntgaaagggtnggaaccaattattatgaacatacctnaaagcaggagncagcaaangttttctgcaaaggtattgacttttcagaacagatacntatcattaggctttggggaggacatataanntttgttgaaacgattcanctttgccagcggattgcncaaacaganntggatgattanatatanaatgaacaagcatggntgttaaaanaaaactttatttatagactaaaattttaattcctgtaattttcacatgtcacaaagtatcagncttcatttgatttttttttcccaccagcnacctnaaaaaggtnanaatcaatattagnctcaacanccccagaactananncaggncagccaaggccnaaaaaattggcccttanggncccaacaggtntnggnttggaccccctaccctttaaacnaangngnnaaaaacctnnaaaaaaaatttnatngttttaanaangngnccnncnccccccnaacntgggnntttttttgnggggggggntttttttttttaaccccaaaaaaaa

SEQ ID NO: 19396 - DNA, 444 bp, Homo sapiens
  misc_feature 15: n = A,T,C or G
agtacttctagaatnaattaaggcggggcgcgaagttaaaacttccaggatctttgaaagaaaagagaacaaagctgaagatatcatgtgcatcaaagtaaattccagatgaagaatgaatgtaaaatatgaaataattcaaagcactgtggaaacacaggtaggatttatctgagcttcaaggtggggaaagccttttcaagtgcaatagtaaaagaaccaatcaaaagggaaaataatgcattaattatataaaaatgaaaaacaatgcaaaattaaaaagaaaagaaaaaccaagtaacaaatgggaaatatttgtaatacagcaactagttaatatccttaatacatgaagggacatacataaggaaaaaataaatatcaataaaatgtgcaaaagacacaaatagaacactcaccaaaaaaaaaaaaaaaaaaaaaaaa

SEQ ID NO: 19397 - DNA, 637 bp, Homo sapiens
  misc_feature 112, 123, 334, 428, 455, 500, 528, 536, 539, 566, 576, 582,591, 593, 608, 635, 636: n = A,T,C or G
agtacttctagaattaattaaggcgggggaggagaaagaccggagccagccgagctgtcacgaccggaggggggactcgcagccttaccaggcacttaagtattcatcgaanagtcaccccantagcggtgatcacagacatgaaaagatgcgagacgccggagatccttcaccaccaaataaaatgttgcggagatctgatagtcctgaaaacaaatacagtgacagcacaggtcacagtaaggccaaaaatgtgcatactcacagagttagagagagggatggtggtgagtatctttcttgttgaaactttgacatacagttttaacaatanccctatataaaaggcggcagtagtatttctagcttgaagaagttactgttcagttatgtcattaaaatattttaatcctatcattttttttttnctctgaacaagttactgttaaaacaanatgctgatgtgagcatttaaaaagtggactcttaaggccaggccncggtggctcacgcctgtattctcaacanttgggaanccnaggcgggccagatcacctgaaggtcanggagttcaanacccancctggccancngggtgaaaaaccccntttctactaaaaaataaaaaaaatttnnt

SEQ ID NO: 19398 - DNA, 156 bp, Homo sapiens
  misc_feature 9, 78, 79, 101, 105, 106, 122, 125, 126: n = A,T,C or G
ggtaccggnccccccctcgagagtacttctagaattaattaaggcgggagcagtgggacacactgacccctgagcccnntgtggatcccaaccaggaagtncctnntgggccacctaggttncannaagttcctacggatgccctggccaacaagt

SEQ ID NO: 19399 - DNA, 290 bp, Homo sapiens
agtacttctagaattaattaaggcggggggaaaaagaaaggaaaatacttgagttgttaacatatgattttttaaaaattaatgatgctcagttataaaaatccagtggaaaatatcattaatgtattctgaaacagtttgaaaaagccactctgtgaatcaacctacttttggttttagaatttatttacttatttagaaagaaagaaaacagaaagacaggcaccattctctgtatgttattttcctgaaaggtgttaaggcaaaaaaaaaaaaaaaaaaaaaaaaag

SEQ ID NO: 19400 - DNA, 400 bp, Homo sapiens
  misc_feature 11, 261, 284, 321, 327, 338, 346, 359, 372: n = A,T,C or G
gtacttctagnaattaattaaggcgggcgtcacctgaagtcagtgagaccctgtctctactaaaaatacaaaaattagctagggcgtggtggcaggtgcctgtaatcccagctactcgggaggttgaggagaagaattgcttgaaccagggaggcagaggttgcggtgagccaagaccacgccattgcactccagcctgggcaacaagagtgaaaatccgtctcaaaaaaaaaaagaaaaaaaaaaaatctgcctatcatngggcttaaactccaagtgagttnggtgtggggggcttgagccctgtattcccagctactnttgagncccagaagttnagacttgncttgggcacaaanccagaatttcttnttccaaaaaaaaaaaaaaaaaaaaaaaa

SEQ ID NO: 19401 - DNA, 449 bp, Homo sapiens
  misc_feature 29, 31, 35, 36, 39, 51, 81, 96, 113, 114, 120, 141, 145,149, 150, 151, 152, 165, 166, 169, 177, 179, 180, 181, 184,185, 187, 189, 192, 194, 196, 197, 198, 204, 205, 208, 210,217, 222, 225, 227, 230, 233, 240, 243, 246, 250, 251: n = A,T,C or G
  misc_feature 252, 259, 261, 266, 267, 273, 277, 279, 280, 292, 293, 302,342, 349, 350, 351, 352, 357, 364, 365, 366, 373, 374, 397,399, 401, 413, 416: n = A,T,C or G
agtacttttagaattaattaaggcgggananaganngangaaatggttttnttaaatacctgctaaaaagttactgtggtnactatgacttatcanccttacctgtgttaaanntgaatntttactatggcagatatggtntggntcgnnnnattttaaccactnnaanttttttantnnnctnncntnatncngnnnaataannggntnattaacngaatngcntnagntcnttaaaantgnaantggnnngtgtatntnttctnntacaanaccntnnttctctatatcnnatcaccttnaaattcttttaggagacgtttgctgggtggtttcaaatcngggcccnnnnccggnggaaaannnacatatnnctttctgaaaccctatgttcccngntngaaaacccgatnggnaaaagctctttccatggatggggggccgttttt

SEQ ID NO: 19402 - DNA, 570 bp, Homo sapiens
  misc_feature 553, 570: n = A,T,C or G
agtacttctagaattaattaaggcgggtaccaatttaattttcaagttgacagatgctgtgtaaagtctctcataatgagagtagtccattaaattgttgaaagttgcactgcttttcatctttcaggtacctgaaatgagtgacatcaggtatttggaaggagtaagatcataaactgtattcattttcttccttgtacaaagtgatgacttctaatgcttatatctcaaggtattttttaaaaaagcaacggtccctaatagagtaaaatttggttttggtccaagttcccaataatgtatttaatgtttctgttgtttactggtgcctcccgttgcatcaggtagagattgcctgcctctttgtagggcagccttgtggcaccttatgtccaacttggaggatagtatatggcttctttgtgcctctactatcttttcaaaagcccattttataaaaatcctaggtagcctattttaatatttaaatatatatatttgtgaaagaacttttaagaacagaccttttctttttacttttaaaaattcctgnatttcccattttttaan

SEQ ID NO: 19403 - DNA, 510 bp, Homo sapiens
  misc_feature 175, 327, 355, 365, 429, 435, 441, 442, 456, 494: n = A,T,C or G
tataaaagacaccaaatagcttaaaagtaaaaggaaggaagatgatatacaatgagaatactagtcaaaagaaaactggagtgactttttaaatatatcaaagtagatttcagagcaaagaacattaccagggataaagaaggtatcatgagggccagtctgccagaagaccatnacactcgtaaatgtttattgcatctaataacatggtttttgaaatattgtgaccccaaaactgatgaaactttagggagaaatagatccaagttatagatagaaattttaatatttttcaataatttattggaagatatttaattgattagnaattaagtagggcagaagaaatcagttnaaaggtacancagaactttgaaccaaaaaccagttcaaacaaaactttgcttcttcatttggacatcttgtaanaaacantttttnntccaacttaaaagntttggtttttattttattcctttattttttccaaagtnccgtgggagaaaattt

SEQ ID NO: 19404 - DNA, 386 bp, Homo sapiens
  misc_feature 135, 165, 250, 254, 256, 275, 276, 277, 278, 279, 288, 295,296, 297, 298, 302, 306, 313, 314, 316, 318, 321, 323, 328,338, 344, 351, 362, 364: n = A,T,C or G
agtacttctagaattaattaaggcgggtggatcacgaggtcaggagttgaagaccagcctggccagcatggtgaaaccccatctctaataaaaatacaaaaagcattagccgggtgtggtggcgggcgcctgcantcccagctacttgggaggctgaggcagganaattgcttgaacccagcaggcagaggttgcagtgagctgagatcatgccactgcactccagcctgggtgacagaataagactccngaananaaaaaaaaaaaaaaaaatnnnnngcccccccnggggggnnnncccnatgnccccttnnanantcntntttancccccccccngggccnttttttnaaacccccatntntataaaaaataaataagtaaat

SEQ ID NO: 19405 - DNA, 480 bp, Homo sapiens
  misc_feature 11, 326, 330, 346, 347, 348, 363, 368, 379, 386, 407, 408,427, 431, 432, 435, 436, 437, 450: n = A,T,C or G
gtacttctagnaattaattaaggcgggggttgcaatactgtcactgataaaacagactttaaaccaacaaagatcaaaagagacaaagaaggccattacataatggtaaagagatcaattcaacaagaagagctaactatcctaaatacatatgcacccaatacaggaacacccagattcttaaagcaagtcctgagtgatgtacaaagagacttagactcccacacaataataattggagacttcaacaccccactgtcaatattagacaggatcaacgagataaaaagttaaccaaggataccccaggaattgaactcagcttntgcnccaggcagaccttatnnnccttcaccagaactnttccnccccaaatcgnaagaatnttccttttttttaagcccccnncccccctttttccaaattnaacnnatnnnttggaggtaagcntttctttaccaaaaaaaaaaaaaaaaaaaa

SEQ ID NO: 19406 - DNA, 321 bp, Homo sapiens
  misc_feature 28, 36, 37, 40, 42, 44, 46, 51, 56, 58, 63, 68, 69, 70, 77,86, 88, 89, 93, 94, 96, 98, 99, 101, 107, 108, 109, 112,114, 115, 116, 117, 120, 121, 123, 125, 126, 127, 129, 131,136, 138, 139, 140, 143, 144, 157, 158, 162, 163, 175: n = A,T,C or G
  misc_feature 182, 212, 227, 230: n = A,T,C or G
agtacttctagaattaattaaggcgggnttaccggnnggngntntnggccncggancntaagnaggcnnntgcacgnaaatgctantnnctcnngngnnanagctannnttnannnnacnncntnnncntntgccntnnnctnntccacctaccaanngtgnncttcaaggttgngtataantacctctagaacaatccccttttttccatnaagctgtaacctgcncanaatggaaacgtgggaaaggaatggtatgtgggggaaatgcatcccctcagaggactgaggcatagtctctcatctgctattgaataaagac

SEQ ID NO: 19407 - DNA, 166 bp, Homo sapiens
  misc_feature 8, 9, 44, 46, 47, 48, 90: n = A,T,C or G
cccctcgnngagtacttctagaattaattaaggcggggatagcngnnngatcaaccgaagtcacactgggcacccttacagcaagatggntgatacatgagaaaccctgttttaaatagcacgggaaattacaaacaatctggctgttagtttcacaggcaaacaa

SEQ ID NO: 19408 - DNA, 586 bp, Homo sapiens
  misc_feature 498: n = A,T,C or G
agtacttctagaattaattaaggcgggaaaaagttatctttacaaggcagaaatctgatagatagcatcttaatcaaatgatcaaatttaacatctccagtatcatgacaaattggcgtgtgcttcttgatgatatactgaggatacatacttatatagtattcttatactatacttatatagtattcctgccaaaaatgtttagtttgaatctaatcatggagacagaaataaaaaattaaggacagtgtacaaaataattgatctggactttgtaaaaatgtcagtgttacataaaaagacacgacctcacaaaacaaatgtattgcaaaaatctttaataatctaggtggaagatatataccgtattggacttttgttggaattctgaaggattgaaatcttggaaatgttggggaaaatagaataatattgattttattttttaactttaatcttttaaaaatgagtattactaaacaatatgggggtactaanaatgggaaattttttttgaaaccaaattactggggttttgacagtaatgattttttaaaagttatattttaaaatattatttttagaa

SEQ ID NO: 19409 - DNA, 269 bp, Homo sapiens
  misc_feature 22, 23, 24, 25, 52: n = A,T,C or G
tgggtaccgggccccccctcgnnnntacttctagaaattaattaaggcgggnaggcgaaggaagagcaggcatgtcttacatggcagcaggcaagaagcttgtgcaggggaactcccctttataaaaccatcagatattgtgagacttattcactatcacgggaacagcacaggaaaaactcgtccccacgattcaattgcctaccaccgggtccctcccatgacacatggggatcattaaaattcaaggtgagatttgggtggaaaac

SEQ ID NO: 19410 - DNA, 764 bp, Homo sapiens
  misc_feature 498, 509, 558, 673, 683, 725, 729, 735, 740, 741: n = A,T,C or G
ggtaccgggccccccctcgagagtacttctagaattaattaaggcggggtggaattaagaaattagacttattttcctgttcattaataaattatccattttaaacacaattttaaacataaaccttgctataaatactcttgtttatatgtgtgacatcaagcttaaccatctacacacccttttgtcccctgtgggtttcctgtttaattttttattagtaacagtatattccataacacacacacacaaaattaaacaaacaaaagaaaggttttaatgttaaggaaaacataagacaatggtaatacaacttagatcatacattaggaaagtaacacaacagatgtattattcagcattaccgcaagtcataagactagttattgtgtgttcacaaaactggggggtgtaacagtatatataggaagattatcaaaaaactctttggctttagaaggaaaaccactagtctaataattgtctctaaatgtgcangtgacaatcangctgccatatctaaaatgttactgtctgacatcaaccaaaagatgccangaaaccgttgatagttaaactcaaactgcaagaaaatattaatgctatttcccaaaacacagcacagctcattccaaaccagggtcacatgaaaaccacagtccagttacctggnggttattcantctctttatgccaatttaaaaaaaaaattggcctaggtttgnttgnaaatangtaanntcctggggtttaaaaaaaaaaaa

SEQ ID NO: 19411 - DNA, 391 bp, Homo sapiens
  misc_feature 29, 32, 33, 39, 50, 57, 60, 65, 78, 81, 82, 86, 109, 114,115, 136, 147, 149, 153, 155, 157, 158, 159, 169, 193, 194,202, 205, 210, 286, 299, 302, 336, 344, 361, 362, 369: n = A,T,C or G
agtacttctagaattaattaaggcggggnggnngtgccnggctctttaancaactanctnttgcntgaactaataaanccnnaatncactcattactgtgaggagggancgaanncattattcatgagggatctgnccccatgactnanacancnannntgagaccctncaaccaacattggggatcacattnnaacataanatntgganaggaaaacatccaaactatatcagatggggtctcaatatactgaccaggctggtctcaaactcttggcctcacgtnattgcttgtgccnaancctttcattgctagcgttatagacacgagctatngcacccanctaaatttggggtttgnncattatntcttcaaatattccttttgttc

SEQ ID NO: 19412 - DNA, 242 bp, Homo sapiens
  misc_feature 28, 30, 32, 33, 36, 42, 44, 46, 47, 54, 55, 59, 65, 77, 81: n = A,T,C or G
agtacttctagaattaattaaggcgggntngnncanggcacngncnntcagaanntaanctgctntattggaatggnatgnaatcactgcctcctgtgatttgaaggccattgtgaaggaaaacaatgcagtgaaagaaagttcttcatattaggacagatatcattgcatcacatttatttatctttctgggtatttttatagcccttaataaaaaatattaaaataaaaaaaaaaaaaaa

SEQ ID NO: 19413 - DNA, 113 bp, Homo sapiens
  misc_feature 29, 30, 32, 34, 36, 37, 40, 41, 66, 81, 82, 92: n = A,T,C or G
agtacttctagaattaattaaggcggggnnancntnnttnnaaaatatgtatcctctataattaanctatgacaggccatnngtaatgaatntgtcgcaaagacgtaataaaa

SEQ ID NO: 19414 - DNA, 396 bp, Homo sapiens
  misc_feature 356: n = A,T,C or G
agtacttctagaattaattaaggcgggactggggtaggcggtagtcaaggccctttggtgaagcaagcgattgtctccagcgttgtcagcttcgctcctccataagacagttgctaatttccacctctgttttcacctacataagacactttatgacaggtttaacttttatgttattattagctctagccactggtatttcatactcagttcgtctgagctacttataaagtgacaagtccagccagggcaacatggtgaaactccgtctctacaaaaattagctgggcctggtggcatgcacctgtagtcttaactacttgggaggctgaggtgggaggattgcttaagcccanaaggcagaggttggagtgagccatgatcacgccactgcac

SEQ ID NO: 19415 - DNA, 434 bp, Homo sapiens
agtacttctagaattaattaaggcgggggacatggtgagtgtgggtctctgtgcggcctagaactctatctgcctgcatctgtccttgttttcttctcccgcacccatctcctctcctgccttaccccgtgttctctcctgtctccatgcctttgcaggagacaccattgtcggaagctccccaaggcggaggggcgggggcgccttggctgggcctggcgcgctccagccgggttaacgccgggccttcggagcgcgcggccagccctgggcactggtttcgttgggttgaatttagggaaaactaggtcatatgtaattcacatgtcggtcacacgtcagtgaggtggaggaacggtgtgtggaggctccagggcctgcctgggttccaggtctatcactggtttctcccttcactctaaacaggccaaacg

SEQ ID NO: 19416 - DNA, 206 bp, Homo sapiens
  misc_feature 1, 89: n = A,T,C or G
naatacttctagaattaattaaggggggctgccaccccaggtcctccaagcaacccttttccccatagtgggaggtcagcatccctcanaagcatctcaggaaaaaatgataaagcatttagagaattgggaagaaaatagagggatactatcaaagagtaaaggacagtcctgggggatgaagggggattttcttttttcttttt

SEQ ID NO: 19417 - DNA, 326 bp, Homo sapiens
  misc_feature 233, 302, 308, 312, 313: n = A,T,C or G
agtacttctagaattaatttaggcgggggaagggaagattaattattgttgagtgttaactaactgccaggtgcttttatcttgtttgtctaatttaaattttatatggacttaataaagtagatattaccatgcacattttacaggttgccaaactgtggctgtgggaggttctaagcaactgttccaggtcacttgtacagtaagctgtatagcaaaaaatccaatttggntcggttccaaatactggacatactcaacttcggatttttaatgttaaaaaggtatttagcgctttatanaaaatnatannaaatacataataa

SEQ ID NO: 19418 - DNA, 353 bp, Homo sapiens
  misc_feature 142, 143, 144, 145, 149, 151, 160, 162, 164, 167, 168, 172,173, 175, 178, 179, 184, 185, 189, 190, 191, 200, 203, 209,211, 213, 214, 217, 219, 220, 221, 227, 228, 231, 232, 234,237, 242, 246, 249, 255, 257, 259, 260, 262, 265, 277: n = A,T,C or G
  misc_feature 279, 281, 287, 288, 295, 300, 301, 303, 307, 323, 327, 333,335, 345: n = A,T,C or G
agtacttctagaattaattaaggcgggagagtggcgtgaacccgggaggcggagcttgcagtgagccgagatcgcaccactgcactcccccctgggcaacagagcgagactccatcttttaaaaaaaaaaaaaaaaaatttnnnnaaantnccccggggntngnccnnaggnntngcnnggggnncctnnnatttttttnggnaagggnantnnccngnnnaaaaanncanngncanccaancttngtnaaaaanantnncnttngaaacctttttncntnggcccnnaaaaaanaaaanntntacntttttttttttttggnaaanaattancnaaggggtccngtttttaa

SEQ ID NO: 19419 - DNA, 304 bp, Homo sapiens
  misc_feature 27, 42, 44, 52, 60, 73, 140, 220, 250, 252, 269, 270, 271,272, 273, 276, 277, 278, 282, 283, 284, 287, 289, 291, 293,295, 297: n = A,T,C or G
agtacttctagaattaattaaggcggngctgcatcacaatgnanaatcatgnaatcacangaagaatccactnagctttgcaagatgctgcccaaggggttgcttggagtaaccaaattaacatttttcattctgcccanagcaaaatacatgtgacaaaacataaaaaaaaaaaaaaaaaaaaaaaaaaaaaaaaaaaaaaaaaaaaaaaaaaaaaaanaaaaaaaaaaaaaaaaaaaaaaaaaaaccncncccccccccccgggggnnnnnccnnncccnnnaananangngntnccccccc

SEQ ID NO: 19420 - DNA, 564 bp, Homo sapiens
  misc_feature 1, 3, 13, 269, 311, 349, 390, 399, 401, 405, 410, 451, 457,470, 479, 507, 520, 521, 525, 535, 543, 544: n = A,T,C or G
nantacttctagnaattaattaaggcgggaagatcacttcagcccaggagttcaaggctgcactgagcgatgacggcaccactgcaccccagcctgtgcaacagagcaagaccctgtctcaaaaaatgaaaaacaacaataaaataaataaataagcctgggactccttccttctctctcttgcttcctctctctccacgttccctcttcaccttctgccatgattagaagcttcctgaggcctcagcagaagtggatgctggcaccangcttccagtacagtccacagaatcataagccaatcaaacctnctttatttataaattacccagcctctggtattcctgtntagcaacataaatggactaacacggacatctgcgtgactgngtaactaantnactntgctnctgtgccctaccggaggactgcttaagaacccggaaaggangggctntcttgccctccantagaatggnaggcctccggcaccttatgatgcccggnaaaaaaaatccgnntttnccttcccccnccagggannctgaaaaaaaaaaaaaaaaa

SEQ ID NO: 19421 - DNA, 318 bp, Homo sapiens
  misc_feature 19, 22, 23, 24, 27, 30, 31, 33, 36, 38, 39, 41, 42, 45, 46,48, 50, 58, 59, 64, 69, 73, 74: n = A,T,C or G
actggccgtcgttttacanccnnnaanaanngnaancnntnntgnntngncgggcccnncctcnagagnactnntagaattaattaaggcggggtcttagctttggctcccctcttctgagctagttggttgaattttttttaatgcttaagatttgtttttctcttttcacagcaacattttcttgaatttttttctgcacagcttttccaaaataaaaaccttccaaacaaaaaaaaaaaaaaaaaaaaaaaaaaaaaaaaaaaaaaaaaaaaaaaaaaaaaaaaaaaaaaaaaaaaaaaaaaaaaaaaaaaaaaa

SEQ ID NO: 19422 - DNA, 452 bp, Homo sapiens
  misc_feature 25, 122, 125, 131, 136, 140, 142, 145, 152, 155, 160, 166,170, 179, 181, 184, 187, 194, 198, 200, 203, 208, 225, 230,235, 237, 249, 263, 278, 321, 338, 376, 417, 441: n = A,T,C or G
ggaacctaagctggggccgggcccnccctcgagagtacttctagaattaattaaggcgggggagggcaatttcaaaactacatgagatactgttgcatcaaatgtttcaggaaaaaaaaaanctnccaaanatttntaantncanctgctgngtncaaancctgtntagngtaaaaatntnggncancctgcangttntntancattntaaatcaaatggagttngtagnccatncnttaaaatttctntaaaactgtctccntctccttcaaaaaanatcagtctgctgaaagtctcatgaataaaacccgatcgaaaanctgtgtgtctaacagtnggtaatctagctaacctggaaaggccacaaaatgctancattctgaaacttgccttttaggcttacttccactttctcnggctcccttcttctcactactttnatcttaccttt

SEQ ID NO: 19423 - DNA, 502 bp, Homo sapiens
  misc_feature 490: n = A,T,C or G
agtacttctagaattaattaaggcgggggtgtgagccatcgcacccggccagagattttttaaacattgtctacaccatgaagtcatactttgcgtttaaaaaagatgacttcatagttttacacgatatctgatggcaattttcacaaggtggaatgtagggagagctcttaatcagccctctccctctggaaacaggcagaaacttctccagtgaaatgatattaccattattgcttcatttcctgaggttagaaccggttcttggtcatcataagtttgcctacctgcctacatgtttgcatcccctcgaaacttttatgttgaaatcctaatcctcaatgtgacggtattaggaggtggagcctttgaaggtactgggttagggggtagaaatcctcatgaaaaggattagtgttcttaaagagaacctcaaaagctctctaacttttctctaccatatgaggatcagcaagaaagacaggttgtntgggaaaccaag

SEQ ID NO: 19424 - DNA, 586 bp, Homo sapiens
  misc_feature 284, 290, 291, 293, 295, 296, 297, 301, 309, 313, 314, 316,323, 326, 337, 339, 341, 345, 348, 352, 356, 367, 373, 375,376, 379, 388, 389, 390, 396, 405, 407, 418, 422, 423, 424,428, 429, 434, 437, 440, 442, 444, 445, 454, 455, 456: n = A,T,C or G
  misc_feature 457, 462, 464, 466, 473, 481, 487, 488, 498, 502, 504, 508,509, 518, 519, 528, 529, 542, 545, 563, 564, 577: n = A,T,C or G
agtacttctagaattaattaaggcgggcagatgacgaggtcaggagatcgagaccatcctggttaagacggtgaaaccccgtctctactaaaaatgaaaataaaaattaaaaaaaagtagccgggcatggtggcaggcacctgtagtcccagctactcgagaggctgaggcaggagaatggcgtgaacctgggaggtggagcttgcagtgagccgagatcgtgccactgcactccagcctgggcgacagcgagactctgtctcaaaaaaaaaaaaaaaaaaaantttttnnancnnnaaanccaatttngggnncnttaaaanggnttttaaaaaantngngggnttnaaantttnaaaaaggaaantttttnannaanttttttggnnnaagggntttaaattnantttaaaaatangggnnnaaannctttnttnaancngnnccgggggcnnnnccctngnanccccacnccttgggnggcccnnggtgggggantccntnaaanncggggtttnnaaccccccnngcccaaatggggnaancccctttttttttaaaannccaaaaattcccnggggggggg

SEQ ID NO: 19425 - DNA, 478 bp, Homo sapiens
  misc_feature 13, 16, 26, 27, 37, 40, 43, 55, 61, 67, 74, 96, 380, 389,400, 402, 415, 418, 420, 421, 438, 452, 458: n = A,T,C or G
cgtcgtttttcanccnggaaacaggnnttgaccttgnttnctnggccggcccttnctccgngagtanttgtagnaattacttaaggcaggcccagnaaagacacatctacatggtctcacttacacgcaggaattttaaaaagttgaactcatagaaatagagaagaagatagtgtttttcagacactggaggaagaaagtgcagagaaggggagatgctgatcaaagagataagctttagtgatctgttgcacagaatggtgactataattagtaataatgtatggtatatttcaaaattgctaaaagagaagattttaaatattctcaccacaaaaagtaacacctatgtgagaagattatttaattatcatgatttnattattccncatgggacatntntcaaacatccctngtntnnggtggccaattaccggnaaattttaaatacntatttnttttcaaaaaaaaaaaaaaa

SEQ ID NO: 19426 - DNA, 237 bp, Homo sapiens
  misc_feature 218: n = A,T,C or G
agtacttctagaattaattaaggcgggaaaaaagaatacagaatagttgggataagcagaaaataaataggaagatggtacacagccaggttaataattatacaaaatgtaaatggtcatacattcaaaggcagagattgtcagagtggattaaaaagcaagactcaactgtatgctgtctagagtaaacccattttaaatataaagacacagcttanaaaaaaaaaaaaaaaaaaa

SEQ ID NO: 19427 - DNA, 461 bp, Homo sapiens
  misc_feature 344: n = A,T,C or G
ggtgccgggccccccctcgagagtacttctagaattaattaaggcgggaggagagaagccatacaggagcaagtgttttgcatactattaaaattggttttactcagaactaaaatcttataaattaaggtattattggccaggtgcggtggctcacgcccgtaatcccagcactttgggaggccgaggtgggtggatcacgaggtcaggagtttgaggccagcctgaccaacatggtgaaaccccgtctctactaaaaatacaaaaattagccgggcgtggtggcacgcgcctgtaaccccagctactcaggaagctgaggcaggagaattgcttgaatccangaggcagaggttgcagtgagccgccattgtgccatggcactccagcctgggcaacagagtgagactctgtcgcaaaaaaaaaaaaaaaaaaaaaaaaaagccccccccccccggggg

SEQ ID NO: 19428 - DNA, 608 bp, Homo sapiens
  misc_feature 4, 16, 31, 38, 49, 53, 56, 63, 88, 114, 125, 150, 175, 202,207, 211, 234, 249, 258, 277, 295, 298, 299, 304, 305, 312,316, 323, 338, 344, 366, 368, 369, 375, 376, 382, 392, 393,394, 400, 407, 410, 411, 413, 418, 428, 440, 442, 451: n = A,T,C or G
  misc_feature 460, 467, 482, 518, 525, 526, 531, 532, 556, 558, 562, 568,576, 582, 593, 595, 604, 605, 606: n = A,T,C or G
ggtnggccccgggggnccccccccccccttncggggangattaactttncttnagnaaatttnaaattttaaaggttccggggggaanaaactttgggggggccctttgggccnttttttttttnggggttcctgggcccccattccttnatttttaacccttttttttaaaaangccctttgggggggcccaaaaattttnttttncccntttttgggaaaaagggtcccctnaaaagattttttaanttttaaaantccccgggggtttaaaaanggggggggaaacccccgngtnnttttnnaaaaaantttnttttccnaaaaaaaaaaaaaanccctcnttttaaacccccctcttttggngnnaaaacnnattttnggggggaacnnnttttantaaaagnggnncnggganaaaaaaaaancgggggtttttncnccctttttnttccccccnttttttntattttttttttttnaaaaaaaaaaacccccccccatattttttttttttnggggggnnttttnngaaacccccctttttttttaaaangngggngccccnaaaaaaancctctnttaaaaaaaangnggggggggnnntt

SEQ ID NO: 19429 - DNA, 277 bp, Homo sapiens
  misc_feature 138, 142, 149, 151, 167, 176, 196, 200, 205, 212, 216, 217,226, 229, 243, 258, 267: n = A,T,C or G
tagaaattaattaaggcggggagcaacagctaggaaccaggggaggcgggaggttgccgtgagatcgcaccattgcactccatccagcctgggcaacaggagtgaggcaccatctcaaaaaaaaaaaatttcatttgntttnttttaananattggactttttttanatttaaatntttgatcaaactgtaatttnttgngaaanaaccaanaagnnggggggacnccnttttaaattttccntttgaaaaaccgggnagaaaaaantttccttttt

SEQ ID NO: 19430 - DNA, 481 bp, Homo sapiens
  misc_feature 6, 17, 21, 25, 26, 41, 67, 80, 410, 416: n = A,T,C or G
cgcgtncgtctttccancccngcanncaaagggtaacaccnggctgggtggccgggccccccctcgngggtacttctagnaattaattaaggcggggagtccttttttaacagtaactattttaaatgaaaatggattcaactcttcaatttaaaggaagagattagcagaaggataaaataacaaacaaccaaaatgaccaaattatttattgtctaaaagaaacccattttagatctaaagtcacaaacaggtaaaaagtgaaaagatgtaaagatattctgtgaaaagaggaatcaaaagagagctctggtggctatcagacaaaatagactataagtaaaaatcgttaccagtgacaaagaagtgcattatacatggatgaaatagttttttcatctagaaaggtntattanttttaaccaatactaccttaccaccgaaccctaaaatttttaaaaaaaaaaaaaaaaaaaaaaaa

SEQ ID NO: 19431 - DNA, 442 bp, Homo sapiens
agtacttctagaattaattaaaaaaataaaaaccaacattaaccagagtttggaagaagttgattccaaccttcataggtgactctgaggggttcaagtcttcagtggaaaaagtaactgtggatgtgatggaaaaaagagaactagaattagaagtggagcctgaagatgtgacagaattgtttcaatctcgtgaaaaaacttgaacagatgagaggctgctttgtatagataagcaaagaaagtggtttcctgaaatgaagtctactcctgaagatgctgtgaacattgttgaaaagacaacagacttagaatattcatcaacttagttgatcaagcagtggcgaagtttgagaggattaagtccaattctaaaagaagttccactatgcgtaaaatgttatcaaacagcgtcgaatgctaaagagaagtttttcatgta

SEQ ID NO: 19432 - DNA, 470 bp, Homo sapiens
agtacttctagaattaattaaggcggggatttcccacatacaattaaggcatggttccctgtttttcttcttggtctttttaccaaaactactgcacttttaacaaatatgatcatgaagccaaccccattcccaaagtgtgtgtccttaacatttttcaaggcccgtgtatagctgttatcttgtgtgaacctcagatggcccaataaggatgtaaggcaagttcaagtacagtctccgcactagagataagaaaacagagatagcgcctgtaatcccagcactttgagaggccgaggagggcggatcatgaggtcaggagatggcgaccatcctggctaacacggtgaaaccccatctcttctaaaaaaaatacaaaaaacttagctgggcatggtggcaggcgcccgtagtcccagctactcgggacgctgaggcaggaaaatggcgtgaacccaggaggcggagct

SEQ ID NO: 19433 - DNA, 742 bp, Homo sapiens
  misc_feature 8, 266, 269, 270, 285, 286, 295, 299, 304, 312, 323, 340,353, 381, 391, 408, 485, 514, 517, 522, 563, 571, 573, 623,648, 672, 683, 708, 712, 734: n = A,T,C or G
agtacttntagaattaattaaggcgggtggatcacttaaggtcaggagttcaagactagcctgaccaacatggggaaaccccatctctactaaaaatacaaaaaaaattggccaggcgtggtggtgcacacctgtaatcccagctacttgggaggctgaggcaggagaatctcttgaatccgggaggcagaggttgcagtgagccaagatccgcgccacttgcactccagccctggggcaggtaaggagttgaaaactcttgtgcncannaaaaaaagaaacaannaacaaaagnaaanaaagncggccgcncacccgcgggnggggagcctccaatttncgcccctattagnggaagtcggtatttacgccgcgctcaantgggcccgtncgtttttacaaaccgtncgtggacttgggggaaaaacccttgggcggtttacccccaaactttaaattcgccctttgcaggcaacatccccccntttccgcccagcctgggcggttaaataanccnaaagnagggccccgccacccggatcgcccttttcccaacaggtttngcgccaancnctggaaattgggccgaaatgggaaaaaatttgtaaaggcggtttaaattnattttttggtttaaaaaaatttccncggttaaaaaattttttttggttnaaaaatcaagncttcaattttttttttaaccccaantaanggcccccgaaaaattcggggcnaaaaaatc

SEQ ID NO: 19434 - DNA, 678 bp, Homo sapiens
agtacttctagaattaattaaggcggggatgtcaagttcatttatgtgactctttggctcaacttacataatctttgttttgatatcacagttgtctaattattttactttgtagcttaaggcaggctgaattgttgataaaatggaaaaagtagtatattgttatataagcttctgaggtgtgttttgttgtataagccctggaggttaaaaagtcatcccttatgtatagtagttaaaggcataaaactgtgacttttagatattccacagaaccagacttatttgatgtggataataaccaatgatttagcattttgtttgcttttgttttattttatccgggttcattttttactcttcccatgtacatgaaacaggtggtggcgtgtagagatcagctgatccttgttttatggttaattgaactactttgtatccagggtttctgcaaatccaaaagtgatttttcatctaggatctattcctaacagtctactccaatcccactttagttttccacaattttaaatcttaatagtgagaattcaaatgaaagtcatttcatttgactattctgatgacatgattgtggcagaataaattgggtcttaaaatgcccttaaaaatggtaaaatgataaaaaataatattttaaaaattcaacccaagaaatgg

SEQ ID NO: 19435 - DNA, 436 bp, Homo sapiens
  misc_feature 29, 56, 75, 88, 90, 94, 103, 140, 162, 163, 167, 168, 169,170, 172, 173, 174, 175, 176, 177, 186, 196, 203, 205, 207,208, 213, 215, 216, 222, 223, 224, 229, 232, 234, 235, 241,242, 246, 253, 254, 256, 257, 258: n = A,T,C or G
agtacttctagaattaattaaggcggggngaggaatagactacatatttggtacantgtacattgcttgggtggnaggtgcaccaaantnttanaaatcaccnctacagaactgatccatgtaaccaaaaaacacctgtnccccaaaaactattgaaaaaannaaannnnannnnnnaaacggggngccccccccnggggggncncnnggaancnnatttgnnnctttnttnanncccccnncatnggggatnntnnnaaagtttacaagctgtggatgggtttccatagtcttcctttctgtacattgctatatcttcagtcctttggagcaagtggacctaacaagttgagcaaaatgaatatttggatccatgttcctcttgtgaccctgagtcttcatgcaaggagatctgaagctgaacaatgaaaatctt

SEQ ID NO: 19436 - DNA, 341 bp, Homo sapiens
  misc_feature 12, 40, 256, 263, 317, 325, 330, 331: n = A,T,C or G
agtacttctagnaattaattaaggcgggcagatcaccagnatcaggagatagagaccatcctggctaacagtctttactaaaaatacataaaattagccaggcgtggtggcgggcacctgtagtctcagctaggcagagcttgcagggagccgagattgcaccactgcactctagcctgggcaaccgagtgagactccatctcaaaaaaaaaaaatcacgtttttggttttaatttatctgacttaccttatgtanatttgtnggtcacttatttaaaatatctttgttcaactgatgttttcattatgtttgaagnaaaaaaanggaannccttccttcc

SEQ ID NO: 19437 - DNA, 190 bp, Homo sapiens
  misc_feature 18, 33, 34, 43, 44, 56, 60, 62, 67, 72: n = A,T,C or G
ctggccgtcgttttcacnccggaaacagcggtnnccatgatgnntggcgcggcccncccncnagagnacttntagaattaattaaggcgggctggtccatctcagaaaaaccttccaagagcgctggggtttatgctttctgaataaacactactgtttacatgaaaaaaaaaaaaaaaaaaaaaaaaaa

SEQ ID NO: 19438 - DNA, 201 bp, Homo sapiens
  misc_feature 20, 96, 122: n = A,T,C or G
gggtaccgggccccccctcnagagtacttctggaattaattaaggcgggaaatttatagctgtgagcagttaactaaaaaagaagaaagatctcanatccatagcctaactgtacactgtanggaactaaaaaaaagtaaaacaaaaatagaagtcatctttatgatttgaaagagtaaaagatttacctaataagtccct

SEQ ID NO: 19439 - DNA, 132 bp, Homo sapiens
  misc_feature 5: n = A,T,C or G
accgngccccccctcgagagtacttctagaattaattaaggcggggtgaatattttatactgtaagtgagcaatcagagtataatgtttatggtgacaaaattaaaggctttctaaaaaaaaaaaaaaaaaa

SEQ ID NO: 19440 - DNA, 607 bp, Homo sapiens
  misc_feature 1, 2, 13, 33, 294, 304, 306, 312, 323, 339, 345, 366, 371,372, 386, 418, 437, 447, 454, 460, 462, 477, 497, 506, 512,513, 537, 538, 542, 543, 557, 579: n = A,T,C or G
nnatacttctagnaattaattaaggcgggcggnatcacgaggtcaggagattgagaccatcctggctaacatggtgaaaccccatctctactaaaaatacaaaaaattagctgggcgtgtggcgggcacctgtagtcccagctacttgggaggctgacgcaggagaatggcgtgaacccgggaggcagagcttgcagtgagccgagatcacgccactgcactccagcctgggcgacagagcaagactccgtctcaaaaaaaaaaaaaagctttttttaaaagttgtaaaaatgngcccaaaaantntttttncccttaggccnggcttgggggcccctnccctgnaatcctaacaacttggggggnggggnngggggatcccctcnagggtgggaactttgaaaaccccctggccaanggggaaaaacccttttttnttaaaaaaanaaaaaanctgggngnggggggtgccccttnttttcccccccttttggggntggggcttnaaattnnttaacccccggaaaaagggtgaanngaannaaaatttcccctgncctcccccccgggggaaaaganaaatttttttaaaaaaaaaaaaaaaaaa

SEQ ID NO: 19441 - DNA, 725 bp, Homo sapiens
  misc_feature 524, 616, 617, 632, 658, 659, 664, 673, 676, 697, 700, 701: n = A,T,C or G
agtacttctagaattaattaaggcgggatcagaatggaaaaagaactgtttaaaagtttgatacttttaaatagttggtttttttgcttactctggtaatgattttctacaaatacataataaattgtttttttgagtctatattctgtatgcagttgaatatccattacttattctgctgtgctttaatagaatggaatgtttacaggcccttaaaatattatttttaaaaaaccttctgaagatacataccaaagtttttccaagaagattttataatcaatttaataatgtaaggtttatcagattctataatagtatagttattaaggcaattttatgttagagactattttgtaatgtagtgagtggtacctttataagaaaagtgactgccaatatatttttatagctgatctttataaattctaatgttgagtttttaatgattattttaaatgtttatatagtttagtaaaatttgcatctcaaagtatcatttttatattatgggacgttttcanattggctaatatttgcattgtaaattttgtatgcagtttatctaaaatcaaaaatctggcagtcaccacgtttaacatctatttccaattgnnttccgtttaaaatgnctgcaaactattggggctcttacccnnatgcntcatatggngcngggaaataaaggccttttganagnnactggaaaaaaaaaaaaaaaaaaa

SEQ ID NO: 19442 - DNA, 326 bp, Homo sapiens
agtacttctagaattaattaaggcgggtaatgtagcccggttgaacatgaaccagaaggaaaatggttaaagctgagggcactaattccttacaggcccggggacatggggctccaaccagtggatgcatgtagcttcccagaaccgaatgtctggccctccctggcggatgatgcctgccgcgttgcccccccccaactccctctaccggaactcagcccacgaggctgggccccgtatggcccaccataattacccccatactccttacactattcctcatcacccaactaaaaatattaaacacaaactaccacctacctccc

SEQ ID NO: 19443 - DNA, 183 bp, Homo sapiens
agtacttctagaattaattaaggcgggtaagggatgaatccatgatgtcatctgccaccaggaagaaagcttgcagctagaaagagtggaataagacctgcagggctcctcattactgttccttctatcagcaacagagctgctactttataccaaaaaaaaaaaaaaaaaaaaaaaaaaaaa

SEQ ID NO: 19444 - DNA, 440 bp, Homo sapiens
  misc_feature 22, 103, 220, 244, 254, 263, 305, 325, 363: n = A,T,C or G
agtacttctagaattaattaangcggggatgggttggtgtacatatgccctgcagacaaatgccacactgagtcacacatgcactggtggtcctgctgtccgngcagaaaagttcaagagcagagtcctccacaatccttcaacctgactttctggctgtatgagttatgggatgggagggagaggcaattatattttaagtgtctcctttctagaaganctgagtgttctctgaaggaccatnccagctgcanaaatacttntgaatgggtgaagaaagggcactaaaatgtaccaaaagattntgggcccaagtgacatccanaccatttttcttttctattaaagtaaactgaagtttanataagggctagattaaattcaaggaaactcctgataaccatgttaagatcaaccacagtaggctgagttttactgaa

SEQ ID NO: 19445 - DNA, 464 bp, Homo sapiens
  misc_feature 72, 79, 96, 107, 135, 182: n = A,T,C or G
accgggccccccctcgagagtacttctagaattaattagaggcggggtgtgaaaacatgtgccatgcaaaanctaggcngaagagagtttatgtanatgtcttttantagaagacaaaataaatgaaaagcattnttgtaaagtacactgcaatatgttaaaatgctcagttcttcaggaanatataacaattcttaatttgtatatatataattaccatcttaaaatatgtaacagaaattgacagtaggggatttccttatgacaaatttgtagtcataattcaagatttttgcacgcttctttcaagtattgattttaaaaacagacaaaatcatcaaggatatagaaaattaaaataacacaattagcaaacgtgaccctacaaacatagaaacacaatgcccaacaagtgcagtacacatattattttcaaggaaactagaaattatacaaaagttagt

SEQ ID NO: 19446 - DNA, 600 bp, Homo sapiens
  misc_feature 516, 549, 574: n = A,T,C or G
agtacttctagaattaattaaggcgggggaagcaaaggcgttggcggcgtgaggctcaggactgtacatcaaaggaagccaaaagccagctggaatacttcctgaatacagttttaatcttgtttgcaattatttcgaaggggagaaatcatctggatcagaattaagatgctctggtttcaaggaaatagcatgcaacttgccagatcctcctttggactcttcttgagaaattgctctgcctctaagacaactctgcctgtgttgaccttattcacaaaggacccatgccccctttgtgatgaagccaaggaagtactcaagccttatgaaaacaggcaaccctacaaggatcagaagctgccaggaacaaggagaagacgctccccttcctcaccttcccacccccacatggcttctcagtcggggaaaagatacaacttaactttaaaccaagtcttaagttttgattatgacatgggattagatgcaccaaaaacaatttcaagtgactgnggggcattctattgcctggaaaatgttcaagantcctgatatgacctgttgttttatnctaaacagtgaaaaattcatccccaa

SEQ ID NO: 19447 - DNA, 407 bp, Homo sapiens
agtacttctagaattaattaaaactaaaaattcagttcctcagtaatattactcacacttcaagtgctcaatagccacatgtggctagtgggtacaataatggaccatgcaggtttccatcaccacagaaatattagtagacaagtctgttctagagcctagaaaagtatgtgacactataattattgaatgaagaaatataaaaactattagcattcatggttcaagaagaataacaagaaaacatcaagaagaatgagtatcttcaattttggatctttgtaaaagatccaaaagaatcacaacacaagattatcttattaacttttataaaggcagtaaatttagggctaggaaaatgccaattaagaaatatttctgtagccaggtgtggtgacacgtgcctg

SEQ ID NO: 19448 - DNA, 181 bp, Homo sapiens
  misc_feature 32, 36, 38, 65, 69, 81, 83, 94, 126: n = A,T,C or G
agtacttctagaattaattaaggcgggggaantagnanaaaaggaaatggctaccaatctgtagnatanagagatgatgcngnaagaaaacaanctttggactacaaacaaacattcataccatanacaggccataatgtcatgggttttaagttgagaagcatgtgaatacatcacttgc

SEQ ID NO: 19449 - DNA, 403 bp, Homo sapiens
  misc_feature 321, 390, 395: n = A,T,C or G
agtacttctagaattaattaaggcgggtccctgcttgtcctatgaactgctcagagctcctgtcagtccagctgggccttctgggttctggcaccatttcgtagccattctctttgtattttaaaaggacgttatgaaagggcttagaccaaaataaatcataatgttacttgagccaccttatatagctgcttggagagtctatgtagttctttctgcatgcattaaaaatgtttagaaatgcttcagcaatggtgtttttttcctcaaagaaaccatggccagtagctaggtgttcagtaggaatcaaagaaaaatcantaagagctccagattaaacctgatttttaactgaaggaacattctgaggaaaaatacttaaaagtaaanaaaanaaaaaaaa

SEQ ID NO: 19450 - DNA, 425 bp, Homo sapiens
agtacttctagaattaattaaggcggggaatggaaaattatataggcacctaagtttcctttctagttatggtcagtgtttacactgagtattcatgacagacaatgcaccaattttttaataggctatgtatgtcaaaaaggatgttcctttgtggcaaaaacatggacggaacttctgaaacatgtgagagaaacccataaagaggaaatactatgtgaagtatgccggaaaacatttaaacgcaaagattaccttaagcaacacatgaaaactcatgccccagaaagggatgtatgtcgctgtccaagagaaggctgtggaagaacctatacaactgtgtttaatctccaaagccatatcctctccttccatgaggaaagccgcccttttgtgtgtgaacatgctggctgtggcaaaacatt

SEQ ID NO: 19451 - DNA, 498 bp, Homo sapiens
  misc_feature 14, 42, 59, 150, 152, 157, 164, 165, 168, 169, 171, 174,176, 182, 191, 192, 194, 196, 198, 210, 212, 220, 221, 224,239, 245, 246, 247, 263, 305, 307, 316, 329, 372, 400, 410,412, 419, 420, 464, 481, 483: n = A,T,C or G
cagccgggcatggnggcgggcacctgtagtcccagctactcnggaggctgaggcagganaatggcgtgaacccgggaggcagagcttgcagtgagccgagatcgtgccactgcactccagcctgggtgacagagcaagactctgtctttnanaaatntaaaaannganngnggncncccccngggggggcnncnantngccccttttggnantatttttnnccncccctacctggcggntttttnnnaattgatcctagaaangaaaaaataatttttcattttagatcttgattgaatttaagnangtatttatntgcctacaaaaangtctgtcttgtaactgttgtataaaataaacctaatctatggnttcattttttaatctaaaaaaaagttgntgccttaacnanaagggcnnttgttttgtttaataaagggaaaaacaacccttttttagttatnatggggggggaaaaatnanggaacctttttttgc

SEQ ID NO: 19452 - DNA, 402 bp, Homo sapiens
  misc_feature 28, 32, 37, 47, 56, 80, 108, 109, 118, 119, 129, 136, 143,164, 196, 204, 207, 212, 227, 231, 251, 252, 254, 258, 276,289, 303, 305, 306, 327, 328, 330, 332, 335, 338, 346, 361,362, 364, 377, 386, 395: n = A,T,C or G
agtacttctagaattaattaaggcgggnggcntggcngacaaggatnacaccggantttgacgaagaggtggtttttganacattaaaactaccactactatggaagnnccactactnnatggaagttngacctgnacatggnggctcacacttgtaatcccancactttgagaggccaaggtgggaggatcgctngaggccanganttcangatcaacctgggcancatngtgagaccccatctctaaannanatcnaaataaaattcaaaccancctcacatttatnaaatgaaatttgcngnngcccccccccgggggggaccnngnantgnccnttaatacntgttttttccccccnncnggggctttttttnaaaaattgnttgaggctnggaccct

SEQ ID NO: 19453 - DNA, 448 bp, Homo sapiens
  misc_feature 266, 274, 275, 283, 286, 289, 293, 301, 304, 311, 314, 317,318, 323, 330, 331, 332, 334, 347, 349, 350, 355, 356, 358,366, 369, 371, 381, 383, 385, 386, 393, 395, 397, 401, 407,408, 409, 410, 413, 414, 416, 417, 421, 426, 431, 434: n = A,T,C or G
  misc_feature 438, 439: n = A,T,C or G
agtacttctagaattaattaaggcgggtggatcactaggtcaggagttcaagaccagcctggccaacatggtgaaaccctgtctgtactaaaaatacaaaagttagctgagcatggtggcgtgtgcctgtaatctcagctactcaggaggctgaggcaggagaatcgcttgaacccaggaggcggaggctgcagtgagctgagattgtgccactgcactccagcctgggagacagagcaagactcagtctcaaaaaaaaaaaaaancttttttnngtttaaangtnggnaaantttttttngtnctccccnttnccnnacccnttttttnnncntgacccaattttntnncaatnnanttggggtnatntnagggctttcntntnnaaaaaantngntgcngttttnnnngtnnannaaanaaaanccccnggntttnnaaaaaaaaa

SEQ ID NO: 19454 - DNA, 334 bp, Homo sapiens
  misc_feature 14, 38, 75, 77, 78, 113, 222, 249, 261, 267, 269, 277, 282,286, 287, 288, 289, 290, 303, 304, 306, 326: n = A,T,C or G
tgagctcaaattgnttgtgtttactaactgacaggctntcttatcataatcctctattagcttgttattattacnannatcgttcctttatccatgagggccatgagatacanggagtttaaataactaagattgtactgcttggaaatgagggtttgcatatgggacatgtccaaagcctagcctcttaccaggacatcaccttgccattcagtgaaacanaaagggcttcattatagtgagagtaantggagaaaattnttattncngggggaanaaaanggcnnnnngaaaaaaaaaaanncngcccccccccccgggggggngccccccc

SEQ ID NO: 19455 - DNA, 146 bp, Homo sapiens
  misc_feature 3, 20, 31, 89, 117: n = A,T,C or G
ggncccgggccccccctctngagtacttctntaattaattttttgcggggccgaatactactttgtaacttttaaagtcttaaactttncaataaaattgagtgagacttataggcncaaaaaaaaaaaaaaaaaaaaaaaaaaaa

SEQ ID NO: 19456 - DNA, 337 bp, Homo sapiens
  misc_feature 22, 179, 181, 187, 203, 204, 207, 210, 211, 216, 219, 221,222, 227, 228, 233, 235, 241, 242, 264, 272, 273, 274, 275,276, 277, 279, 280, 292, 293, 295, 297, 299, 300, 302, 304,307, 314, 316, 317, 321, 322, 323, 327, 328: n = A,T,C or G
gggtaccgggccccccctcganagtacttctagaaattaattaaggcggggtcaactccgtgtaaccagtaactacagccatttacaattgactccgtttccttttgtaggtttccctgtctgtctgtgttagtagaaaaataaaatcctatgaaatctgaaaaaaaaaaaaaaaatananccctanaaaaaaaaggcccttnnatnttnntatgnctnannacccnnggggnancccacnnggcccctaaaaaaaaaaataanaaaccccnnnnnncnnggcccccccccnngngngnnananaanacctttntnnaaannngggnntttcccccc

SEQ ID NO: 19457 - DNA, 186 bp, Homo sapiens
  misc_feature 1, 25, 27, 56, 136, 170, 171, 173, 174, 175, 186: n = A,T,C or G
nctgggtaccgggccccccctcggngngtacttctagaaattaattaaggcggggnaatacagtgttttcaatttgtacagaatagttagaatattctattaaagtggtgaaacattgagtcaaaaaaaaaaaaanaaaaaaaaaaaaaaaaaaaaaaaaaaaaaaaaanngnnnccccccccccn

SEQ ID NO: 19458 - DNA, 189 bp, Homo sapiens
  misc_feature 177: n = A,T,C or G
tgggtgccgggccccccctcgagagtacttctagaattaattaaggcgggggaaacaacttgaccaaaaatttgtcacagaattttgagacccattaaaaaagttaaatgagaaaaaaaaaaaaaaaaaaaaaaaaaaaaaaaaaaaaaaaaaaaaaaaaaaaaaaaaaaaaaaaanaaaaaaaaaaaa

SEQ ID NO: 19459 - DNA, 552 bp, Homo sapiens
  misc_feature 406: n = A,T,C or G
agtacttctagaattaattaaggcggggacacagatccaaaccatatcagcaggcatttcccaaaagaaaaattcaaatggccaataaacatgaaaaggcgctcaccctcattgcaatgagagaaatgaatagtaaaaccacgagagctctacaaactcacaggaattgctacattaaaaagactgacagtggcaataccaagtattggcaaggatatggaacaacaggaattctcacatgctgcccttggatatgtaaagtggtacaaccgttttgaaaacattttggctttaccaaacgaaggtgaagatttacatacattaagattcagaaattccatgtttacatttatagccaacagaaatgtgagcccctgtgcacttgcaacatgtgcaaaaatgtttntagcaacattaagaaccacaaatttgaaacaacccaaaatgcctcttcacgcaacttaaactggataaataaattgtgacatatattcatacaaataaataatatttggcaagggaaatgaacagaccacttcttttcccctaaaa

SEQ ID NO: 19460 - DNA, 497 bp, Homo sapiens
  misc_feature 1: n = A,T,C or G
ngagtacttctagaattaattaaggcgggcggatcacgaggtcaggagattgagaccatcctggctaatacggtggaaccctgtctctactaaaaatacaaaaataataataataattagccatgcatggtggcatgcatctgtagtcccagctacctgagaggctgaggcaagagaagaatcgcttgaacccgggaggtggaggatgcagtgagctgagatggtgccactgcactccaccctggatgacagagcgagactccatctcaaaaacaaacaaacaaacaaaaaaaaccaaaagaaagaaagaaagattctgaaagatggaaagaagaagtcagactacctggctacctgggaacctcaggaattgagaaatgacatggcagtgagttacttgggtttccttattatctcctgtatattctggacaggatactgaagaaagccttcaacctggaaccaccaacaggtggcgtaaacaaaaatacccctac

SEQ ID NO: 19461 - DNA, 254 bp, Homo sapiens
  misc_feature 8, 164, 166, 188, 191, 193, 196, 199, 200, 201, 203, 204,206, 209, 211, 214, 216, 217, 226, 227, 228, 229, 231, 234,238, 249, 254: n = A,T,C or G
agtacttntagaattaattaaggcgggtctttgaaatagggcccgtatttaccctatagcaccccctctaccccctctagagccaaaaaaaaaaaaaaaaaaaaaaaaaaaaaaaaaaaaaaaaaaaaaaaaaaaaaaaaaaaaaaaaaaaaaaaaaaaaaaancnggggcccccccggggggggggngcncntanctnnnannanggngnttntnntcccccccnnnngnggngtgntaataaaaatnaaaan

SEQ ID NO: 19462 - DNA, 773 bp, Homo sapiens
  misc_feature 135, 140, 143, 154, 158, 164, 167, 170, 175, 177, 178, 181,183, 186, 188, 190, 195, 196, 202, 203, 204, 208, 210, 218,219, 222, 234, 238, 245, 248, 250, 259, 261, 263, 276, 281,287, 297, 305, 314, 319, 321, 327, 333, 339, 340, 347: n = A,T,C or G
  misc_feature 348, 351, 354, 360, 363, 368, 369, 383, 393, 398, 402, 413,418, 431, 440, 444, 445, 447, 461, 465, 468, 472, 480, 487,503, 507, 514, 515, 519, 522, 537, 553, 570, 571, 574, 582,583, 585, 589, 609, 624, 625, 635, 643, 644, 654, 656: n = A,T,C or G
  misc_feature 666, 679, 680, 681, 691, 694, 701, 703, 712, 714, 718, 719,727, 738, 740, 745, 749, 755, 758, 760: n = A,T,C or G
agtacttctagaattaattaaggcaggagatggcttaaataaataacttaaatttaaaaaaaaaaaaaaaaaaaaaaaaaaaaaaaaaaaaaaaaaaaaaattaaaaaaaaaaaaaaaaaaaaaaaaaaaaaggnggccnccnccggggggganctcnaattcnccntanagggngnngtntnacncncnctaannggccgnnntttnanaacgtcgnnacngggaaaaacccngggngttcccnaantnaaatcggcntngnagaaaataccccntttcnccagcngggggttaanaagcaaangaggcccgnacccnantcgccntttccnaaaaanntttgccnnaanccntgaaanggngaaannggaaaatttgtaanggcgttaaanatttnggtnaaaaaattccngggtnaaaattttttttngttaaaaantcanncnttcaattttttttnaaancanaaanaagggccngaaaaantcgggggcaaaaaaancccnctttttnnaaantcncaaaaaaaggaaatnatcacccccggagttntaggggggttttggaanngtngttttgtnncnccangtttttgggaaaaaaaaaangaaggtccccccttnnttaaaaaagnaaacgggnnggggaccttncnaaaacggttntaaaaagggggcnnnaaaaaaaacncgntttttantntaagggggngngaanngggccccncttaactgtgngnaaccnaatnaacccnttnanataaaaaggtttt

SEQ ID NO: 19463 - DNA, 301 bp, Homo sapiens
  misc_feature 139, 154, 183, 189, 190, 191, 207, 211, 220, 222, 225, 229,233, 254, 264, 267, 269, 287, 301: n = A,T,C or G
ctcgagagtacttctagaattaattaaggcgggtgcaagccttcgctgtgccgagccttgtgtttctgacgcaagccaaatgaagaaaagcaaagcttataaaaaaaaaaaaaaaaaaaaaaaaaaaaaaaaaaaaaanaaaaaaaaaaaaaanaaaaaaaaaaaaataaaaaaaaaaaaatnagggcnnncccctggggggggggngcantggctcacncntgnaatnccancacctcccccacgctgagggnggtggataanaangncaggagatggagagcatnctggctaacacggn

SEQ ID NO: 19464 - DNA, 303 bp, Homo sapiens
  misc_feature 1, 29, 32, 35, 36, 37, 38, 41, 44, 49, 51, 52, 56, 61, 66,68, 70, 79, 95, 106: n = A,T,C or G
natgatactggccgtcgttttcacccggnaanaannnntanccntaatncnngccngtccnttccncnanagaaaaaanaaaaacctttattgcnggggaggaatntttcaaatataataagacaaggattattggaaatttgttataatgaatgaaacattttgtcatataagattcatatttacttcttatacatttgataaagtaaggcatggttgtggttaatctggtttatttttgttccacaagttaaataaatcataaaacttgaaaaaaaaaaaaatgaaaaaaaaaaaaaaaaa

SEQ ID NO: 19465 - DNA, 389 bp, Homo sapiens
  misc_feature 30, 33, 41, 57, 73, 78, 102, 110, 139, 163, 179, 183, 203,266, 267, 288, 317: n = A,T,C or G
agtacttctagaattaattaaggcggggtnttnaatagctnactgaaatgttaggtntcctaaagggtacagngccgnataaaacaacctgcctcatatatntctcctcnaacgttggactatttgggaaaaggaaaanagttgggaaaataggttttaaggnaagttttagtcaaaanaatnctttcttgaaactagctggnttgtggattcagatactctgatccttacagaatccaagaggaagctttcataaaaacaattcnncaaatatttccaatataattngaatggctaattttcagttgctaattaantagcagctttgtaatacttgatttgggagcatttacttggaaatcctaaggactataataaaagttttcaac

SEQ ID NO: 19466 - DNA, 326 bp, Homo sapiens
  misc_feature 182, 191, 205, 206, 209, 211, 214, 216, 218, 221, 229, 230,236, 242, 267, 275, 276, 279, 280, 281, 284, 287, 289, 291,295, 296, 323: n = A,T,C or G
agtacttctagaattaattaaggcggggcacggtggtgggctcctgtagtcccacctactctgaggctgaggcaggagaatggcgtgaacccaggaggcagagcttgcagtgagccgaaatcgcaccactgcactccagcctgggcgacagagtgagactccgcctcaaaaaaaaaaaaaanttttaacanttggccaggcccannggntnatncntntantcccaccnntttggnaggccnaggcaggcaaatttaaaaacaaccntggccaanntannnaanccntntntccnntaaaattccaaaaaaaaaaaaaaaaanttt

SEQ ID NO: 19467 - DNA, 433 bp, Homo sapiens
ctcgagagtacttctagaattaattaaaatatgctaagagcttaaaaaacatcaggtctttcttgagttctgaacatccattagtgaagaaaatgcaagattgaacttatattttggcatggcaaatactaatgctcatcccgccttaattaaggcgggggagagagagagagaagaaggagaaggaggagaaggagaagaagcagaagcaaaaaaggcagagaatgaggacagaacagctctgccagttttagaatgaaattacacatgaatatatttttaaatttacttgttgggtttttgaactgattatgggcagtttgactgtccttaattaaggcgggggaaggaggaggaggtgcaacagcaaaagttggcagaggagagacggcggcagaatttacaggaggaaaaggaaaggaagttggaatgc

SEQ ID NO: 19468 - DNA, 257 bp, Homo sapiens
  misc_feature 31, 33, 35, 42, 44, 47, 49, 51, 54, 68, 77, 96, 103, 106,109, 114, 118, 123, 129, 133, 139, 143, 145, 146, 165, 168,169: n = A,T,C or G
agtacttctagaattaattaaggcgggggcncntnatatttntnccngntnggncttgatgtataatnataaccttncctaatatatgggggactnacccctntcnttntgcgnaatnaattnaccttncatngctttnctangnnagccggacttcataccccngannccttctagctacctaagaacagctaaaagagcacacccgtctatgtagcaaaatagtgggaaagatttataggtagaggcgacaaacc

SEQ ID NO: 19469 - DNA, 575 bp, Homo sapiens
  misc_feature 20, 22, 51, 54, 61, 62, 116, 164, 176, 185, 205, 224, 262,312, 322, 347, 367, 369, 373, 374, 377, 378, 411, 412, 418,440, 446, 464, 485, 490, 495, 503, 533, 544, 546, 548, 549,562: n = A,T,C or G
ggtgccgggccccccctcgngngtacttctagaaattaattaaggcgggcntancacagcnngcacgagaagaaccctcatggagctttaatttattagatgcaccacagtacctnacaaacccacaggtcctaaactaccaaacctgcattaaaaatttcggntggggcgacctnggagcagancccaacctccgagcagtacntgctaagcacttcaccagncaaagcgaactactatactcaattgatccaataacttngacccacggaacaagttacccctagggataacagcgcaatccttttctanagtccatatnaccaatagggtttacaacctcgatnttggatcaggacttccgaangngcannccnntttttaaagggtcgtttggttcaccaattaaanncttccnggatctgaggttcaaacccggnttattncagggggggttttttttncttaaaattcccccctttccnaaagngcaanaaaaaaanggcttcttttcaaaaagccctttccccccnaaagaaaattntntnnacctttttttttnccccccccccccc

SEQ ID NO: 19470 - DNA, 359 bp, Homo sapiens
agtacttctagaattaattaaggcggggtaagggctgaggcagatgctggggtggttagctgttgtcacttacctccctacgatcagttttattgtgttggtaaagacgccattcagagccagggcaaggctggcagctgcaaagcaaagccattagttgaaaggatctgtctaggaggaaaggtatggtcatggcctcgttatgagagcagcccgtgctgtttctgagatggatagaatccaaccaggcctgggcacaaaaataattagggtcctcagtgatcactcttttgtagccgagaacttttgtactaggccaaagacatttctgaggtacaaataacccagtgcatttaggc

SEQ ID NO: 19471 - DNA, 473 bp, Homo sapiens
agtacttctagaattaattaaggcgggaggtaagtactaccgattaccgaatccagaggtccagattagctactaatttgagttagaacaataataatcaactaccatttacagtgtatctctatgctattacataaagatatactggttcctgcccttaggcagcttagaagaggagacagcatttacaaaataacttactgaagtgacttagtgattgtttaggagatgggaagaacattcaaggaatatatttaacagacttgtagtgttttctttgggtaagaaatttgccattttaaatctaaaagagaaataagagtgtcctcttgcttgacattaaatttagtttactagtaaaataaatgaagaaacttaatacaaatggtctctagtgtataagtgatgagcatttctaaagaaaataagttagttttttggatattggtagaaacaatgttgtatgtggactt

SEQ ID NO: 19472 - DNA, 450 bp, Homo sapiens
  misc_feature 422, 427: n = A,T,C or G
agtacttctagaattaattaaggcgggagaatcgcttgaacctgggaggcgtaggttgcagtgagctgacatcgctcactccactccagcctgggcaacagagcgagactccgtcttaaaaaagaaaaaaaaatccttcaattcatttaaattctatggcctttatatgtatagctcctccatatcctcctaaatgtctttgtgagtgaccttttccttctctctcacctttcagaccaggacatcactggctcttatccagggttggagccatcccaaatctgaaaatccaaaatccagaatgctccaaaattcaactttctgagcactgacgtggcgctcaaaggaacttctcattggaacattttggacttcaaatttatggatttgggatgctcaaccggtattctataatgcaaaanaaaanaaaaaaaaaaaaaaaaaaagcgg

SEQ ID NO: 19473 - DNA, 702 bp, Homo sapiens
  misc_feature 385, 389, 526, 543, 577, 587, 610, 647, 656, 660, 663, 667,678, 688, 700: n = A,T,C or G
agtacttctagaattaattaaggcgggtggttcacttaaggtcaggagttcaagatcagcctggccaacaacttgggtgaaaccccaagatctctacaaaaaaatacaaaaattagtcaggtgtggtgatgcacacctacagtcccagctactcccgggctgaggtgggagaacagcttgaactcaggaggcagaggttacagtgagctgagatcacaccactgtgctccagcccatgttataaagtgagaccctttcttaaaaaaaaagatttactaaaccttatatctgaaagtaatctctctcacatacagccatacacacatacaacccatttaagtttaattttagacatgatatcaaagtgtattctataacacattancctntaaggtacctgtcaaaagatctatgatcaaataaggttgggaaatactacaaattatagccccatcttgaaaagccacaatacttactagggattataggtcaatccccatgactctaagaaagtcaatcagtatanaattctacttgactaangtccatcttccttccaatgtatttttaaatttgnggggtatganaacttacccacccttcttttaanaacaatgtttttttaaaagggaaaatacatttggtcngcaaaaaangganaantccnaggaataaacnatttttttcnttaaattttttnaa

SEQ ID NO: 19474 - DNA, 199 bp, Homo sapiens
  misc_feature 33: n = A,T,C or G
aaagcctcattggagtggattcaggtgagaccngaaaagaggaattggagataggaagaacagataaaagaggcgattgacttaggaaaaaaagcattagctctaataaattctgattgtgcagactatgggctttaatttgatagaggtataagggaaaaggtacattttaaagcacacataatttcttttattggtt

SEQ ID NO: 19475 - DNA, 447 bp, Homo sapiens
atatcaaaatgccaatgcctggttagaatagataaaatatttcatccgcactttaaacaaaagcaattgttatgctcgtgctcatggcaggccagagggccagattgtcccctttccactatgatggtcctccagtcaaccaggcatgggctgtatggtagctctttttccaggattccacagcctggggtaacaagtcgtgccaagctctttctctgctatatcccgaagttcaagaccccacaggttagcccccgagggccatccagcttctgtctcctgacactgagttcattttgtgtctctcacgacaaagaggaaacttagcatcccttagagacctaaaaggatgcggtgagcttaagactttccaagagctcaccaaccagtcagcccttatacacccccgagcagatgtatggtgatattgtggtagacctttgctgg

SEQ ID NO: 19476 - DNA, 253 bp, Homo sapiens
  misc_feature 11, 19, 21, 24, 32, 34, 224, 228, 229, 232, 234, 235, 242,243: n = A,T,C or G
cgtcttttcanccctgcantnaanggtaacanangctgggtaccgggtccccccctcgtaaagtacttctagaaattaattaaggcgggaggagtaagccctgggaagagggtgggggggtgggcagcatgggagcctgatccttctgacataaataaacacaatgcatgcaggaactgaaaaaaaaaaaaaaaaaaaaaaaattgaaaaaaaaaaaaaaaaantaannaanannaaggggnnaaaaaaaaaa

SEQ ID NO: 19477 - DNA, 398 bp, Homo sapiens
  misc_feature 274, 278, 282, 283, 284, 286, 295, 306, 307, 309, 316, 319,320, 322, 326, 327, 342, 343, 344, 349, 351, 356, 363, 365,369, 376, 397: n = A,T,C or G
agtacttctagaattaattaaggcgggtggatcacgaggtcaggagatcgagacgtcctggctaacacagtgaaactccatctctactaaaaatacaaaaaattagctgggcgcggttgcaggtgcctgtagtcccagctactcgggaggctgaggcaggagaatggcctgaacccgggaggcggagtttgcagtgagccgagatcgtgccactgcactccagcctgggcgacagagtgagactccgtctcacaaaaaaaaaaaaaaaaaaccnatanagtnnngnccccccccngggggggcccnncnttccccnttnngngganntttttcccccccccnnnggggntnttttnaaaaaangnctgngttctgncagggcttatttatttactgnt

SEQ ID NO: 19478 - DNA, 431 bp, Homo sapiens
ggtacccgggccccccctcgagagtacttctagaattaattaaggcggggagaaatcaataggaattattcaatttgaagaacaaagagaaaaaaggttttaaaaagttaacgtattatcactgacctgtggaacaatgctatgagtctagcatatctgtatttgctatttcagaaaaagaggagagaaataatggagcagaaaataatttgaaaatatacttgctaaaaaattctcatttttgtgacaataattgatttttatatccataaattttaggaaaacaaaacacgataaatataaagaataccatacctaggcatatcgtaagctaactcctgaaaagcaaatgtaaagagaaaatattgaaaatcattacattatatatagagaaaagatgatagaagttatcactgactttttatcagaaa

SEQ ID NO: 19479 - DNA, 366 bp, Homo sapiens
  misc_feature 174, 178, 179, 180, 188, 197, 201, 202, 203, 204, 205, 209,211, 212, 213, 214, 215, 218, 219, 220, 224, 225, 235, 236,237, 238, 239, 243, 244, 260, 261, 265, 274, 275, 277, 278,282, 291, 295, 336, 343: n = A,T,C or G
agtacttctagaattaattaaggcgggggactatgagaatcgaacccatccctgagaatccaaaattctccgtgccacctatcacaccccatcctaaaaaaaaaaaaaaaaaaaaaaaaaaaaaaaaaaaaaaaaaaaaaaaaaaaaaaaaaaaaaaaaaaaaaaaaaaaaaangggnnncccccccnggggggggncccnnnnncccntnnnnnggnnntttnntccccccccnnnnngggnntttttaaaaaagttannctangggataacnngnngcantccctattnctanaagtcccataatcaaccaataggggttttaacgaaccctcngatgttnggatcaggacatcccgatggtgg

SEQ ID NO: 19480 - DNA, 390 bp, Homo sapiens
  misc_feature 66, 171, 175, 179, 180, 183, 184, 187, 188, 192, 196, 201,209, 211, 221, 223, 224, 228, 230, 233, 235, 237, 238, 243,248, 250, 253, 258, 261, 265, 268, 269, 272, 275, 338, 339,340, 341, 351, 358, 359, 366, 373, 374, 375, 377, 378: n = A,T,C or G
  misc_feature 379, 383: n = A,T,C or G
agtacttctagaattaattaaggcgggtacctgtaatcccagctacttaggaggctgaggcagganaatctcttgaaaccgggaggcggaggttgaggtgagccgaaattgcaccattgcactccagcctgggcaataagagcgaaactccatctcaaaaaaaaaaaaaanaaanaaannaannaannaaanaatnggcanttcccatntnttttttttgngnnaaananggnantnnaactnaagtntntcnttccnaanaaangtnnccnctntaaaaaaaaaaaaaaaaaaaaaaaaaaaaaaaaaaaaaaaaaaaaaaaaaaaaaaaaaaatcnnnncccccccccnggggggnnccccccnccccccnnnannngggntttttcc

SEQ ID NO: 19481 - DNA, 528 bp, Homo sapiens
  misc_feature 2, 20, 28, 31, 32, 34, 42, 47, 50, 69, 74, 97, 99, 100, 102,110, 112, 114, 116, 117, 124, 173, 177, 229, 246, 268, 342,347, 348, 349, 350, 351, 352, 377, 382, 384, 391, 396, 408,409, 410, 411, 412, 413, 414, 416, 430, 435, 445: n = A,T,C or G
  misc_feature 451, 455, 458, 459, 479, 483, 484, 485, 498, 502, 512, 513,514, 515, 516, 517, 518, 521: n = A,T,C or G
anaactggccgtcgttttcncccgaaanaanngnaacctttnctgcntgncgggccccccctcgagagnacttntagaattaattaaggcggggggngnnanggaggtcngnantnnaaaaccnttctggccaacatggtgaagccctgtgtctgctaaatacaaaaaattanccangtgtggtagcacatgcctgtaatcccagctacttgggaggctgaggcagaanaatcgcttgaacctggnaggcagaggctgcagtgagctnagattgcaccattgcactctagcctgggcaacaagagtgaaattccatcccaaaaaaaaaaataaaaaaaaaanataannnnnnccccccccggggggagttccaaatnccccntnaaaaagnttctnaaaccccccccnnnnnnntnttttttataaaatnttttntcacctaaantttggnacanctnncggcctttttttaaataaanattnnnagccaaaaaaaancccncccccccccnnnnnnnggnccccccc

SEQ ID NO: 19482 - DNA, 382 bp, Homo sapiens
  misc_feature 244, 329, 330, 357, 361, 362: n = A,T,C or G
agtacttctagaattaattaaggcgggggcagaaaatgggccctcttggccgtcgggacttgtactgttggtgactccgtctccttagacggtggagcctgcgtgacccagaaaggccacagctgtgctcctgattctcaggcctcgggacccagaccaggatttccatcagctcccctggctcgcaggccttctgacttctgactcaccatcagctctcctggatccagcttgccaatggcanatcgtgggactccttgccctctaatcgcatgaaacaatgcccacagtatgtctcctattaaataaatatatatctaatctcttannaaaaaaaaaaaaaaaaaaaaaaaaaangggnnaaaaaaaaaaaaaaaaaaaa

SEQ ID NO: 19483 - DNA, 222 bp, Homo sapiens
  misc_feature 20, 51, 181, 184, 196, 199, 200, 201, 208, 209, 210, 211: n = A,T,C or G
ggtaccgggccccccctcgntagtacttctagaaattaattaaggcggggnaaacgggtgttccgaataatatcctggaagttatcaggacacctattttaaatataggcctgaattttgtaaagtaatatttaaggtggtccgtgataattaaataaaatgcttaattcatgtggctcanaanaaaaaaaaaaanaannnaaaaaannnncccccccccgg

SEQ ID NO: 19484 - DNA, 605 bp, Homo sapiens
  misc_feature 127, 354, 373, 405, 447, 462, 479, 483, 501, 506, 519, 521,522, 526, 530, 540, 541, 568, 581, 583, 591, 593: n = A,T,C or G
ggggcaattcttttaatagcttctctagaaatactaaaactaacctatacaattatcaattaaatgtataccttttattagtaggaaacgctctttgggggctcatatttattagtgaaaggacacnctgtggcaagtgttttgttttactcctcttcacaaagacaaaagaaattagatctcaacaaaacatttatctcaccttttcctaaagatcacgtctcaggtgtgggcctctaaacctactgtcatacgtacattcccatatcaaaaggcaatacagaaagccactatgccatcttaagtacactcccacattaaaaagtgatgcaaagggcaccacacactcacctnggacattccttactttggnaaaaagttcagcttttttggcaccttggtctnctggacaacccccctactccccaaaaaaaaccttttttttancctgtccccttaatncccgggcctaaaaaaanagcnaaaattcccaaatttttnttttnggtttttaaaaananncccncaantccctttaanntttttaaaggggaaaccggggtccttnccctttttggggncnttaaaaananaaaaaaaaaaaa

SEQ ID NO: 19485 - DNA, 434 bp, Homo sapiens
  misc_feature 31, 32, 33, 34, 39, 48, 50, 52, 53, 70, 96, 97, 118, 121,138, 146, 164, 169, 170, 174, 175, 176, 180, 181, 187, 190,194, 197, 200, 202, 206, 217, 224, 231, 251, 296, 315, 324,325, 326, 331, 332, 339, 340, 345, 352, 354, 355, 365: n = A,T,C or G
  misc_feature 372, 378, 389, 397, 402, 408, 411, 413, 416, 424: n = A,T,C or G
gagtacttctagaattaattaaggcgggggnnnnacggnctgcattcnancnncttccttgacaaaaaantgaacaagaaatttgattggacattnnaacacacagatggaaactgcnatnacatgcctgtctactgntctatcanttgatttcaaaccttcanaaatnnaagnnngagnnttgacngtngaanatnctnanttcnggattcttacngaagcanatattgntgctcaccttgagggctctngcatagagagactaaccattgtcgttagtttaccagatccgtgangccacttacctgtgtgttnggtatcaannnaccannatcgtgnnggtcncctggancnnaaaaagaacntgtgccnctcctnctaccaacaangggggttngggantctatntananaanaaccgggntttaaaaaaa

SEQ ID NO: 19486 - DNA, 405 bp, Homo sapiens
  misc_feature 232, 239, 242, 244, 247, 250, 251, 252, 255, 258, 261, 263,266, 275, 276, 277, 286, 289, 290, 292, 293, 309, 321, 326,330, 349, 351, 355, 362, 368, 375: n = A,T,C or G
agtacttctagaattaattaaggcgggattaaaccaggcagtacagggttactcggggaagccagactgctgggatttcctgtcgctttagccagaataatccaggtatatggatatacagataatctgaaagagtttctcatttttatatttgtggaacatcgtgtaagaaaaactgaagagcaagtgcctgaaataaaatcccccacatgtatcagcctgcaaaaaaaanaataaanaananatnaannnaanaanaantnaanaaaggctcnnnaaaaaactntgnncnnccccccccgggggggngaaaatgcccanggcantaantggggaggaaccccccccncnggcngttttanaaaaangatgcangaaaatcaaatgggaatctggggacccaac

SEQ ID NO: 19487 - DNA, 271 bp, Homo sapiens
  misc_feature 2, 14, 16, 21, 28, 37, 38, 39, 41, 46, 56, 57, 59, 69, 70,71, 92, 104, 265: n = A,T,C or G
gncctccgttttcnantcggncaaaagnataacactnnntngctgnccggcccttnntnctacatactnnnagaaaaaattaaggcgggctntcagatacaggnaggcctgggggcagcaaaggaataggatggaaaaaagtattaaatatggctgcaattcggcaaggtgtggtggctcacacctgtaatcccagcactttgggaagccaaggcaggtggattgtctgagtccaggagttcaagtaccagcctgggcaacagancgagac

SEQ ID NO: 19488 - DNA, 433 bp, Homo sapiens
  misc_feature 26, 41, 50, 51, 65, 68, 73, 77, 79, 87, 94, 100, 132, 163,228, 230, 232, 233, 252, 258, 272, 274, 275, 279, 283, 284,290, 298, 305, 418: n = A,T,C or G
tattttactggccgtcgttttacacncaggaaacagctatnaccttgatnnctggccgccctttncanacagnaatnanatattacnttgagcngggacngagaatggttaatggaagtagaaggaggtaanagaaaagggaaaatcagttttcctaaaatgnaatgtctgtcatattattctcctgctcaccaggactttccttgtctaaaaattatttaccccttntnanntttgcctccaaggctttcnaaaaantgacaccagggttncnntttnggcnncttatnccttattnggttttntaagcattttttgaactgggcatggtggtttgcacctttaatcccagctgatcagaaggctgagacagaaggattgcaagcccaggagttcgagaccagcttgggcaatatantgagaccccccatcc

SEQ ID NO: 19489 - DNA, 342 bp, Homo sapiens
  misc_feature 26, 40, 47, 73, 84, 85, 89, 92, 94, 95, 102, 104, 112, 118,135, 138, 146, 152, 153, 155: n = A,T,C or G
acaagtatgacagcgcaagaaaagangacgggcttcgaancaaaacncttagggcatgcacaaaacataaaangataggggcgnncccnccngnnggggatngntttccatncttctngctttctgtacatcgcnctntcttgggncctttnnancaagtggacctaacaagttgagcaaaatgaatatttggatccatgttcctcttgtgaccctgagtcttcatgcaaggagatctgaagctgaacaatgaaaatcttcagcagaaatagaaatgggccgtggattgtaatacacactgaaattctgactttcttgattttaaatgtagaataaatttta

SEQ ID NO: 19490 - DNA, 292 bp, Homo sapiens
gtacttctagaattaattaaggcgggaagtattttgaaagcgtcatgctggcacaactggatatccatattttttaaatgaaccttgaccactatctcataccacatttaaaacttaatttgagatgaatcataaacataattataaaagctaaaacttctgaaagaacgcagaggagactatcctcgcaatgttttgaggaggcaaagatttttaggcaggatacaaaaagctctttactagaaaagaaaaaaggataaatttgtactacactttctttaaattaaaaacg

SEQ ID NO: 19491 - DNA, 434 bp, Homo sapiens
  misc_feature 1, 17, 29, 31, 38, 40, 43, 61, 62, 66, 67, 69, 71, 77, 143,156: n = A,T,C or G
nccgtccgttttccatncgggaaaagggntngaccttngnttnctgggccggcccttttcnngtanngnantggtanaaattaatttaaggcggggaaaaaagtgaaagtagaacaagtttttgattgcctcaaatataacangggaggagtcagnagcataattttagaggtagcaaatcaaaagcagaaggacaaatttttaaaaaaggaaaaaagaggggccaaaaatactagcttaagtgtattactataaagataaatattagaacaaaaataaaaatctttctaaataccaagacgaaaaaaacccaaataaatagtagaagacacacagtaaatataaaataaaatgacaaatctgagactaaacatatcagtcatatcaattatataaatggacatgactcatctaactaaaaaaaaaaaaaaaaa

SEQ ID NO: 19492 - DNA, 228 bp, Homo sapiens
  misc_feature 17, 214, 216, 217, 227: n = A,T,C or G
aattaattaagcggggnattgtgtgttgaaggataaaggttgtagctataaaagagtaacataaggaatccttttggtgatggaaacgtcctgtttcttagctgtatcaaggtcagcatactgttgtgatgttgcagcagttttgaaagatgcctccattggaggaaactgaaaaactgcatatgaagctataattaattcaaaaaaaaaaaanannaaaaaaaaana

SEQ ID NO: 19493 - DNA, 689 bp, Homo sapiens
  misc_feature 261, 293, 302, 308, 322, 329, 344, 346, 385, 409, 411, 414,419, 420, 421, 422, 423, 424, 425, 426, 427, 434, 435, 436,437, 438, 439, 440, 441, 442, 443, 444, 445, 446, 447, 448,453, 454, 455, 456, 467, 468, 471, 472, 473, 479, 480: n = A,T,C or G
  misc_feature 481, 482, 483, 484, 489, 490, 491, 493, 494, 496, 521, 522,523, 524, 525, 526, 527, 528, 529, 530, 531, 532, 533, 534,535, 536, 540, 541, 542, 544, 546, 568, 569, 570, 572, 573,574, 575, 583, 586, 587, 591, 593, 597, 598, 599, 600: n = A,T,C or G
  misc_feature 601, 602, 603, 606, 607, 608, 609, 610, 611, 612, 613, 614,615, 616, 617, 618, 619, 620, 621, 622, 623, 624, 625, 626,627, 628, 629, 630, 631, 632, 633, 634, 635, 636, 637, 638,639, 640, 641, 642, 644, 645, 646, 649, 650, 651, 652: n = A,T,C or G
  misc_feature 653, 654, 655, 656, 657, 660, 661, 662, 663, 664, 665, 666,667, 668, 669, 670, 671, 672, 673, 674, 675, 676, 677, 678,679, 680, 681: n = A,T,C or G
agtacttctagaattaattaaggggggtttagatctttatctcaagccataagtgaaacaaattaatttggtcagctacagcggctcacacctgtaatcccagcactttgggaggccgaggcaggcggatcacgaggtcaggagatcgagaccatcctggctaacacggtgaaaccccatgtctactaaaaatacaaaaaattacccaggtgtggtggcaggcgcttgtggtcccagccactcgggaggctgaggcagganaatggcatgaacccgggaggtgaagcttgcantgagccganatcacnccattgcactccanctgggcnataaaagtgtgactntntctccaaaaaaaaaaaaaaaaggggggggggtttttttnccccccccccccccaaaaaaaaananaantgggnnnnnnnnncccccannnnnnnnnnnnnnnttttnnnntttaaaaaaannttnnntttttnnnnnnggggnnnannanccccccccccccccccccccccccnnnnnnnnnnnnnnnngggnnngnancacccccccccccccccccccnnntnnnntttttttnttnnaaananaaannnnnnnaannnnnnnnnnnnnnnnnnnnnnnnnnnnnnnnnnnnnannnaannnnnnnnnaannnnnnnnnnnnnnnnnnnnnnaaaaaaaa

SEQ ID NO: 19494 - DNA, 590 bp, Homo sapiens
  misc_feature 28, 29, 31, 33, 40, 42, 45, 62, 66, 72, 74, 75, 76, 78, 79,115, 123, 127, 137, 156, 187, 203, 215, 219, 248, 259, 264,284, 291, 324, 327, 349, 355, 366, 367, 372, 376, 378, 384,385, 391, 394, 397, 400, 409, 410, 411, 415, 416, 418: n = A,T,C or G
  misc_feature 435, 438, 439, 440, 443, 455, 459, 460, 468, 469, 476, 480,485, 486, 489, 495, 501, 511, 522, 523, 529, 540, 563, 564,565, 580: n = A,T,C or G
agtacttctagaattaattaaggcgggnngnanacacctngnatnctagcactttgggaggnccangctccnannngnngattggttgagcccaggagttcaagaccaacctggncaacatangganaccctgtctntctctctctctctcacacncacacacacacacacacacacacacacacanattaccaccccatggnggcgcatgcctntaancccagctacttgggaggctgaggtgggangatcacttgancccangaggtcgaggctgcaattanctatgangatgccactgcactccagcctgggtaacaaaanganactctgtatcaaaaaaaaaaanggggcncccgggatttnnttttngggncntttttnntacggnaanatnacngggggtttnnnccanngngttaaacccccctttgnaannnctnccaaaatggggnaaannccccaagnnccctttnaaanggggnnggnaaaaanaaaccntttcttcccnaaaaaaacaanntccccnaaaaaaaaaangggggtattttttgggtttttcnnncccaaaaaaggattntccccccttt

SEQ ID NO: 19495 - DNA, 447 bp, Homo sapiens
  misc_feature 31, 36, 43, 48, 49, 50, 57, 59, 64, 67, 74, 84, 86, 90, 100,112, 120, 123, 131, 134, 171, 194, 203, 208, 209, 212, 217,221, 223, 232, 233, 238, 240, 241, 245, 251, 255, 256, 265,271, 281, 287, 303, 311, 337, 348, 356, 373, 376: n = A,T,C or G
  misc_feature 377, 380, 406, 412, 418, 421, 424, 442: n = A,T,C or G
agtacttctagaattaattaaggcggggttntaaanctgtttntaacnnncagattncnacttncangaaccanggaaataaancnaatnatatttaacnacccaagattantaggccangangaggttanacncaatgtgaaactgtcctcctaggataaggtttaaagnggctttttgggggctgggtgccncggctcacncctgnnatnccaanattntnggaggctgnngtggncnnatcncttgangccnngagttcaanacgagnctggccagcntggtgnaaccccttctctactnataatacnacaaattatccataccttggtcgggngggctcctgtnaatccaantacccacgaggctttangcnnggntaatcgtttggggccccacgaggtgntggttncttcanagnccnagattggcccacttgccntcctg

SEQ ID NO: 19496 - DNA, 542 bp, Homo sapiens
  misc_feature 514, 531: n = A,T,C or G
aattaattaagggggctttgatgataaatgaaccccaagcccactctagcctttcacttaagtcctctgtcaagcattttaactgagctgctcaaaagaccaggcttacaaattagcaatttcagtttgttccctttttcctactggggcctaggtattcaatcaggaaaaactgcttctcaaactgacacagctagctggacagcttttcttagagccctcaggagacagggtcctctagacttcagagttttaggagagagagccagggagttccagattggtttagttctgaaaaacagactaagtatctctaaagaggggaagcataataaagattagacaggccaggcgcagtggcttcatgcctgtaatcctaacactttgggaagccaaggcaggagggtcacttgagctcaagcacttgacaccagcctaggcaacacagttaccaacacaggcaacataaccagcctcgtctctattaaaaagtaaatttaggccaggcatgggnggctcacgcctgtaatnccagcacgttg

SEQ ID NO: 19497 - DNA, 623 bp, Homo sapiens
  misc_feature 313, 461, 503, 546, 552, 553, 559, 586, 590, 623: n = A,T,C or G
agtacttctagaattaattaaggcgggaatagatagtgcttagcagttgcaatcttgatcaacttataaggcttgaacctcagcctccctgctctcattccaaaggaaacaccagtgctaaaatcaactacaaatgtgagcttataatgtaaactgaagtcaatgtgagactggcgggtaggctggactcctgttttaatgtggtatagagaaaaagaacaaaagccccttactcaagctgcagcttacttaacttctagccagtcagcaacaaaagacccaagaagctatgaaccactagttcctgtcttanagaggggctggaaacttccctgcgaccctgcatgtgcaattagaagtaaacttcgccttatactggcctcttcctcattttaatgctgaaaatcacacccaggtgtggaaatttaaactgctaatgttacgtgccatgtatgaaaaancatgaaggcagggcgcggtggctcacgcctgtaattcccagnactttgggaagccccaggtgggccgatcaccgagggtcagaanatcgannaccttnctggccaacatgggggaaaccccccgncttnttcttaaaaaaacctttcccaagaaaaaatttn

SEQ ID NO: 19498 - DNA, 399 bp, Homo sapiens
  misc_feature 381, 383: n = A,T,C or G
gtaccgggccccccctcgagagtacttctagaattaattaaggcgggatgagagagaatattatttcagggttgttgtaatagaaaaagtctagttttcagcaacagcaatgaaatacaaagtgtgcaaataaattaatgaaaaaataatggcccactaataagataacagatattaacagaaacagtcctagaggaatcgtaggcattgaaaaatctagaaaaagtctttaaattacctgtcttaaatgtgctgcaaagataaataacatcaaaaggaaaaacatttcagaagaatagtgtctcatcaaatagaaaatatcaatagagatagagattataaactgaagccaaactctaaagttgaaaattaagataaccnanaaaaaaaaaaaaaaaa

SEQ ID NO: 19499 - DNA, 281 bp, Homo sapiens
ccctcgagagtacttctagaattaattaaggcggggtaaaggaacataaaggaaggtaagtttactatacttcacttgaactggtaaaatcattataccagtagagcatgatgtatgttatggctataaaatgtcatacctaccaaccactagaaaaagctatacaaagagatatattctaaaacactctacataaatcacaaggaaattctaaaaaaatgttcaagtaatctacaggaaggtaggacaagtaatctacaggaagtaaacaaaaaaaaaaa

SEQ ID NO: 19500 - DNA, 558 bp, Homo sapiens
  misc_feature 169, 172, 173, 179, 186, 188, 195, 197, 202, 205, 207, 211,216, 219, 225, 233, 236, 241, 243, 251, 253, 256, 258, 265,267, 272, 274, 278, 280, 283, 284, 286, 295, 298, 303, 329,332, 334, 338, 350, 357, 363, 367, 373, 382, 389, 394: n = A,T,C or G
  misc_feature 395, 398, 401, 413, 416, 417, 428, 431, 436, 439, 442, 446,452, 462, 466, 477, 481, 482, 483, 491, 518, 519, 520, 521,522, 523, 524, 525, 526, 527, 528, 529, 530, 531, 532, 533,534, 535, 536, 537, 538, 539, 540, 541, 542, 543, 544: n = A,T,C or G
agtacttctataattaattaaggcgggcgcctataatcctagctactagggaggccaaggtgggagatcgcttaaacccaggaggtggaggttgtagtgagccaagattgcaccacggcacgctagcctgggtgacacagcaagactccatctcaaaaaaaaaaaaaanttnntttcancagggcntntagcctntngaaanatntntgtntcctntanctttgnccaaaatntgnccttntnttgggggngnaanancccaatnanttttntntaananccnnanaaccttttntanttttngaaaaaaccccaaaaggttttaaatnganantctntttaattttaancaaaatnttagcntttntaaaangtttttttnggaaaanggaannganttngggggggaaatntannaaaataaaaangtnccttnggnaanactncgtgtnttttaaaaantttncctgacccccncttnnntttgaaanaaaaaaattttttttttttctcttttnnnnnnnnnnnnnnnnnnnnnnnnnnncccccccccccccc

SEQ ID NO: 19501 - DNA, 218 bp, Homo sapiens
  misc_feature 86, 135, 136, 137, 154, 155, 156, 157, 159, 160, 161, 162,166, 168, 169, 174, 177, 182, 183, 184, 195, 196, 200, 206,207, 208, 215: n = A,T,C or G
agtacttctagaattaattaaggcgggggtatgtcagtgtcactggatgtcaaacagtaataaattaaaccaacaacaaaacgcanaaaaaaaaaaaaaaaaaaaaaaaaaaaaaaaaaaaaaaaaaaaaagggnnncccccccccgggggggnnnncnnnncccncnntaggnggnttttnnnccccccccccnngggncctttnnnaaaaaanaag

SEQ ID NO: 19502 - DNA, 426 bp, Homo sapiens
agtacttctagaattaattaaggcgggaaaaggtaactaataatcaagggaacaaataaactaggagcagactcacaaataacctagatattgcagttaacatacaaggcacttaaaacaactaggaataatatcttaaagaaaatagaggaaaagtacaaaagggatgaaaagatggagaatttaaaaggttagaatctataagaataatcacatgacagtctagatttgaaaaatacaatttctgaaactaagaacatattggatgggtttaacagagtcagaatacagcaggagacagaattagtgacttcgaaggcagtaacatagaaaatattcagactgaagcacagagagaagaaataatagaaagagaccagggcaaagattgatgtgggacatggtctaacgtccatgtaattggaa

SEQ ID NO: 19503 - DNA, 288 bp, Homo sapiens
agtacttctagaattaattaaggcggggggtccagaaggcagactgctatgggttgaactgtggtccccaagaaatgtatgtgaagtccttaacacccagtatcttacacagtaaccttatttggaaaaaggatcattgcaaatgtaattaggatgaggtcacatgatggagtagggcaggaccctaatccaatatgactggtctcctaataagaagatagccatatggagacagagacaaaggaagaatggaatgtgaagatagcagcagagattagggtgattaaa

SEQ ID NO: 19504 - DNA, 357 bp, Homo sapiens
  misc_feature 86, 97, 119, 120, 124, 130, 133, 137, 140, 144, 150, 155,159, 164, 169, 210, 216, 220, 243, 285, 288, 317, 318: n = A,T,C or G
tgggtgccgggccccccctcgagagtacttctagaattaattaaggcgggggaaatacctaccctttgaaataccacctagagganggggttatagnacaccctatcatgtgctccagnntatnaaatanttnctcnttnctcngaattntgaanaacnatatnttttnaggactcaaaagatttgcttgctatggacttgtcttgcaanataaanaatntttttgtggaccacttctccaantaccaaaaagcaactgaaagaaacaaacatggagaagaaganaantaacaccgaaaatctttaccatcactttnnaaaggggaccctgactgtgttaaagaagaagtgggagaa

SEQ ID NO: 19505 - DNA, 444 bp, Homo sapiens
  misc_feature 2: n = A,T,C or G
gngtacttctagaattaattaaggcggggatgtgagtgttctgccttccaataaatattaggccctaaaaaactgcatacttttttagcccttttccttaaagggctccactctaaagtcagtaattgaattaagaaacaaactggccagacgcagtggctcacgcctgtaatcccagcaatttgggaggccaaggcaggaagattgctagaagtcaagaattcaagaccaccctgaggaacaaaatgagaccacatctctacacaaaatgtaaaaattaactgggcttagtggtgcgtgcctgtagtgccagctattcaggaggctggggtgggaggatcacttaactaagttcaaggctatagtgagctatgatcacaccactgcactacagcgtgggtgacagagcaagaccttatcccaaaaaaaaaaaaaaaaaaaaaa

SEQ ID NO: 19506 - DNA, 327 bp, Homo sapiens
agtacttctagaattaattaaggcgggagatgaaaatacctttaaaatgggaaaaaaggccaaatatttaaaacagatccatagaaaatatagatatgtacattatacagtaggagaattgaaacaaaaacattgaatatattcaataaaatataaaacaaggtgaaatattatataagagaattgggaaaataaaatactgaatctcattgctctacatattggctttgtaacaaaatagacaaaggaaaaaaagatgtttggtgactagaacgtgtgtctgtaaaagttacccaactcgataaggaaaaaaaaaaaaaaaaaaaa

SEQ ID NO: 19507 - DNA, 356 bp, Homo sapiens
  misc_feature 8, 9, 10, 14, 25, 27, 28, 30, 32, 43, 48, 71, 91, 195, 204,205, 221, 224, 229, 240, 241, 265, 268, 273, 274, 281, 285: n = A,T,C or G
tggccgtnnntttncacacaggaancnnanangaccttgatgncgtgncgtgagccagggaagcggggacnagagggttgctttgtgttangacagaggactctccgtaatgacactggagagagaggtgacagatgaaggagcaaatgctttcagaggtgagggagaatgggatctggcactgtggttcctgcntgaagacannggctggcggtgcctgnacntacantaccacttccnntgtcacggtaaagtccgccatcanatnactgnnggagttnaaanaccaagtagacgctcctctactctttgagacatcactggcctataataaatgggttaatttatgtaaaaaa

SEQ ID NO: 19508 - DNA, 361 bp, Homo sapiens
  misc_feature 14, 46, 65, 71, 77, 80, 131, 153, 243, 244, 266, 276, 277,278, 279, 311, 315, 329, 332, 334, 345, 350, 353: n = A,T,C or G
gaaatacttctagnaattaattaaggcggggagtgttaagtaggtncatcacgctctaaggccgntttttncttagncanacccctgttgatagaccatatacttgagggcaatactgtttgctcctcctnttgaaaatgattaggcacttanggacagtaaagctgtattttctggaaggaagactgtatcttctggaatagttttctagaaaactagtcatatacaataaaagtatcaaanntaagtccggctagagcacaaantgaaagaagnnnnccccccccgaagggggtccccctttatccccncatnaggagaattttttnctncnccccctcgganagccnttnaaaaaata

SEQ ID NO: 19509 - DNA, 422 bp, Homo sapiens
agtacttctagaattaattaaggcgggctgaattgttgataaaatggaaaaagtagtatattgttatataagcttctgaggtgtgttttgttgtataagccctggaggttaaaaagtcatcccttatgtatagtagttaaaggcataaaactgtgacttttagatattccacagaaccagacttatttgatgtggataataaccaatgatttagcattttgtttgcttttgttttattttatccgggttcattttttactcttcccatgtacatgaaacaggtggtggcgtgtagagatcagctgatccttgttttatggttaattgaactactttgtatccagggtttctgcaaatccaaaagtgatttttcatctaggatctattcctaacagtctactccaatcccactttagttttcc

SEQ ID NO: 19510 - DNA, 285 bp, Homo sapiens
  misc_feature 28, 51, 118, 243: n = A,T,C or G
agtacttctagaattaattaaggcgggngacacaaccagcaagcttgaggncacttcaattcgtattatcccaactagcagaaataaaaattaatgaataaagatgaacagagcctangataacaatgggatactataaaatgtgccattacaagcattatgaaaactcccgaaagaagggagaaagataaaatggggcagaaagaacatctgaagaaataatggctaaaaagttcccaagcntgatgaaatacgtgaatctacacattccaaaatctcattgaa

SEQ ID NO: 19511 - DNA, 620 bp, Homo sapiens
  misc_feature 1, 2, 3, 14, 34, 49, 200, 225, 284, 299, 313, 319, 326, 327,331, 346, 351, 358, 363, 365, 371, 373, 384, 397, 403, 420,422, 427, 452, 455, 466, 467, 468, 471, 481, 482, 485, 487,495, 496, 497, 500, 504, 511, 522, 523, 534, 535: n = A,T,C or G
  misc_feature 542, 547, 549, 557, 576, 579, 587, 590, 591, 595, 596, 602,605, 606, 607: n = A,T,C or G
nnngtacttctagnaattaattaaggcgggcggnatcacgaggtcaagnagtttgagaccagcctggccaacatggtgaaaccccatctttactaagaatacaaaaattagctgggcatgttggcacgtgcctgtaatcccagctacttggcaggctgaggcaggagaattgcttgaacccaggaggcacaggtcgcagngagcagagatcacgctgctgtactncagcctgagcagcgggagtaagactgtcctggggaaaaaaaaaaaaaaagaagaaaatntgggctgggcacggngggcttcatgcctntaattnccagcanntttngggaagaccgagggngggcngggatcnccgangntcaaananttttgagaccnagccctggccaanattggngagaaccccatcttttntnagaanacaaaaaatttaagcttgggcattnttnggcacctgccnnntantccaaactannttngnaagggttnnngcngggnagaaatntgtttgaaccnnggaaaaggggnnggttttnaaggnancccaaaantgtgccccttggacttttnaanctgggggnaannaaannaaaaantcnnnttttaaaaaaaaa

SEQ ID NO: 19512 - DNA, 238 bp, Homo sapiens
  misc_feature 1, 2, 15, 70, 144, 147, 149, 150, 158, 159, 160, 181, 195,200, 208, 213, 217, 223: n = A,T,C or G
nnaagtacttctagnaattaattaaggcgggcagtggcagtggcaagaaggagggagaggtggagcaaantgagggccgagtgagagcgtgctccagcctggctcccacaggcagctttaaccattaaaactgaagtctgaaanatngnncaaaactnnnaacaaaaacccaacctccgancagtacatgctaanacttnaccagtcngggcncccncctatnctggattgatccaat

SEQ ID NO: 19513 - DNA, 520 bp, Homo sapiens
  misc_feature 127: n = A,T,C or G
agtacttctagaattaattaaggcgggggactatggtggctattgcaacattattcaatgtagaccttaaggtgaaaagtattacaaagagagacaatttgtaatgataaaagatttgattcaccanaaagtttcaacaggtctaatattttaatgatttaacaatatagcctcaaatatataagcagaaatgaacagaactaaaatgagaaaagacaagtctgcattcccagattttaatatactcagtaacagaacagcagccatgcaaaaataccgtaaatatgtaaagattggaataatactttaaaacttaacctaattggcatatatgaaacagaatacccaacaactgcaaaatacacattattttcaaatgcagatagaatatttatcaaaactgaccatattccaagtcataggaatggaatatattctttggccatgtatcattcacttagaaatcaataataatttcaaaaattaggaaaaaattctattaagttcataaatttaagaa

SEQ ID NO: 19514 - DNA, 679 bp, Homo sapiens
  misc_feature 257, 401, 427, 447, 468, 485, 529, 532, 540, 542, 544, 545,549, 557, 582, 591, 599, 600, 602, 617, 643, 648, 652, 675: n = A,T,C or G
gtacccgggccccccctcgagagtacttctagaattaattaaggcggggatttgacttgtttttccatttggatgccttttatttctttctcttgcctgattgctctggctaggacttccagtactacattgaatagcagtgtaattgggaaggaaggttgaaaatgaatgtacacatagttaaaggatgccaattattgctggaaaggcagctcatcatgcagagtgaaatgagggaaagacaaatggccatgcanattgcgtggtctcgggaattcctcaaatattttggaactttttttggccttgcagccatctttttaacagctggagcgattaaaaaaaagaagccagccttcctggtcccgattgttccattaagctttatcctcacctaccantatgacttgggctatggaaccctttnaaaaagaatgaaaggtgaanctgaggacatactggaaacanaaaagagtaaattgcanctgccaaaaggaatgatccttttgaaagcattggaaaaagccanaangggaacanantnnattnttcataanacaaatgaaaatcatgcttaccaantcaaatctnaaaagcannanaatttattggacttngaatcatgggtttttacagttttttnaaaantgcncaaaaattttgatttttaaaaantttt

SEQ ID NO: 19515 - DNA, 430 bp, Homo sapiens
  misc_feature 241, 245, 248, 249, 250, 251, 252, 254, 255, 259, 260, 261,262, 263, 264, 265, 267, 269, 274, 275, 279, 286, 290, 291,292, 293, 297, 299, 301, 303, 306, 323, 332, 357, 365, 397,422: n = A,T,C or G
agtacttctagaattaattaaggcgggagtggagtggaagaagagggagaggtggagcaaagtgagggccgagtgagagcgtgctccagcctggctcccacaggcagctttaaccattaaaactgaagtctgaaaaaaaaaaaaaaaaaaaaaaaaaaaaaaaaaaaaaaaaaaaaaaaaaaaaaaaaaaaaaaaaaaaaaaaaaaaaaaaaaaaaaaaaaaaaccccccccccccccccngggnggnnnnncnntttnnnnnnntnanttttnnaacnccccccncctnnnngctnancncntanggctaatttccccatanccgtggggngacttccctggtcaccaaggcaacncatgcatnttggggggtttcctttacctttttctataaanttgtaccaaaaacatccactttaanttcttttg

SEQ ID NO: 19516 - DNA, 428 bp, Homo sapiens
  misc_feature 401, 403, 409, 418: n = A,T,C or G
agtacttctagaattaattaacaatatacctaacagaactttgcttcctaccaagattcttcataggattaaaaaactgtatcccatgactcaccactacaaacttactcgaaatacagagagaaagagttgaggagggggcaccccagtaacagccaccactcatgtaccccaggaaagatttctattagtcccttaatcaaatgtttcacatcactggctaatccctgcgacagggaaatcacctggcaaatatagctcctaagcactggcagagactgaataccctaaacctagttacagcaaatgttttcccaaacagcaccagagtcccttaactcctcagaaatcttttcccagccaactctcgattctccaaactaagcacataaattcatcananaaaaanaaaaaaaanaaataaaaaa

SEQ ID NO: 19517 - DNA, 109 bp, Homo sapiens
  misc_feature 3, 15: n = A,T,C or G
ggnagtacttctagnaattaattaaggcggggtcgaagaaggtggtgttgaggttgcggtctgttagtagtatagtgatgccagcagctagaactactcccaccctgga

SEQ ID NO: 19518 - DNA, 281 bp, Homo sapiens
  misc_feature 136, 139, 143, 145, 150, 154, 156, 159, 162, 164, 168, 170,173, 180, 183, 189, 191, 193, 194, 205, 207, 213, 216, 218,220, 221, 225, 229, 231, 233, 239, 242, 244, 248, 250, 251,254, 258, 260, 264, 266, 267, 270, 271, 275, 276: n = A,T,C or G
agagtacttctagaattaattaaggcgggagaatcgcttgaacccaggagatggaggttgcggtgagccgagactgtgccgctgcactctagcctgggcaacagagcaaaactccgtctcacaaaaaaaaaaaaanccntgcntnaaaancccncntgnccntntccntnatntccctcnttntttccntngnntaaattttccntntaaaanaantncnnaaangggnantngtgggngtngncttnannaantttngnaaantnnccnncccnnaaaaa

SEQ ID NO: 19519 - DNA, 294 bp, Homo sapiens
  misc_feature 23, 24, 25, 77, 148, 150, 163, 169, 173, 177, 178, 180, 187,189, 193, 204, 212, 213, 224, 227, 230, 231, 243, 251, 252,254, 257, 262, 269, 283, 285: n = A,T,C or G
tgggtgccgggccccccctcgtnnntacttctagaaattaattaaggcgggcggatcatgaggtcaggagatcgagnaccatctgcctaacacggtgaaaccccgtctctactaaaaatacaaaaaaaaaaaaaaaatttccccgggngnggggggggccccntttttncccntttnntnggggggntngggngggaaatgggntttacccnngggggcaaagnttncannaacccaaattcncccctttnncntcnccccngggcaanaaaccaaaactccntntaaaaaaaa

SEQ ID NO: 19520 - DNA, 323 bp, Homo sapiens
  misc_feature 21, 22, 23, 24, 37, 38, 53, 55, 57, 64, 65, 69, 71: n = A,T,C or G
ctcgagagtacttctagaatnnnngaaggaaggggtnnaactactgacacttntntnttttttnngtcncngcacaaaactatactagtagccattatatctttcaccttcatgtgctcacgataaaaaggagaaaaaagtccattttatttaagaatgtgcttgatgagagtaaatattattaattttattaactcttctccccagagttatgtctttctactattctgcgtaacaaatggaaagtatgcataaagcgcttctgttgcattcagaagtgttgcattcagctttctgctgcattcagaaatggctgtctcaaa

SEQ ID NO: 19521 - DNA, 599 bp, Homo sapiens
  misc_feature 1, 14, 385, 420, 425, 427, 438, 440, 445, 455, 468, 470,474, 481, 483, 498, 509, 511, 514, 520, 526, 544, 546, 554,556, 562, 572, 578, 588, 591: n = A,T,C or G
ngagtacttctagnaattaattaaggcgggtggatcatttgaggtcaggagttcgagaccagcgtgcccaacatggtgaaacccccgtctctactaaaaattagccggatgtggtgccgcacgcctgtaatctcagctactctgagggtgaggcaggcaaatcgcttgatcccgagagagggaggttgcagtcatcggagatcgcgccactgcactccagcctgggcgagagagcaagactccacgtcaaaaatgtttttaattaaggcggggatggaatggatgcaccgcaaataatgcatttttctgagttttcttggtaaaaaaaaatttttttaagtaaaaaaaaaaaaaggtattacatgggccatttgttacataaaangacttttttgggttaaaatatttcctaaaaaaccngtttntnttaaaaatcantngattnaaaaaatttnaaaatgtttttgntntttntggtgtnanaaattattcccggtnttggggaaatncnctnggattntttcanaatgggaaaaaaaaaacntntttttttnanagggtnaaactaaggnaccttntttttttttnttntttttttt

SEQ ID NO: 19522 - DNA, 421 bp, Homo sapiens
  misc_feature 63, 70, 73, 76, 80, 82, 86, 100, 108, 110, 113, 114, 121,129, 144, 145, 147, 151, 158, 160, 164, 170, 173, 180, 184,192, 196, 197, 200, 201, 204, 215, 225, 228, 229, 235, 240,243, 247, 248, 250, 256, 265, 269, 279, 285, 286, 296: n = A,T,C or G
  misc_feature 297, 298, 299, 303, 308, 324, 330, 345, 363, 365, 373, 381,385, 386, 387, 390, 399, 413: n = A,T,C or G
agtacttctagaattaattaaggcggggagttaaaatatttcgattttttttttttttttaanggaaagnccngcntaanancccngggcctttttaacnaaaaggcncnccnnttacccngttttttntcccttttttaaaannanaaanaattttntncagnaatttngcngtttttnttanggctaaancctnnccnnttnttcctgctccnccgggggggnaanntgggcnttctnatnaaanncnggcccntaggaaacnggangtttaaaaangccaanncctttcaggnnnnaggnaattnattttttttaaaagcntttttnttaaaaaccaaaatntttgtttttttaaaattntnaaatgggnggggacancaannnccnatttttgancttaaatctttttnaaaaaaaa

SEQ ID NO: 19523 - DNA, 304 bp, Homo sapiens
  misc_feature 47, 50, 61, 80, 83, 130, 136, 141, 143, 165, 186, 206, 212,246, 276, 286: n = A,T,C or G
aagcatgtcaagttgaatgagtatatctaaaaaataatactatattngtnttagaaccatngttaaaaatccagtattangtntttataatcagctaacagatatggttacttcattggagtaatgctantatganaatantntcatattcaatataggaaattnttcattgcaatgtgaccttgncaagctatataacctctgtnaatatnaaatttagcacctccaaaatggacatataatgancttcaaagcgtattcaattaaatattctanaacagtgccnggcacatagtaggcgctc

SEQ ID NO: 19524 - DNA, 287 bp, Homo sapiens
  misc_feature 1, 3, 14, 31, 58, 77: n = A,T,C or G
ngngtacttctagnaattaattaaggcgggnaatagggaatacaactttgtttcgagnctacttggaacacttaggnaaagttgacatatattagcttacaaagtacaacctcaatgagttccgtaacagaaataatacaaacaacattctgtgctcacaatgcaataaaactaaaaattaatcataagattaaaaaccaaaaaggcccttcaatttgaagagttacaagattaaactctattaaataagtttttaggaaaaaaaaaaaaaaaaaaaaaaaaaaaaa

SEQ ID NO: 19525 - DNA, 309 bp, Homo sapiens
  misc_feature 109, 146, 150, 163, 168, 175, 182, 231: n = A,T,C or G
agtacttctagaattaattaaggcgggttaatcttgcatatttgtttctaattactctatttttactactcccatcatttctctttctcctgcaagaagttggaatgtnctaccacagtgcatcacatacacccacagaacagtancaantgagggccccagngtttntgtaaanaaagcantcaccctgataactgccggtaatgacaaccttgttgactgtccagtcanggtttattattaagtgtgcagaaattttcatttttgactcacaaatacatttttgttctttcataaacatgtataata

SEQ ID NO: 19526 - DNA, 278 bp, Homo sapiens
  misc_feature 6, 18: n = A,T,C or G
ctcganagtacttctagnaattaattaaggcggggggacacatcgaatcctctttttctccctggtattcacctgtctttgttatcccaaagaaatctggtaggtggcgaatgcttactgatcttaaggtggtaaatgctgtccgtcagcctatgggaacgttacaacccagtttgccctcccccactatgattcctgagtattggccacttatcatcattgaccttaaagattgcttctttaccatttcctgtggcccctcaggacttttgaaaaaa

SEQ ID NO: 19527 - DNA, 169 bp, Homo sapiens
  misc_feature 48, 59, 68, 83, 94, 159: n = A,T,C or G
aaagatgtttggctttaaaaatgtcaggataacggaagaagcatcttntgccaacgaanaggcagcanacctcaagttctcanatgccatgganaaaatcagtgaaggccgtctgtggtggctcacacctgtaaccgcaccatagctggaccccatctntaccctcacc

SEQ ID NO: 19528 - DNA, 554 bp, Homo sapiens
  misc_feature 36, 72, 108, 134, 164, 197, 205, 225, 249, 258, 275, 279,282, 283, 284, 285, 286, 295, 301, 304, 307, 311, 317, 319,330, 333, 335, 342, 343, 346, 347, 348, 349, 353, 357, 389,408, 416, 431, 436, 439, 440, 480, 486, 489, 496, 504: n = A,T,C or G
  misc_feature 505, 509, 514, 524, 528: n = A,T,C or G
agtacttctagaattaattaaggcgggcggatcacnaggtcaggagatcgagatcatcctggctaacacggngaaaccccgtctctactaaaaatacaaaaaaattanctgcgcgtggtggtgagcgcctgtantcccagctactggggaggctgaggcagganaatggcgtgaacccaggaggtggagcttgcagngagctganatagtgccactgcactccancctgggcggtaaagcgagactccntcccaaaanaaaaaaaaaaaaaaatnatanttnnnnnccccccccngggggnaanccnaatncccccntnggagggaatgnttncnccccccnnatnnnncggnttanaaaaactaattttatcttgctaaataacttantttactataatataaacanaatgtccnaaggggaatattttnaatanatnnttaatctcaacctttcctaaattccatcaaaggtttgttntgaaanatntgataanacaaatcnnagcnggaanaaatctaggnttgnaaaaatacagtttaaaaaaaaaaaaa

SEQ ID NO: 19529 - DNA, 735 bp, Homo sapiens
  misc_feature 119, 125, 127, 133, 139, 140, 142, 150, 157, 161, 169, 170,175, 176, 178, 182, 185, 194, 200, 204, 207, 210, 211, 217,220, 235, 241, 244, 245, 246, 253, 255, 259, 267, 273, 274,282, 289, 292, 298, 308, 314, 316, 326, 328, 329, 331: n = A,T,C or G
  misc_feature 345, 356, 358, 366, 381, 394, 395, 396, 399, 403, 404, 414,425, 431, 438, 440, 448, 459, 460, 466, 471, 486, 487, 490,492, 493, 498, 499, 500, 504, 505, 506, 513, 515, 516, 517,518, 528, 529, 531, 532, 533, 534, 535, 536, 556, 558: n = A,T,C or G
  misc_feature 559, 560, 561, 562, 563, 564, 565, 566, 567, 568, 569, 570,571, 572, 573, 574, 575, 576, 577, 578, 579, 580, 581, 582,583, 584, 585, 586, 587, 589, 591, 592, 593, 594, 595, 596,597, 600, 601, 602, 603, 604, 605, 606, 607, 608, 612: n = A,T,C or G
  misc_feature 613, 614, 617, 618, 621, 622, 626, 627, 633, 639, 640, 649,650, 651, 652, 653, 654, 655, 656, 657, 658, 659, 660, 661,662, 665, 666, 667, 669, 670, 671, 672, 673, 675, 676, 677,678, 683, 684, 686, 687, 688, 690, 691, 692, 693, 695: n = A,T,C or G
  misc_feature 696, 697, 698, 699, 700, 702, 703, 712, 713, 716, 717, 718,724, 727, 728: n = A,T,C or G
cccccctcgagagtacttctagaattaattaaggcggggttacagtgagccgagatcacgacactgcactccagcctaggcgacagagtgagactacatctaaaaaaaaaaaaaaaaanttttgntncaaaanttacanntncaaaaacntgctttnggtngggcccannggttnntncctntantcccaggantttggnaggnggnggnnaccggntcncaaggtcaggaaatngaaacnttnnnggttaanangggnaaaccccntttttnntaaaaatncaaaaanttncccggncttgggggcncccccntnttttcccacntnntngggaggataaggcnggaaaatggcntnaacccggnaaggggaccttgcantaacccaaaatcnnnccnttgnnttccaccccnggggacaaaangaaacnccttttntnaaaagggnaaaaaaaaaannaaaaanggggnccccccggggggggnnttntnngccannntttnnnttttttntnnnncccctttttnngnnnnnnttttaaaaaaaaacttttgntnnnnnnnnnnnnnnnnnnnnnnnnnnnnnnangnnnnnnnttnnnnnnnnngggnnnaannttnnaaanngggggntttttnnaaaaaaaannnnnnnnnnnnnnggnnnannnnngnnnnttttnnannntnnnnannnnnntnnaaaaaaaannttnnnaaaaanccnnaaaattt

SEQ ID NO: 19530 - DNA, 267 bp, Homo sapiens
agtacttctagaattaattaaataaaagcactgaatgaaatgatacaaaaaacattttatcacttcaagtggtaaaagcttttctaactaagagtttttaagatttctggacttcatattgacatatttaactatataataatcagaaactctatatgcaaaaaaaatcaaaaagtaaattaaacacttagaaaaatcatttgcaacccatatcattacataagcacaaatagcttcctgaaaaaaaaaaaaaaaaaaaaaaaaaaa

SEQ ID NO: 19531 - DNA, 419 bp, Homo sapiens
  misc_feature 29, 70, 84, 86, 88, 108, 109, 112, 116, 121, 122, 127, 136,139, 140, 142, 147, 148, 154, 161, 164, 165, 169, 170, 171,174, 181, 182, 189, 190, 191, 199, 200, 211, 218, 224, 241,293, 299, 310, 334, 374, 402: n = A,T,C or G
agtacttctagaattaattaaggcgggcngatcacgaggtcaggagtttgagaccatcctggccaacatntgaaaccccatctntntnaaaaatattaaaattacccnngcntggnggggnnaggcntgaaaatcnctnnancctgnnaggtgnaggttgnaannagcnnnaancatgccnntgcactnnnccctgggnnacaaacactcntgtgtcntaaatnttgataataataataancttcatcttgataataaatactcattatcacaactatattgtctaaagggtntgttgncccacccatantggataatacaatccacaggggtnccacaagaaaactcatatggcaaacaacgacaaaaataancaatgaaaacaaaacaaaaaaaactcanagggctgacagtgctgc

SEQ ID NO: 19532 - DNA, 185 bp, Homo sapiens
  misc_feature 124, 133, 138, 143, 152, 155, 166, 171, 174: n = A,T,C or G
agtacttctagaattaattaaggcgggatcaatattactgattttcttttgtctcagattccaatatggtttcatagcttttgtgctttgacttccaaaaaaaaaataaataaataaaataaanaaaatcaanggaanccaanccaaagcancanaaaaaaataantaatnccnaaaaaaaaaaa

SEQ ID NO: 19533 - DNA, 506 bp, Homo sapiens
  misc_feature 146, 148, 155, 156, 157, 162, 164, 165, 182, 183, 186, 187,197, 198, 205, 206, 208, 216, 223, 224, 225, 230, 237, 238,239, 246, 247, 249, 251, 252, 255, 263, 267, 268, 273, 274,275, 276, 280, 291, 299, 300, 306, 307, 309, 310, 312: n = A,T,C or G
  misc_feature 316, 318, 332, 333, 337, 340, 343, 347, 350, 353, 354, 356,357, 360, 375, 376, 377, 379, 384, 385, 391, 396, 399, 400,407, 408, 412, 413, 415, 423, 424, 425, 429, 435, 436, 437,446, 457, 463, 464, 473, 474, 475, 483, 496: n = A,T,C or G
agtacttctagaattaattaaggcgggcagatcacttgaggccaggagttcaagaccagtctggccaacatagcgaaaccccatctctaataaaaatacaaaaaaaaaaaaaaaaaaaaaaaaaaaaaaaaaaaaaaaaaaaaaantnccccccnnnaaaangnntttttttttttccaaannaanncccccttttnnccccccnngntttttttnaaaaaannnccccnaaaaatnnnccctttnnantnnaantttttttncccnnccccnnnngggncgggggaaaantttttttnntttttnngnngnaaantnccaaaaaatttttnncccnaanggnaaanccnttnnannggnaaaattttggggttnnntnaaaannaaaaanttttnccnnggggganncccnngnaaaaattnnntttnaaattnnnggggggggnttttttttttnaaaaannaattttttnnnctttttgnaaattggcaaaanttcaaaaaaa

SEQ ID NO: 19534 - DNA, 474 bp, Homo sapiens
  misc_feature 17, 25, 28, 30, 31, 37, 39, 40, 43, 44, 45, 51, 53, 57, 59,63, 68, 69, 71, 73, 79, 89, 91, 93, 96, 97, 98, 99, 102,105, 191, 277, 296, 460: n = A,T,C or G
cctactaaagggaacanaagctggntcncnncccccncnncgnnngtactncnagantnattntacgnngnanacacanagccaaaccntntnatnnnntanganggtcattaaggttaaatggcatcataaggatggagacctaaatccaataggactattgtctttgtaagaagagggagagatatcanagcttgcaccagccacctcccccttgcctcaccaatcccccttctaccatgcacccacaaagagaaggccatgtgagagcacagtnaggaggggctgtctataantcaggaagagaggcctcacgagaaagcaaccctgctggcaccttgctcttggactttcaccttccagagctgtgggaaaatacatttctgcagtttagactacccattaggtggtatggtgggccctccatatccatgggttctgtttctgtggattcaaccancaaaaaaaaaaaaa

SEQ ID NO: 19535 - DNA, 378 bp, Homo sapiens
  misc_feature 209, 217, 226, 227, 242, 248, 251, 252, 253, 269, 271, 272,274, 278, 284, 285, 286, 287, 300, 301, 312, 329, 341, 356: n = A,T,C or G
gggtaccgggccccccctcgagagtacttctagaattaattaaggcgggagggcccaaggccaggagttcaagaccagcctaggcaacatgacaagacctccatctctacaaaaaatgaaactaagaagttctgaataggaatgaaagggtggtaggtgctaggagtttgctgcttcttgaaccatagcactttggctaagttaaaaanaatccccnctcttttgnnaaggccaaaaattanaaaaanggnnncccccccggggggggncnncncccncccctnnnngggggggtatttnncccccccctanggggcccttttttaaancaggcatgttancatgtacctgtagtnccacctactcaagggaggctca

SEQ ID NO: 19536 - DNA, 426 bp, Homo sapiens
agtacttctagaattaattaaggcgggatatcgaagtgtcctgagcacatttaaggtaggctaggctaagctatgatgctcggcagattaggagtatcagatgcattttcaacttgcgatatgttcaacttatgatgggtttttcaggacgtaaccccactgtaagttgagaagtatctgcgctcatacacatacacactttttcctgaaactctgagagtaagctctagacattgtgcccctttactcctaaatatttctgggtgtatttcccaacaaacacattttttaacataaccaatagcacaattatcaaaatcgggacatttaactttttataatactaatatttaatttacagactttattcgtattttgccaattgtcctatcgatgcccatcatcgcaaaaaaaaaagaaggaaaa

SEQ ID NO: 19537 - DNA, 362 bp, Homo sapiens
agtacttctagaattaattaagggcgggattattaaacttggacaaagtagaatttaaggttgaaaacattaagcagggataaagagccacattataataataaaaagcacaatttataaaagagatctaacagtcataaacccgtagacacctagtaacaaagcagctaacaagataaagcgaaaattattaaaatgcaaggattacttgattaaaggtacagctaggctgggcgcagtggctcacgcctgtaatcccagcactgtgggaggccgaggcaggtggatcacctgaggagtttgagaccagcttggccaacatgatgaaaccctatctgtactaaaaatacaaaaaaaaaaaa

SEQ ID NO: 19538 - DNA, 155 bp, Homo sapiens
  misc_feature 20, 49, 131, 133, 134: n = A,T,C or G
ggtgccgggccccccctcgngagtacttctagaattaattaaggcgggnactctcacggtgacatgtttacagctgggtgtgactcagtaaagtggatttttttttcaaaaaaaaaaaaaaaaaaaaaaantnnaaaaaaaaaaaaaaaaaaaaa

SEQ ID NO: 19539 - DNA, 480 bp, Homo sapiens
  misc_feature 185, 187, 190, 193, 199, 203, 206, 208, 209, 211, 212, 215,219, 223, 232, 233, 240, 242, 243, 245, 246, 249, 250, 254,256, 258, 273, 274, 276, 278, 281, 282, 283, 286, 292, 294,301, 302, 308, 310, 311, 315, 319, 325, 326, 331, 337: n = A,T,C or G
  misc_feature 338, 341, 343, 344, 346, 347, 353, 356, 358, 360, 361, 362,364, 365, 366, 368, 372, 378, 381, 385, 393, 394, 397, 399,400, 402, 405, 418, 422, 429, 432, 435, 439, 440, 443, 444,447, 457, 460, 465, 466: n = A,T,C or G
agtacttctagaattaattaaggcgggcatggtggcacgcacctataatcccagctacccaggaggctgaggcaggagaatcgctggaacccgggagtctgaggttgcagtgagccgagagatcatgccactgtactccagcctgggggacagagcaaggttctgtctcaaaaaaaaaaaaaggncnaanccngggggntaanccntnnannccnaccntttnggaaacccnnggcgggngnntnnttnnaaanangnatttaaaaaccaccnngncnaannnggnaaaccntnttttttnntaaaancnnaaantttncccggnnttaangggggnnccntnnanncccacntcntngnnngnnnanggcngaaaantcntttnaccccggnnggngnngnttncggaaacccaaanccgnccctttntcntcnaccnnggnnaanaaaccaaaantcnttttnnaaaaaaaaaaaaaa

SEQ ID NO: 19540 - DNA, 427 bp, Homo sapiens
agtacttctagaattaattaaggcgggggaagggaaaaataataactttacagtggagaaatctggcagacaccaccttatcaagtattcaagatgaaccttcccaacaagtcatggtgcttctgaagagcacttcatctctgtggtattcttctcccaaatctatgccccagattaatcatgacatagcatcagacaagcccaaattgagggacattctacaaagtatccaaccaagcacccttcaaaagtgtcaaggtcgtaaaaagcaagcaaagactgagaagctatcacagattgatggagactaaggggtcatgataactaaatacaatatggacattagtggaaaaactggtgaaatccaagtaaattctgtagttaatagtgttgtaccaatgtcaatttcttagttttgataaatgca

SEQ ID NO: 19541 - DNA, 613 bp, Homo sapiens
agtacttctagaattaattaaggcgggcaggaaatacacaaagtgagcatggggcatcttgcagtgctagaaagtaaggatgtgctcaaacacatacacaggtgtacacacatgcacacatacacagtgatggaggtatatcaaagggacataggaggaagttgatggagcttcccatggtcaaaatggaataatttgaccaacaaaataaataatgtaatgttgtataaatgctacaggcattaaaagagtaatgtgtacattagaaacaactttattacacaaagttgacaacttagttgaaatagaccatttcttgaaagatgcaaactactaatattcattcgagatgaaattgataactcagtaatactctgtttattgaagacattgtattagtatttgtaatcttcaaaaaaaatcaaaaacaaaaacgaaaaacaaaacactgtcccagatagttctgggaaattctacaaaacatttaaagaagaaatgataccaattctcacagtttcttctggaaaaatataagacagaatacttctcaacttattttgtgaagccaatcttacctgctccaaaatcatgcaaagatggcacatgaaaataa

SEQ ID NO: 19542 - DNA, 346 bp, Homo sapiens
  misc_feature 84, 87, 154: n = A,T,C or G
gctgggttccgggcccccctttcgagagtttttctagaattaattaaggcggggagatgggactggtgtctttacaagcagcanaanagagaccggagctaacacatttgctctgtcttgccatgtgatgcctcccaccattgtcatgatgtancaggaaggccctcaccagatgccagcaccatactcttggacatctcagcctctagaactgcgagttaaataaacttctattgtttattatttacttagtgcatggtattctgttatagtaacagaaaatggactaggacaggtaactatacttttatcagataaaagagacattaagtcaaaaactgtaaaa

SEQ ID NO: 19543 - DNA, 442 bp, Homo sapiens
  misc_feature 190, 251, 361, 418: n = A,T,C or G
agtacttctagaattaattaaggcgggagaaaaactggcaactaattaatgcggaaggaattaaagaaacagaaaatagaaaataatgtggtaccatcattagtggctgataattcaagtgggagtcttgaatgtatgttaaggttggtgaatggaggtttgacaagaaacaggctattaagagtatcanaatatcactccacaataatatttatcaattataagagaaaagcagtgtctttacagtaganaaacctggcagacaataacatgaacaggtaatcaggattggatatcatgtcaacagggcatggtggctcacacctgtaatcccagcgctttgggagactgaggtgtgcanatcacttgaggtccagagtttgaaaccagcctgccaacaaggtgaaaagcctgtctntactaaaaatacaaaaattagccc

SEQ ID NO: 19544 - DNA, 302 bp, Homo sapiens
  misc_feature 38, 227, 232, 240, 260, 278, 280, 281, 289, 296: n = A,T,C or G
tcagtagggatgagtggcaacaattagaccttgctcanaaaagcctgtacagagaagtgatgctggaaaactatttcaacttgatctcagtgggatgtcaagttcccaaaccagaagtcatcttcagcttggaacaagaagagccatgtatgttggatggtgagatccccagtcagagccgtccagatggggacattggtttttggacctttacaacagaggatgtntgaanaagttttntttccagtctgagattaatnttaattctcttcacaaanannatgacccnttttccnttttaa

SEQ ID NO: 19545 - DNA, 303 bp, Homo sapiens
  misc_feature 46, 47, 50, 55, 57, 67, 68, 73, 77, 79, 86, 89, 92, 97, 98,99, 101, 102, 104, 106, 107, 120, 129, 131, 137, 152, 175,176, 180, 196, 200, 201, 220, 224, 225, 227, 233, 236, 246,247, 256, 269, 271, 272, 290, 292: n = A,T,C or G
ccccccctcgagagtacttctagaattaattaagggggggatgtgnnacncatcngntggaacacanncctgntttnanaacaaanacnaancaaannngnntnannacaatcctggaanaatgatccngnatgctnatactcttgaagctnactgattagaaaccacaattctnnaatncattacaataccaatnattnncctacaaccctttgtcctncccnncntggggnggngtccatcacnnttaactatnggtatactaccgncnntatattgttttttttttnanacaacagtaca

SEQ ID NO: 19546 - DNA, 412 bp, Homo sapiens
  misc_feature 272, 277, 280, 285, 286, 292, 293, 294, 297, 299, 301, 310,315, 319, 327, 337, 339, 344, 348, 359, 360, 361, 362, 365,366, 375, 379, 391, 392, 394, 395, 396, 397: n = A,T,C or G
agtacttctagaattaattaaggcgggtgggtcatttgaggtcaggaatttgagaccagcctggccaacatggtgaaaccctatctctactaaaaatacaaaatttagccgggcatggtagcaggcgcctgtaatcccagctacttaggaggctgagacaagagaatagctcaaacctgggaggcagaggttgcagtaaaccgagatggcaccactgcactccagcctgggcaacagagtgaaactccatctcaaaaaaaaaaagggaaaantcttntanttttnnaaattnnnttnantnacccaaaangggcngggntttgggtnaaaaaaaaantncctantaantttttaaaaannnntannttttttcangtgnaaaaattcccannannnncttttaaaaaaaaaa

SEQ ID NO: 19547 - DNA, 284 bp, Homo sapiens
  misc_feature 2, 47, 52, 54, 55, 67, 72, 191, 196, 199, 209, 239, 250,256, 257, 272: n = A,T,C or G
tnccgggccccccctctagtagtacttctagaattaattaatgaatntaggncnngagagagttgantgtanaaacatttgccagctcactactgctcataaatgtgccatttaatgaatgaaaagcaggaaaagctcctcaaattaggttcctgctagatcaaggatcctcgtaatgctttcattatggnctgcnttncctggtgctnataacgcccatggggggcttgttttcactngatcacagggnacccannattgtctccattacncacatagggact

SEQ ID NO: 19548 - DNA, 461 bp, Homo sapiens
  misc_feature 1, 4, 33, 38, 44, 45, 47, 93, 98, 99, 112, 117, 124, 128,130, 135, 140, 177, 181, 184, 456, 458, 459: n = A,T,C or G
ngcncgtcgttttacatcccggaaacaagcggnacccntgctgnntncccgggccccccctcgagagtacttctagaattaattaaggcgggngggannaaagggaggctangaatncaaaacntttntnttttntcggngaaacctcgtctctactaaaaatacaaaaattggccnggcncantggtacatgcctgtaatcccagcactttgggaggccgaggcaggcggatcacgtgaggccaagaattcaagaccagtctggtcaacatggcacaaccccatctctactaaaaatacaaaaattggccaggcatggtggcgcaagcctgtaatctcagctatttgggagactgaggcacaagaatcgcttggacccggcaggcagaagttgcagtgagctgagattgtgccattgcactccagcctgggcagcagaatgagagtccatctcanannaa

SEQ ID NO: 19549 - DNA, 199 bp, Homo sapiens
  misc_feature 12, 14, 25, 45, 46, 50, 60, 64, 74, 76, 89, 96, 119, 125,126, 127, 137, 140, 174, 179, 194, 197: n = A,T,C or G
gccccccctcgngngtacttctagnaattaattaaggcgggagannagantaggaggaantatngagaacttanangataataaacatncttttangaaggaaaaaagataaatttaancctgannngtcggaagcngangaaaaaagacaagctaggtaaacaaaaagctaanggcanaatgtacaaacttanaanaa

SEQ ID NO: 19550 - DNA, 350 bp, Homo sapiens
  misc_feature 17, 48, 55, 56, 73, 74, 76, 87, 93, 109, 123, 127, 139, 141,145, 146, 152, 157, 193, 236, 272, 273, 274, 275, 276: n = A,T,C or G
accgggccccccctcgngagtacttctagaaattaattaaggcggggntagtatnngcgcacactgccttgtnntntataaaacgcntggccngcatcagatgtacacngctgaagaatgaantgangtgaaattatgnantgannttgatnttaanttgaactgagtactaagcaccaaaaacatgtttcangaaaaaaatcattctacaagttgcaaaagcctttcttccaagngtacaggtttcaaatggactaaaaagaatataagcnnnnncttaaagatgagaaaaattaacggaatacatatacatcctttaattgatgttccatgaatattgtatattgtaa

SEQ ID NO: 19551 - DNA, 383 bp, Homo sapiens
  misc_feature 44, 103, 323, 324: n = A,T,C or G
agtacttctagaattaattaaggcgggagaattgcttgaacccngaaggcggaggttgcagggagccaggatcgtgccactgcactccagcctggtgacacantaagactccgtctcaaaaaaaccaaaaccaaaaacaaacaaaaaaagttaatatacaaataccaaaaacagaaactgcagaatatctgagtacttactaaggagcagtcaccattttaagtactttactcatttaattctcacaacagccatgtgaggtaagtagtattatctccattttccaaaaggggaaaattagagagatctaacaactttactanngtcacaaagatattaagggtgaatgtgggatttaaagtcattctctttaatgactaagc

SEQ ID NO: 19552 - DNA, 442 bp, Homo sapiens
agtacttctagaattaattaaggcggggtaagagcgagcttcggagaagcagtggtgggttccatgtgatggtggagtaggaggcaggtctccgcggttcatctgtgttgctctaaatgacactgtttcattattttgatggctggagaatatttcctagtgtatgtatatgagagtttcttgatctctttatctgtggatgaacaggctagtcaccctgctgtggaatagaaggccagaattgatcagtctcatctgagagtaactttgtacccatcactgattccttctgagactgcctccacttcccagcagcctctggtttcttcatgtggctgcagatggcaggatttcccaaaggtttctggctgaaacatattccgtggtgtatctgtacagcagtttcctcatccctgcagctgtgtttgaacaggtcatttac

SEQ ID NO: 19553 - DNA, 485 bp, Homo sapiens
  misc_feature 24, 26, 50, 55, 63, 107, 108, 138, 146, 184, 207, 220, 226,253, 264, 271, 276, 277, 303, 304, 305, 312, 327, 334, 336,359, 382, 386, 388, 406, 440: n = A,T,C or G
agtacttctagaattaattaatgntnttcataattgagacagaactgttngttangtaccatnatgctaaataaaactgtggcacttttcaccataatttaatttannggaaaaagaagacaatgctttccatattgngataaggnaacatggggtttttctgggccagcctttacaacactgntagggtacatacgctaccttgangaaagggaccttngagcanctgtagtcatcttaaaggcttctcatncactgtgcttnttaatgngtaannaaagtgaggagaaattaaatactctnnnggcgttntatataataaattcnttgaagnanaatacaaaaaatcaaatgccatnctaaaaaaaaatgtgcagggctntttntncttaaaaagaaactaggncatcaaaataatggcactgtggaaaaattttganggcacaaattcgcccctttttttgcatgctaaatattacccaaaa

SEQ ID NO: 19554 - DNA, 406 bp, Homo sapiens
  misc_feature 20, 33, 39, 45, 56, 60, 62, 67, 68, 72, 73, 76, 78, 82, 90,105, 112, 132, 365, 378, 386, 390, 391: n = A,T,C or G
aactggccgtcgttttacanccggaaacagctntgaccntgattnctggccgtcgntttncnccagnnaacnnctntnaccntgattagngggcccgaaggattngaacganggaaggaaggaacaatgaangaaagaacgaagattcattattctgtcctctgaacctgagtgaagaaatatactctgtcctttgtacctgcgtgaagaaagaaaagaaaagaaagaaaagggaaggaaggaaggaaagaaggaaggaaggaagaaagaaggaaagaaagaagattcattattctgtcctctgaacctgagtgaagaaatatactctgtcctttgtacctgcgtgaagaaagaagagaaaaganagattagaagganagaaaganaganncgaaggaagggaaga

SEQ ID NO: 19555 - DNA, 329 bp, Homo sapiens
  misc_feature 1, 2, 3, 4, 31, 32, 37, 40, 45, 50, 68, 71, 77, 80, 85, 90,99, 101, 104, 121, 123, 159, 169, 178, 184, 189, 196, 203,204, 220, 228: n = A,T,C or G
nnnntacttctagaaattaattaaggcgggnngtttngangagtntcatntgctgaagtaagccactngcngtgacnccngtgangagcnttttggaananganccacaagaaaaatccananaaacttttgcccttataaagtaacacctggaggttntgcggctagntggctattnaagaanacctngcccctntgaatgnnatactgtaatctttanggaagaangctacatgaattaattgtactctatggggaaaatttctttggaaaagatatttttgtaaaactttttttttccaggtaaaaacttttatgaaaaaaaaaaa

SEQ ID NO: 19556 - DNA, 340 bp, Homo sapiens
  misc_feature 3: n = A,T,C or G
acncgggccccccctcgagagtacttctagaattaattaaggcgggacgggatttttatcctaaggctaatcaaaagccattgaatagttgtatgcagaagggtgtcataatactcacatcttataaagaccactttttaaaagggcatagtggtcctaatgggaggtgatgtgggcaacagagtagactcgttagactaatgaggacacagaatccagcatcacactgtgccagatgcacatccaggttcagttctagaaaacttacaataagctattctgtgaaaacacagtcagtgggttctgtatctgcagatatgcaaggttgactgtctgggtc

SEQ ID NO: 19557 - DNA, 213 bp, Homo sapiens
gggtaccgggccccccctcgagagtacttctagaattaattaaggcgggtggggaggggtgctctgctggtcttcaattaccaagaattctccaaaacaattttctgcaggatgattgtacagaatcattgcttatgacatgatcgctttctacactgtattacataaataaattaaataaaataaaaaaaaaaaaaaaaaaaaaaaaaaaaa

SEQ ID NO: 19558 - DNA, 231 bp, Homo sapiens
  misc_feature 5, 29, 30, 67, 72, 81, 85, 104, 116, 150, 181: n = A,T,C or G
caaantctgggtaccgggccccccctcgnnagtacttctagaattaattaaggcggggtagggggtncgtgngaactctgnaatntccactcaattttgctgtnaacttaaatcanctctaaaaaataaagtctattttttaaaaaggtnaactaaagtctgtgagttacatcatttcagngtttttctcaatcacactatataatctggatcattatataagattttgaa

SEQ ID NO: 19559 - DNA, 426 bp, Homo sapiens
  misc_feature 287, 310: n = A,T,C or G
agtacttctagaattaattaaggcgggcatcgtggtgggcgcctgtagtcccagctactcaggaggctgaggcaggagagtggcgtgaacccgggaggcggagcttgcagtgagccgagatcgcaccactgcactcccccctgggcaacagagccagactccatcttttaaaaaaaaaaaaaaaagaattagtaaagattcaccaggggttgagctcagggattgcgtgggggacctgacaattctctaggcaaagggaatgacctggataaagatacagaggcaancaaacattgctaaaaatagtatnctttgtaagctctatccttggtcctgagaaaataaaatgtatagctttatttatttctgtgagatgagttaccaatgggtactgctattcaaaaaagcaaaacagtgcaattcttt

SEQ ID NO: 19560 - DNA, 685 bp, Homo sapiens
  misc_feature 562, 630, 646, 682: n = A,T,C or G
agtacttctagaattaattaaggcaggagttggttgatacagaaggaattatatttagtttttctcttacacttcatttaacttttgaaaagctctataagtttactgcaggaaatgcaagaaggaaaataattttttagagacttgataaagaacatggggttttcagtactatttttaataagtagcattctgatacatattattgctagttaggatgtcaaatgaaaaaataagcaatgttaatttggatttttaacatctacatgtagtctctaggttatctgaagtaatccagggcattcagctatatgtaattactaaactatttgagttattgcttaatccatgattttttgtttgttttatgcagggggatagtttcatagtaagttctgaattccctgtaagactgagtgtatacttagaagaagaggatattactgaagaagctgctttgtctaaaaagagagctacaaaagccaaaaatctggacagagaggcctgaaaatgtgacaggatcatgaatgtcaaaggtgaagcatatagaaaaaaccactcntagaaatgaataaagataaatgtggatatattgtaccagtctggggggggaagaaattctgaaacccnaaacctttataccagnaaaaaaaaattttttaaccctgttgaagaagtttgngaa

SEQ ID NO: 19561 - DNA, 384 bp, Homo sapiens
  misc_feature 7, 45, 71, 75, 114, 177, 188, 189, 190, 191, 196, 197, 200,203, 204, 205, 212, 215, 220, 222, 232, 235, 236, 237, 251,252, 253, 259, 260, 266, 267, 273, 274, 277, 362: n = A,T,C or G
cccctcnagagtacttctagaattaattaaggcgggtggctgtantcccaactacttgagaggctgaggcngganaatggcttgaatctgggaggcagagcttgcagtaagccnagattgtgccgctgcactctggcctgggcaacagagcaagactccgtctcaaaaaaaaaatanaaacaaaaaannnnaaaanntcnccnnnccccccnagnggggntnctcaattgcnccnnnaacgttgaccaacnnncccccnnaccctnnggattnnaanacaatcctattctagagtccatatcaacaatagggtttacgacctcgatgtttggatcaaggacatcccaatggtgcagcccgcntattaaaaggttccgtttgttc

SEQ ID NO: 19562 - DNA, 343 bp, Homo sapiens
  misc_feature 21, 85, 202, 204, 208, 218, 221, 222, 226, 228, 229, 239,240, 244, 245, 246, 249, 250, 251, 253, 258, 260, 275, 286,289, 291, 293, 294, 295, 304: n = A,T,C or G
gggtccccgggccccccctcnagagtacttctagaattaattaaggcgggaagaatttatgttaaagagaaagaatttctttgtnagaaattcttccgtttttacaattattagggtaatgggtttcttgacagtggcattgcaatgaagcccagaattatatttgattaattcaagtcatcttaaatctgtagatgtaggntnactnaaactcctgnccnnaagngnncccccccccnngggnnnccnnntnattgncnttacaggggtgaacnacccccccccngtntngnnntgctttatnttagtcactgttacttcttttaaattgttttaattgtat

SEQ ID NO: 19563 - DNA, 450 bp, Homo sapiens
  misc_feature 32, 123: n = A,T,C or G
agtacttctagaattaattaaggcggggactngggacttttaaaattttctttttaaaatcattttttcaactctattattttgtttgttcctacatgtgaaagttgtgcttttcatgattgncagaagaatagctttccatatgaaaatggcatccatcaacatcatgttttcgataagggaaagagagacttcttaaatctttgtctgagaaacagctctacttattataaagataattcaaaagaaacttcaaacacagattttgacaacatcgtggatcctgatgtgtattcttctgacattgaaaaaaattgaggaaagcacctcctttgaaagaaatttaaaggagaaaaatataggtttagaaagtaatcaaaagtctgatgattcctgtgtatcacttgaaagcaaggacactttgctaggtagagatttagaaaaagctcc

SEQ ID NO: 19564 - DNA, 383 bp, Homo sapiens
  misc_feature 336, 373: n = A,T,C or G
agtacttctagaaattaattaaggcggggagaagcctgggtggcttcagcatcctccacgggctgcgccgtctgctcggggctgagctggcgggagcagtttgcgtgtttggggttttttaattgagatgaaattcaaataacctaaaaatcaatcacttgaaagttgaacaatcagcggcatttagtacatccagaaagttggtgttagggcaccacctcttgtcacgttctggaacattctgtcatcaccccgtgaagcaatcattttcccctcccgtctttccttccttcccctggcaactgctggatcgaactttggggtctctggttgtcntaaaatagggttttccctgttctgggacatttcatantaaaatggga

SEQ ID NO: 19565 - DNA, 450 bp, Homo sapiens
  misc_feature 12, 324, 326, 336, 352, 359, 377, 384, 399, 427: n = A,T,C or G
agtacttctagnaattaattaaggcgggcatggtggcttatacttgtaatcctaacactttgggaggttgaggtgggaggattgcttgagttcaggagtttgagaccagcctgggcaacagagtgagactccatccctaaagataaaaaaacaaataaaattatttttaaaagttatttattaattttaaattatataaaactatttttaaaattaactcttaaaaaaatattgccttacataaactggccttggagatccaaacatgttgtcaagacttgagtatattgtcctcttgtaacaggctcactcctgtgatggaanantggagtaaanagtggacatatttganacaactntgattttactttgcccanttaccanttctaaaaaagaaancctttcctaccttcattttaaaactganaaaaaaaaaaaaaaaaaaaaaaa

SEQ ID NO: 19566 - DNA, 571 bp, Homo sapiens
  misc_feature 218, 219, 223, 224, 227, 228, 231, 232, 237, 247, 248, 260,261, 264, 265, 266, 267, 278, 282, 284, 286, 288, 293, 294,295, 297, 303, 311, 313, 317, 318, 319, 320, 323, 330, 336,337, 338, 341, 344, 347, 352, 356, 358, 362, 363, 365: n = A,T,C or G
  misc_feature 367, 369, 370, 371, 384, 398, 405, 408, 412, 413, 414, 416,418, 431, 441, 448, 453, 459, 461, 464, 469, 470, 472, 475,476, 481, 482, 485, 491, 493, 498, 501, 502, 503, 518, 522,523, 524, 525, 532, 540, 545: n = A,T,C or G
agctgggtccgggccccccctcgagagtacttctagaattaattaaggcgggcgcctgtagtcccagctactcggaaggctgaggcaggagaatggcatgaacctgggtggcggagctggcagtgagccgagatcgcaccactgcactccagcctgggcgaaggagcgagactccgtctcaaaaaaaaaaaaaaaaaaaaaaaaaattaaaggggggnntttnnttnnttnnttttnaaaaatgggnngggggggggggnnttnnnnttttttccccngggntngntntaaannncngggccntaaacctncnaaannnnttnggggggnggtttnnnaanttnggnaaatnaaancnttcnngntnannngggaaaacccccnttttttttaaaatnccaaaanttncccnnncntnggggggggccccntttttccccntttcttnaaaanggttangncanaaaanngnttnnaaccnnggngggggnanttgcnatnnncccaaattccccccnttgnnnncaacctnggcaaaanaaaanaaactcccttttaaaaaaaaaaaaaa

SEQ ID NO: 19567 - DNA, 394 bp, Homo sapiens
  misc_feature 379: n = A,T,C or G
agtacttctagaattaattaaggcgggcagatagatagatagatagatagatagatagatagatagatagatagatagataaatataaatgtgcttctaattctttcctctgtaaggccaagaagcaaaaataagcaaacatagcacctattctctaatttattccccactaaacggcccaggaagccttggagaaatggctgattacagggctgaggcagggtaggtacaagatggccctgtaacatcttgttatactggatattaagcttccaaaaaaaatgatggtggtgtgtcgtgaagacacaggggtttccgctggctaattctgggacagttcgcacaacaataaaagtacaataattataaaccattgaanaaaaaaaaaaaaaaa

SEQ ID NO: 19568 - DNA, 643 bp, Homo sapiens
  misc_feature 22, 567: n = A,T,C or G
ggccccccctcgagagtacttntagaattaattaaggcggggagatatatggcataccatacagctattaagtggcagaaatcttacagacatgaacacaatatttattcttatttccattttacagataaaaaaactgaggaggtacacaagaggttaatttgaccaaggtcacccagctagtaagtggcaggattatacaagacaagagcaagcaattaagtctctccaaactcaagtcttcttatatactgctacatgttttgtatactgctacatgttttgtatcaatgagctttttaacaacacacacaaaaaaactcatggattgattggtaggacagtaaaagcaaaaggccaatatatttaatgactacaatccttgcacattttagaatccaggataaggtgaaaggtaaaagatcattccaaatgggtaattttacatatagaattctattaacctgaatttaatggatcagaatacatccattcctgctaaatagcaacactatctgaaatcagttagcataatgtgtttacatttcattaaaactaaatctcttncatgtcactctttccaaagcccatgaaaatgccgcccccaaaaataactttaatcttattattacttttttttttt

SEQ ID NO: 19569 - DNA, 195 bp, Homo sapiens
agtacttctagaattaattaaggcggggaaacgccatatcgggggcaccgattattaggggaactactcccaccctggagcctccgtagacctaaccatcttctccttacacctagcaggtgtctcctctatcttaggggccatcaatttcatcacaacaattatcaaaaaaaaaaaaaaaaaaaaaaaaaaaaa

SEQ ID NO: 19570 - DNA, 102 bp, Homo sapiens
agtacttctagaattaattaaggcgggtgatggtggctatgatggtggggatgaccatctatatttttaataaaagctccacaagttaattctgaaaaaaaa

SEQ ID NO: 19571 - DNA, 280 bp, Homo sapiens
  misc_feature 41, 94, 99, 122, 130, 132, 133, 141, 143, 148, 150, 157,165, 167, 168, 175, 178, 180, 184, 186: n = A,T,C or G
agtacttctagaattaattaaggcggggtgatgcctgttgngggccctctcagccctcctaatgacctccggcctagccatgtgatttcacttnctatnggaagagaataatgttctttaanaaataacntnnacattgancntatantnaagatgngcgcgaantnnctctaantancncatncnaaggccacattttctcaaactaagtgcttgctgttcccaaatacccaagaataacttttacactttttccttccaacacttcttgattggcttt

SEQ ID NO: 19572 - DNA, 405 bp, Homo sapiens
agtacttctagaattaattaaggcggggtaggattaggtttcatatattaaagtcagcagaaatttcatgtttcacaatttgttgccagagagatccccaaattccttgaagccactgggaagttctctcaggtaaagaaagcttacagcagatttgtaatatatgtctggagagctatttataagaaatttaagaggattgttttgttttcctttattaaagatttaagcctttttactttgcaaaaagaaaactacaaaagttttatagatataactttgctaattttttaaacttttctgaaacgattagctgtagccaaattatgtggttaccgttttgctacattagaatttgaaaatgcaatatgtgtggtaaatctactgtttgaaatttataatggt

SEQ ID NO: 19573 - DNA, 435 bp, Homo sapiens
  misc_feature 268, 271, 272, 274, 285, 295, 308, 319, 324, 329, 331, 332,336, 337, 344, 345, 347, 355, 356, 357, 358, 359, 360, 361,377, 387, 393, 396, 400, 401, 406, 411, 413: n = A,T,C or G
agtacttctagaattaattaaggcgggtggatctcctgagctcaggagttcgagaccaccctgggcaacatggtgaaaccccgtctctgctgaaaaaaaaattagctgggtgtggtggcacacgcctgtggtcccagctacttgagaggctgaggcgggagaatcgcttgaaaccgggaagcagaggttgcagtgagctgaaatcgtgccaccgcactctagcctggtgacagagtgagattccgtctcaaaaaaaaaaaaaaaaaanttnntngggcggggggncccccccttnttcccccactttncggggggttgnggccnaaaantnntttnnccccccnngncgggggtnnnnnnnacccaaatttgccccntccccccacnttggcntanaaanngaaantgttntnaaaaaaaaaaaaaaaaaaaaaa

SEQ ID NO: 19574 - DNA, 245 bp, Homo sapiens
  misc_feature 75: n = A,T,C or G
tcgagaagtacttctagaaattaattaaggcggcctctggagaagaattgaccttaagttcattgaccccacctncaagtttggccatggcccgctttccagaccatggaggaagaaagaaaagcattcattggggaccactggaagaaaagacccgaaattgcaaagggaagaaagggagcttaatgccaggaaacaagattttgccagttggtgggggtctcaataaaagttattttccactt

SEQ ID NO: 19575 - DNA, 615 bp, Homo sapiens
  misc_feature 7, 32, 33, 35, 271, 272, 287, 289, 299, 306, 312, 324, 335,337, 352, 362, 371, 372, 373, 382, 393, 401, 409, 412, 413,416, 417, 427, 432, 433, 442, 456, 479, 492, 494, 497, 499,506, 513, 514, 517, 518, 528, 532, 536, 543, 545, 546: n = A,T,C or G
  misc_feature 553, 554, 555, 566, 571, 575, 576, 577, 583, 588, 595, 602: n = A,T,C or G
acaacangctgggctaccgggccccccctcgnngntacttctagaaattaattaaggcgggggacatggcttagattgatatcacaagaaaagtatcactatagaaatgacatttaaactgagaactgagttagctagatgaagtgtgtgaataagaacatttagagagagagaatattactgtgtgtctttatatgtgaggtccatgtagcaacacacacacacacacacacacacacacacacacacacacacacacacacacacacannttggtgcttttgggngngctaaaaaantctgtgnggggcncggcacagtggnctcaccccctntnatccccacccccttngggggcccgnggcgggggnnnccccggggncgggaaaatanaaaccccnctggcccnacnnggnnaacccccttntttannaaaaaaaanaaaaaaatcccccngggggggggggggcccccttttnccccccccccccnanggngntttgggnagaaaannggnnaaaccccggngggnaaantttttgngnnccccaannnccccccctttnctccnccgnnngggganaaaanaaaaacncctttanaaaaaaaaaaaaa

SEQ ID NO: 19576 - DNA, 348 bp, Homo sapiens
agtacttctagaattaattaaggcgggggaaaaaacagagaaaattgaagtatttatttataaaacatgcaaactattttaatacaacatcctgattttacaaataaagagaaaagaaatcccttaaaggtataaatgacttcaattatccacagccagcacagagaatggcttgatcctcaatcagttgtccaacttaagtagaaaaaaactttaaaaaatgtacattgggggctgggcgcggtggctcatgcctgtgatcctagcactttgggaggccgaggcggatgataacctcaggtcagcagttcgagaccagcctggccggcatggcgaaaccccgtctct

SEQ ID NO: 19577 - DNA, 286 bp, Homo sapiens
  misc_feature 158, 170, 172, 181, 186, 189, 190, 191, 194, 195, 197, 203,204, 205, 206, 209, 212, 218, 219, 220, 227, 238, 241, 242: n = A,T,C or G
agtacttctagaattaattaagggggtttatgccagttacatacaaggatcctgcatatctcaaggaccctaaagtttgtaacatcagatatcgggaataaattctatcacgttaccactaataaacttattttacagcaaaaaaaaaaaaaaaaaanaaaaaaaaaggngnccccccccnggggngcnnnccnntncccccnnnnggnggntttttnnnccccccnctggggacggnttnnaaaaaaatttcagaaaacaaaaaagacactgattgtagacactt

SEQ ID NO: 19578 - DNA, 271 bp, Homo sapiens
  misc_feature 246: n = A,T,C or G
agtacttctagaattaattaaggcgggggactgtttgttttaaattctgaatacttctagacaggatacaccacaccattctccaaatacttcaatccctgtttcactcacttacgccaccatcctggcccctaaaggcatttgagtttgaagcatctatctagggtccaagacttaaatctggaaggaccttaggcatcatctgggcttgtggtttgcaaccatgggacttttcaaaaatatgtnaaaaaaaaaaaaaaaaaaaaaaaaa

SEQ ID NO: 19579 - DNA, 438 bp, Homo sapiens
  misc_feature 198, 206, 219, 221, 260, 262, 268, 273, 277, 278, 280, 282,283, 284, 288, 290, 309, 311, 317, 324, 326, 329, 332, 334,336, 346, 349, 351, 353, 358, 365, 370, 371, 373, 374, 376,379, 381, 388, 390, 392, 395, 397: n = A,T,C or G
ggccccccctcgagagtacttctagaattaattaaggcgggtggggggatatggggattcaggcaattgtttacacactttgaataactgcaaaggatttacggtttgtgaaaaatgtgtactgtggaaaagataataaattgaagacattaaaaaaaaaaaaaaaaaaaaaaaaaaaaaaaaaaaaaaaaaaaaaanaaaaaaanaaaaaaaaaaaananaacaaaaaaaaaaaaaatgtcattgtccccccccccccngngattcnctccntctnntnannngacngnatatccccccccccccccngncgcctntataaanancanacnancngaggaccctncangncntctgnacctttnatcgnncnncnacnantacaagntntntgnanacgaccgttccctgttgaaaacctacacaccttactttcat

SEQ ID NO: 19580 - DNA, 228 bp, Homo sapiens
  misc_feature 108: n = A,T,C or G
agtacttctagaattaattaaggcgggagtcctcatccagtgtgccctaagctgaagcaggttaaaagtttagctctgccagcatgtacccacagaaagatttcctanaaaaggtctcttctttttgagcgtttcattatatatgaaggcttaagaagtcctgtgaccaagaaacctgcataacccacaacttcctagacatttttttctcaagaacataccttagga

SEQ ID NO: 19581 - DNA, 478 bp, Homo sapiens
  misc_feature 35, 38, 41, 45, 47, 48, 54, 55, 57, 59, 60, 66, 68, 69, 76,79, 81, 89, 95, 96, 98, 102, 104, 107, 108, 112, 117, 121,126, 135, 148, 153, 167, 174, 180, 181, 182, 183, 184, 190,193, 194, 201, 204, 211, 219, 221, 227, 253, 257, 274: n = A,T,C or G
  misc_feature 275, 278, 289, 292, 296, 297, 300, 357, 363, 367, 377, 378,405, 419: n = A,T,C or G
agtacttctagaattaattaaggcgggcatagganttntgnactngnntacccnntngnngtttantnnattagtncananactgcctnataagnncnacangnccnnaagnacttnaccngcatnattaattangggctggggcctnactgngaaagcaacccaancttcganctgtannnnntaatanttnnccacatncanccaactnctatcttnanaagatntaataacttgaccacgtggagacaanaccncttagggaatactggcnnaancctatttgtanaantccnnatntacaataggggtttacgacctcgatgttgggatcagggacatcccggatgggtgcancccgcntatnaaaggttcgnngtggttcaacgattaaaagtcctacgngatctggagttcanaccgggaagtaatccagggtcgggtttctatctacttcaaattcctcccttggtccgaa

SEQ ID NO: 19582 - DNA, 297 bp, Homo sapiens
  misc_feature 18, 21, 32, 34, 38, 42, 44, 47, 57, 58, 59, 63, 77, 99, 152,157, 186, 222, 229, 263, 279: n = A,T,C or G
ctggccgtcgttttacanccnggaaacaagtntnaccnttgntngtngcccgggccnnncctngagagtacttctanaattaattaaggcgggttgagnaaagcctgtggtttcacttatttatataactcactgggacattgccaaatgantaaancacttaattcgctgcttctgagacttctntgtcaaaacagccccactgataatattagaacaganaccgagnaatgcaggggtctcttccctcccctggggtttanggaagctcatggaggnagctcggctttaaaatgg

SEQ ID NO: 19583 - DNA, 298 bp, Homo sapiens
  misc_feature 8, 11, 18, 19, 57, 62, 81, 91, 97, 98, 100, 115, 165, 176,178, 182, 183, 186, 188, 189, 197, 198, 205, 210, 213, 218,226, 231, 241, 243, 251, 252, 259, 263, 271, 276, 277: n = A,T,C or G
agtacttntanaattaannaaggcgggtgcctgtagtcccagctacttgggaggcanaggcnggagaatggcatgaacccnggaggcggancttgcnntnagccgcgccactgcnctctaacctgggcgactgaccgagactcatctcaaaaaaaaaaaaaattnaacccggcgtngngacnnacncnngtaattcnngcccttnggganacngaggnaacaaatnacttnagggaaggtntnccaaactnncccgggnaaangggtgaanccttnnttttactaacaatccaaaaaa

SEQ ID NO: 19584 - DNA, 273 bp, Homo sapiens
  misc_feature 67, 92, 94, 110, 114, 120, 122, 129, 143, 146, 149, 161,170, 172, 181, 188, 199, 202, 213, 234, 237, 239: n = A,T,C or G
agtacttctagaattaattaaggcgggaagtggagggtgaataggtcacggcggccttttttttttnagttaaacttttccttttttgctgncnagtcatcctcgtcggncttntgcttntnggtatcnacatcgtcatcctnatnatnttcagctgcccncttgcccgnanctgactcancttcctnatgttcatacnccnatcccccattntcctcctatccctaaaccccnacntnattaccgggttttcctctttaaaaaaaaaaaaaa

SEQ ID NO: 19585 - DNA, 419 bp, Homo sapiens
  misc_feature 31, 33, 35, 36, 37, 39, 43, 44, 45, 46, 49, 64, 71, 73, 81,101, 106, 139, 150, 154, 157, 160, 164, 173, 175, 179, 183,189, 193, 200, 203, 239, 264, 265, 272, 276, 279, 282, 291,304, 335, 350, 354, 368, 370, 375, 399, 409, 410: n = A,T,C or G
agtacttctagaattaattaaggcgggggtngnannncnagtnnnnganaaaacacactttaanccaacananatcatgangagacagaagaaggccattncatantgggtaaagggatcaattcaacaagaagagttnactatcctaantatntangcncccnatacaggancncccngatncataangcangtgcttnganacccacaaagagacttaaactcccgcacaatgatantgggagactttaacacccgactgtnnatatcanacanatnganacagaaggntaacaaggatatncaggactagaactcagctttgcaccaagcanacctaatagacatcnactnaactctccaccacngnatcancagaatattacattctttttgagnaccacattgnnacttatttt

SEQ ID NO: 19586 - DNA, 483 bp, Homo sapiens
  misc_feature 19, 21, 24, 29, 34, 38, 42, 44, 51, 52, 53, 59, 61, 62, 63,65, 67, 73, 79, 81, 84, 85, 89, 90, 92, 94, 97, 98, 105,108, 109, 126, 132, 135, 136, 403, 405, 411, 415, 416, 424,427, 429, 438, 448, 450, 452, 457, 464, 470, 473: n = A,T,C or G
actggccgtcgttttacancnggnaacangtatnaccnttantnctggccnnngttttncnnnananaaaaanaaaaancnttnnttcnngncnggnnttttccngtnnaaaaaaaaaaaaaaacntttttnatnntcccgggactttactaatagcctactcttggctttaccaataacacaaccaatcagttaggcacgtattttgtatatgtgttatatatattcttacaataaagtaagctagagaaaagaaaatattaaggaaaccagcctgggcgtggtggctcacacctgtaatcccagcattttgggaggccaaggcaggtagattgcttgaggtcaggagtttgagaccagcctggccagcatgtttgaaaccctgtctctactaaaaaaaaananattganccgnnttttttanagngnccccccccngggggggganancncatanccccccntttggnggngggttttttt

SEQ ID NO: 19587 - DNA, 128 bp, Homo sapiens
agtacttctagaattaattaaggcgggtgtgctcttttagctgtttcttatgtatgggttttttttaatgtgatcccttcatttgaatattaatggctttttccattaaagaataaaatattttggac

SEQ ID NO: 19588 - DNA, 435 bp, Homo sapiens
  misc_feature 147, 148, 149, 150, 159, 166, 167, 173, 175, 180, 181, 182,183, 184, 185, 186, 188, 189, 190, 193, 194, 195, 196, 207,208, 211, 215, 216, 229, 230, 231, 232, 233, 234, 235, 236,241, 243, 246, 247, 248, 252, 254, 255, 257, 262, 264: n = A,T,C or G
  misc_feature 265, 267, 271, 272, 274, 275, 276, 277, 278, 279, 281, 282,287, 288, 289, 290, 293, 294, 295, 296, 298, 303, 307, 308,309, 311, 312, 314, 316, 317, 318, 322, 327, 330, 332, 333,346, 348, 357, 358, 359, 360, 361, 362, 363, 365, 366: n = A,T,C or G
  misc_feature 368, 370, 371, 372, 373, 374, 375, 376, 377, 382, 385, 387,391, 392, 394, 395, 399, 400, 402, 403, 404, 405, 406, 407,411, 412, 414, 415, 416, 417, 419, 420, 423: n = A,T,C or G
agtacttctagaattaattaaggcgggataatggtgtgaactcgggaggcagagcttgcagtgagcctagatcgtgccactgcactccagcctgggcaacagagtgagaatctgtctcaaaaaaaaaaaaaaaaaaaaaaaaaaggnnnnccccccccnggggggnnccccantnccccnnnnnnngnnnttnnnnccccccccccnnggncccnnttttaaaaaaaannnnnnnntgatntnatnnncacncnngnatatncnngnttgnnannnnnnannaaaannnntgnnnngntctanaatnnntnncntnnntggngtatnaangnnagtactttttctntnctggataannnnnnngnntnannnnnnnngaaanaananaaannanntatnngnnnnnngttnngnnnntnngtntaaaaaaaaaaa

SEQ ID NO: 19589 - DNA, 402 bp, Homo sapiens
  misc_feature 14, 25, 27, 33, 34, 40, 41, 48, 49, 52, 55, 56, 57, 61, 66,73, 242, 248, 250, 252, 253, 258, 259, 261, 264, 268, 269,271, 273, 279, 280, 281, 282, 283, 305, 306, 307, 313, 314,315, 317, 322, 323, 328, 329, 330, 340, 341, 342, 343: n = A,T,C or G
  misc_feature 345, 349, 364, 365, 367, 369, 370: n = A,T,C or G
ccgtcgttttcacnccggaaacagngntacccnnaatggnnggccgcnnttnctnnngagnacttntagaatnaattaaggcggggagagcatcaggataactagctaatgcatgtggggcttaatacctaggtgataggttgataggtgcagcaaaccaccatgggacacgtttacctatgtaacaaacccgcacatcctgcacttgtatccagaacttaaaatattttaaaaatctttanagaatncnannaaaannanacnaaannananaaagtnnnnncccccccccggggggggccccnnncccccnnntnagggnngtttnnncccccccccnnnngncggntttttaaaaattganngnanngaaatgtttattcaaatcttttgcccattttt

SEQ ID NO: 19590 - DNA, 335 bp, Homo sapiens
agtacttctagaattaattaacatttcagcaaaatacacacatgcacacagacaaagaaaatatgacaaaatggtaattattgaatttcaggataggtgtatgagtgacaattataccactttttcaactcttctatgtttagatgctttaaatatttaaagctaggggctgggtgcagtagctcatgcttgtaatcatcatattttgaggggctgaggtgggagcatagcttgagcccagcagttcgaggctgcagtgagctatgatcacaccactgccctccgggctgggcagcagagcaagaccctgtctcaaaaaaaaaaaaaaaaaaaaa

SEQ ID NO: 19591 - DNA, 177 bp, Homo sapiens
  misc_feature 7: n = A,T,C or G
gtacttntagaattaattaaggcggggcctgctctccccagctgcccctgccaatgagggccccgggctgccctgtcactcctctaacacttccctcccctgtccccaacatgccctgtaataaaattagagaagactaaaaaaaaaaaaaaaaaaaaaaaaaaaaaaaaaaaaaaa

SEQ ID NO: 19592 - DNA, 433 bp, Homo sapiens
accgggccccccctcgagagtacttctagaattaattaaggcgggatgagattataaaaggttaaaattctcatctaggccaggcacagtggcttatgcctgtaatcccagactgaggcaagaggatcacctgaggtcagaatttcgagaccagcctggccaacatggtaaaaccccatctctactaaaaatataaaaattagccaggcgtggtggtgcgtgcctgtaatcccacctacttgggaggctgaggcaggagaatcacttgaacccagaaggtggaggttgcagtgagcagagatcgtgccactgcactccagcctgggcaacaagagctaaactccatctcaaaaaaaaaaaaaaagagggaaaaaaaactttcagaaagcgcagtgtaaattacggcaagagtcaaccactaagtccattttca

SEQ ID NO: 19593 - DNA, 426 bp, Homo sapiens
  misc_feature 22, 34, 36, 40, 69, 90, 92, 115, 116, 117, 118, 121, 122,126, 156, 194, 196, 248, 249, 260, 261, 264, 269, 277, 289,294, 296, 304, 307, 313, 330, 346, 348, 350, 352, 375, 381,384, 400, 404, 412, 414, 416, 423: n = A,T,C or G
cccccctcgagagtacttctcnagggggggggangngggnggtgaaatctaattttttttttttttttnttaggcttggtaggtgcttantntcaccctattatttttatttccnnnnttnngctnttaagtactcaacaatcaaaaaatcctccnattcttctggtgcattccaaatgaaaatcttacagcanancccctactgtacaattctaagtactctaacgaggtatgaatctatgaacccnngctgaaaaccnnccnatgcngaaatccnggtagctttatnagccncnaacatcangcntgtcanaccctccaaagatcccnaataatgtcaaaatcncntncntccctttaaattaaaggtccccnctcctnccnaggaaggaagaccctntcantgtctctntngnggccccntcc

SEQ ID NO: 19594 - DNA, 211 bp, Homo sapiens
  misc_feature 7, 30, 32, 36, 37, 42, 45, 47, 58, 63, 74, 79, 80, 123, 124,138, 155, 158, 182: n = A,T,C or G
ggccgtngttttcaacccggaataaacggnancttnnctgtnttncngggaacaaaanctggntaccgggcccnccctnnagagtacttctagaattaattaaggcggggggacagactgcgnnacggacagtggacnctgggacacgtttgtanctncggccccgacgttccgacccaacntcgccgtcgcccggcatgacggggctaac

SEQ ID NO: 19595 - DNA, 228 bp, Homo sapiens
  misc_feature 146, 176, 177, 178, 197, 202, 209, 210, 211, 212, 213, 214,215, 217: n = A,T,C or G
ttctagaaattaattaaggcggggcattgtggcaacgtttgcaaccgttcacgattcaataaatattggatgaatttaaccgaaaaaaaaaaaaaaaaaaaaaaaaaaaaaaaaaaaaaaaaaaaaaaaaaaaaaaaaaaaaaccnaaaaaaaaaaaaaaaaaaaaaaaaaagggnnncccccccccggggggggcnccccnccccccnnnnnnngnggtttttcccc

SEQ ID NO: 19596 - DNA, 417 bp, Homo sapiens
  misc_feature 34, 35, 43, 44, 49, 54, 59, 62, 63, 81, 87, 91, 93, 94, 97,116, 124, 125, 126, 134, 141, 142, 148, 154, 159, 163, 168,173, 174, 178, 179, 180, 183, 184, 186, 195, 204, 205, 222,242, 248, 249, 252: n = A,T,C or G
ctcgagagtacttctagaattaattaaggcgggnncctgtttnnccacntactnatgangcnnaggcaagacaattacttnaacccntgangnngangctgcactgagctgacatngcaccatnnngctccagnctgggcnncaacantgaaantctgnctcngctgnaaatnncttnnnatnntntttttccgngcccatggnncttggtaatttcattcntggaaaaaaatcttattatncccccnncanagatttgtatatttttgactttatatttcctgagctctcctgactttgtgaaaaagggtggatgaaaatgcattccgaatctgtgagggcccaaaacagaatttaggggtgggtgaaagcacttgtgctttagctttttcatattaaatatatattatatttaaa

SEQ ID NO: 19597 - DNA, 446 bp, Homo sapiens
  misc_feature 172, 184, 199, 201, 202, 203, 209, 215, 217, 218, 219, 220,221, 226, 232, 235, 236, 238, 240, 242, 244, 245, 247, 251,252, 268, 277, 279, 287, 289, 296, 299, 300, 303, 316, 323,330, 342, 361, 364, 365, 370, 373, 374, 383, 391, 396: n = A,T,C or G
  misc_feature 403, 405, 410, 411, 415, 417, 423, 425, 432: n = A,T,C or G
agtacttctagaattaattaaggcgggtgggggatccgatcatggtgatgtacggggtgaattctcttgccgtgttgcaaatgtgtaaaataaagattatctggccaaaaaaaaaaaaaaaaaaaaaaaaaaaaaaaaaaaaaaaaaaaaaaaaaaaaaaaaaaaaaaaaanaaaaaaaaaaanggaaaaataaaacancnnnaaaaanaaaaanannnnnccccnccccgnggnnancncnanntncccnnttaaagagagaaatanacccccccncngggcgcgngnttaaaanagnngancgggaaaaacccngtggganacaaaanaaaaaggcctgnaaaaaaaaccctttttacnaannggggnaannaaaaaaaangcccaaanccatnccctttntnaatanngggnanaccctntnggggaantgaaaatttaaacc

SEQ ID NO: 19598 - DNA, 401 bp, Homo sapiens
  misc_feature 28, 31, 32, 39, 42, 43, 49, 51, 52, 57, 58, 81, 89, 104,128, 135, 142, 156, 180, 219: n = A,T,C or G
agtacttctagaattaattaaggcgggngcnngggtatncannccaaananncaatnnattatgtggcttagcccagagcncattatgngcccaacacatccgntgaccatgagcaaggtatctgaantcctctnccaaatntgactgaaaaactnatacttttctgtttctttcttaancaacaactggtctattcaagctcaaccagagcatataanagaaaaaatgactaatgagaggctcttaaatagttttgaaggacagacactttctagaaagtagaaagatcactgagtaaacactgcacctcccctaccccacaaacacacacaaaaaagatgaggatgaatgtagaagtgtagagcaagcttgtggacatcctcaagtttggttttggcgc

SEQ ID NO: 19599 - DNA, 318 bp, Homo sapiens
  misc_feature 23, 31, 73, 102, 103, 106, 107, 117, 119, 123, 134, 154,157, 158, 159, 160, 168, 169, 171, 235, 274, 298, 304, 307: n = A,T,C or G
gtacttctagaaattaattaacngggccttnttacttaactaaataaaaaactaagcagatatgagttaaatntaaaaaaaaaaaagaaaaaaaaacaaagnnggnngactacaggngngagnaaacctattgnccatttaaaaaataaatagnctnnnnggaatatnngnaatggaaatgataaatacttgaggtgaatggatatcccatttcctctaatgtggttcttatgcnccatatgcctgtgtcaaaaatatcttatgtacccccatnaataacacatatactggttacccntaaaanttnaaaaaaaaaaa

SEQ ID NO: 19600 - DNA, 137 bp, Homo sapiens
  misc_feature 5, 29, 31, 42, 100, 120, 123: n = A,T,C or G
caaantctgggtaccgggccccccctcgngngtacttctagnaattaattaaggcgggaggtttaggtttcataatcctggtaccgatcgaatgcaccanaatatcccaaaactcaatanatnccttcttctgttca

SEQ ID NO: 19601 - DNA, 422 bp, Homo sapiens
  misc_feature 32, 40, 48, 63, 69, 72, 81, 86, 90, 93, 96, 101, 103, 121,124, 129, 142, 144, 146, 147, 150, 154, 163, 170, 173, 174,177, 180, 182, 183, 190, 203, 206, 208, 214, 224, 279, 285,286, 288, 289, 291, 293, 295, 298, 306, 307, 308, 310: n = A,T,C or G
  misc_feature 312, 320, 321, 322, 323, 327, 341, 349, 355: n = A,T,C or G
agtacttctagaattaattaaggcggggggtnccattctnatcacaantcattaaatatttangaaganatnctgtgattnccatnccanggnganaggtnangtaagccagatgcctcangcnttatnattactaaattangncnncancggngcctcacanctgtaanccnntcnctntnngtggccnaggtagatcactngangncaaganttggagaccntcctggccaatatggtgaaaccctgtgtctactatgaatataagaatttaccccngcatgnngnnanangnctntactcccnnntncntacgaggnnnnggcncttaaattgcttgnacccgtgnaggcanaggttgcagtgagccgacatcgcaccattacattccaggcctgggcatcacagtgaaactccatctc

SEQ ID NO: 19602 - DNA, 209 bp, Homo sapiens
  misc_feature 23, 25, 70, 85, 107, 152: n = A,T,C or G
ggtaccgggcccccccctccggngntacttctagaaattaattaaggcgggtagtggtaggatgaaacantttggagaagatagnaagtttgaagtggaaaactggnaagtacaggaagtacgggaaggcgaagaaaagaatagagaagatngggaaattagaagataaaaacatacttttagaagaaaaaagataaatttaaacctga

SEQ ID NO: 19603 - DNA, 255 bp, Homo sapiens
  misc_feature 4, 171, 172, 173, 174, 175, 198, 215, 221, 222, 236, 237,242, 243, 245, 246, 249: n = A,T,C or G
cganagtacttctagaattaattaaggggggagtgggggactagaactgggatgtcttggcttgtatgttttttgaagcttcgattatgatttttaaacaataaaaagttctccacaaaaaaaaaaaaaaaaaaaaaaaaaaaaaaaaaaaaaaaaaaaaaaaaaaaaaannnnnaaaaaaaaaaaaaaaaaaaaaanccccccccccccccccngggggnncccccccccccccnnaaaanngnnttncccccc

SEQ ID NO: 19604 - DNA, 304 bp, Homo sapiens
  misc_feature 283, 284, 290, 291, 296: n = A,T,C or G
agtacttctagaattaattaaggcgggatttagaagttcattctctggtcactgaatgtatcaggtcaatgaagccttcaaggtgccaacagagatcatggtcaggtggacccatatatgaactccaccaacacattgagaggatccttgctggaaaggaacaggctgttcctaagccaaaatctggtgcttctcagaagaaaaagataacccaaaaggaactgaagaggaaaatttagggcaggaaatacaaagcacacaattaatgtgaataaaaaaaaannaaaaannatatnaaaaaaaa

SEQ ID NO: 19605 - DNA, 350 bp, Homo sapiens
  misc_feature 8, 43: n = A,T,C or G
taattaangggggtctttaaaaagacaagtgtctgtcctttancattccaaagagttagaggacaaaactgtaaaattctggtatgtaatatttatttcttataaataaatacatatatacacatagcagtcatgtgctgcataacgatgattcagttagtgacagaccccatataggacagggtcccatatgattataatggagtatatttgagccaggcatgatggctcattcctataatcccagttacttggcaggcagaggtgggaggattgttcaagaccagcctgggcaacattgtgagaccctgtctctaaacaaaaaaaaaacccaaaaaacaaccaaaaaa

SEQ ID NO: 19606 - DNA, 309 bp, Homo sapiens
  misc_feature 296, 297: n = A,T,C or G
agtacttctagaattaattaaggcgggaggattgtgtaagcccaggagttcaaggttacagtgagctatcatgccacagcattccagtctaggcaccaaggcaagatcctgtctctaaaaataacaataattatcatcatgatctcacaatgaacactttgtttgatgggcattcaacaaatgtgtagctatttctgttgaactgcttcctccctgtgtatctgctgagtaaataaacgaatgaacaaacccaaaaaaaaaaaaaaaaaaaaaaaaaaaaaaaaaaaaaaaaaaannaaaaaaaaaaaa

SEQ ID NO: 19607 - DNA, 418 bp, Homo sapiens
  misc_feature 29, 306, 307, 308, 309, 310, 315, 316, 317, 318, 320, 322,324, 326, 327, 330, 334, 337, 339, 340, 347, 351, 352, 353,361, 366, 367, 370, 375, 381, 386, 389, 390, 391, 393, 397,402, 408: n = A,T,C or G
ggtgccgggccccccctcgagagtacttntagaattaattaaggcgggggcaggtctcactatgttgtccaggccaatctcaaactcctagcctcaagcaatcctcccacctcagcctcccaaagagctaaggttacctgagccactacacttggccactatagtttttttttaaggctgccctgagaaaccagaggcagccctaagttctccctccccatgtcctgccccatcctcaccctacagacacccaaaatgacctcaggactcaaaaaaaaaaaaaaaagggggggggggggggggggnnnnnccctnnnntncnancnnttngggnggncnnggggggnaaannntttggggncgggnnttnaaaancctttnggccnaannngnaaanccccntttttnaaaaaaaaaa

SEQ ID NO: 19608 - DNA, 539 bp, Homo sapiens
  misc_feature 3, 17, 21, 27, 28, 35, 47, 362, 439, 450, 458, 477, 485,504, 508, 516, 528: n = A,T,C or G
cgncgtttttcaccccngaanaagggnnacaccangctgggctaccnggccccccctcggagtacttctagaaattaattaaggcggggaggctgttaaaacattttagcataacacctacagagcttgagccagtcttccaggggcaaatatataaaaatgttgcaaaatacaaaatatttaataacagcatagagaatgagattcagctgtagagagatcatttgaatctactcccagcatttaagctagactgctggtgtactaacagcactgattctgttagcaacaagtagtggtagacaactagaaatatgtcagtttaaacttgtgaagttggttgttacaaatctccattctgngtatctccattctgaatactaaatacacatctccatgtgtatctccattctgaatcctaggtccaccaatttgtctnttggaaaattncttgcccnctgggtaaggttaaaaaancttttttnaaaaaaaattccgggaaantttnggcttaanaattttccttgnaaaaaaaaaaa

SEQ ID NO: 19609 - DNA, 308 bp, Homo sapiens
aattaattaaggcggggtaggggggtgaaaagaagaaaaaagtggatttcggattggctgaatattttgttactaattttcactagctttttcaaaaatactataattcatataccatacaatttatccacttaaagagtacaagtcactattgtttggtatattcatggagtctctacttttcatatactgtgctacatgattcagatcatgtagtgactgctagttaagtaaatggatttatttccttctgcaggatcccctctacttaatgcagtagctacatttcttgaaaggtagcttgggcc

SEQ ID NO: 19610 - DNA, 303 bp, Homo sapiens
  misc_feature 8, 40, 57, 68, 93, 97, 133, 134, 166, 234, 260, 274, 277,292: n = A,T,C or G
agtacttntagaattaattaaggcgggatgacccaccaancacatgcctatcatatnttaaaacccancccatgacccctaacaggggccctntcanccctcctaatgacctccggcctatccatgtgatttnncttccactccataacgctcctaatactaggcnctactaaccaacacactaaccatataccagtgatggctgcgatgttacacgagtaaagcacataccangggccaccaccacaccaacctggttncaaaaaggccttcngantacgggataaattcnctattttatta

SEQ ID NO: 19611 - DNA, 421 bp, Homo sapiens
  misc_feature 11, 45, 225, 408: n = A,T,C or G
agtacttctanaattaattaaggcggggtgggggagcctcacttngttttttctttttttcctttctaaaaattccaacagctgctctaaaaccttaattattccaagcaagtttctagaaccactgagtttctgggaatgtctgggtttgcaaagtcaccagctgtgtttggaaagacatttccaatggggttgaactctccagtgtgaatgaacttttcttgncatgacctcactgtctgtaatgagggcttcctgattgcagtttgctttacctgaaaacaaaacagaggccaaacaccaccttatttaaagcaataatggaagttatcctatgaaagatagcagcccaccagcagatgtgaaaagcaattactaggttaaaaaaagagaaagaaagagagaganagagagagagaga

SEQ ID NO: 19612 - DNA, 367 bp, Homo sapiens
  misc_feature 19, 20, 54, 65, 66, 68, 74, 77, 89, 97, 154, 162, 177, 193,198, 211, 216, 217, 218, 230, 242, 252, 254, 258, 259, 326: n = A,T,C or G
gtgccgggccccccctcgnnagtacttctagaaattaattaaggcggggccaancccttggtacnnanccgcantgngagcctgcgcangacagttncaggtggttttaaagtaacacgtggaaatcccttgaatttaggacctggttaaccancaaagatnagactgttcttaacnacctagatgattctgntcatntctgaacgggatnaggtnnngtcctcactccnattaaaagaaancaatgtctananacannaaaaatgcctgaaataaaacaatattccacccaggtgaaacattttgaaaatggcttaaagaatgtntgggctgggcgcagtggctcacatctataatcccagcactt

SEQ ID NO: 19613 - DNA, 453 bp, Homo sapiens
  misc_feature 270, 271, 272, 273, 280, 283, 284, 285, 289, 291, 298, 307,311, 318, 319, 322, 327, 330, 335, 336, 337, 338, 339, 340,343, 345, 346, 348, 356, 360, 362, 364, 366, 367, 369, 370,372, 374, 380, 381, 382, 383, 384, 402, 408, 413, 417: n = A,T,C or G
  misc_feature 440: n = A,T,C or G
agtacttctagaattaattaaggcgggctgatcacctgacatcaggagttcgacagcagcctgggcaatgtggtaaaactctgtctctattcaaaatacaaaatgagccaggcgtggtgctggcatgcgcctgtatgctactcgggaggctgaggcaggagattggcttgaatccagaaggcagaagttgcagtgggctgagatcacaccagtgtactccagcctgggcaacagagtgagactctgtctcaaaaaaaaaaaaaaaaaggnnnnaaaaaanttnnntttnantttaaantttaatttnaaantttaaannggnccggnccnggggnnnnnnccntnnancccccccntttngnangnntnngncnggggannnnnagggccgggaaatcaaanccttcngggtnaaanggggaaacccccccttttttttnaaaaaaaaaaaaa

SEQ ID NO: 19614 - DNA, 403 bp, Homo sapiens
  misc_feature 275, 284, 286, 294, 295, 301, 304, 317, 320, 323, 325, 328,334, 335, 336, 340, 345, 346, 347, 348, 349, 351, 357, 361,368, 369, 372, 373, 374, 375, 376, 377, 381, 383, 388, 395: n = A,T,C or G
agtacttctagaattaattaaggcgggtggatcacaaggtcgggagatcgagaccatcctggctaacatggtgaaaccctgtctccactaaaaataaaaaaattagcagggcatggtggtacgagcctgtagttccagctacttgggaggctgaggcaggagaatcacttgaacccggaaggcggaggttgcactaagccgatatcacgccactgcactccagcctgggcgacagagcgagactctgtctcaaaaaaaaaaaaaaaaaaaaaaangggggaagngnccccctcnncccttnaantcccaattttttnggnggntnggncaaaannnttgntaaannnnnantttttnaaanccccccnnccnnnnnngggnanccccnttttttnaaaaaaaa

SEQ ID NO: 19615 - DNA, 181 bp, Homo sapiens
agtacttctagaattaattaaggcgggtaaaagtgtggaggttttgtattcaattgaagttaagttgctattaacttaaaaaagactgttgtaactacaagatattttatgaaagctttgagctaaccacaaataaaattcccacaatatacaaaaaaaaaaaaaaaaaaaaaaaaaaaaa

SEQ ID NO: 19616 - DNA, 586 bp, Homo sapiens
  misc_feature 28, 32, 34, 36, 37, 39, 42, 44, 46, 50, 59, 60, 63, 73, 75,76, 78, 94, 95, 97, 108, 126, 137, 139, 156, 157, 167, 169,170, 171, 175, 183, 195, 196, 199, 207, 208, 211, 213, 216,232, 233, 240, 267, 297, 300, 305, 313, 347, 350, 363: n = A,T,C or G
  misc_feature 365, 379, 381, 382, 388, 395, 400, 402, 403, 416, 418, 486,527, 530, 552: n = A,T,C or G
agtacttctagaattaattaaggggggncttnancnncncantncngacnttacacaanncanccacacagananntnacatggatacccaggnntngaactcaattntgaaccaagtggacctantaagcatctanantaactatctaccctaanncaacagaatntnnntttntttcaccnccacaccacatnnatnccaaaatnnacngnatncgttggaagtaatagnnctgctanctgaatgtaaaagaacagaaattatancaaactgtttcgtcattaccatgagcgtantcnaactnaaactcangattaattaaactcactctaaactgctcaactanatnggaaacagaacancnggctactgaatgantnntgggcncataacnaaagngnnggcccaaataaanangttctttgaaacctacgagtaacaaaggacacaacataccagtatctttggggacaaattcaaagcangtgtgtagagggaaaatttatagcactaaaatgcccacaanaanaaagcaggaaaggtccaaaaantgacattctttacatccaaattaaaagaacttag

SEQ ID NO: 19617 - DNA, 476 bp, Homo sapiens
  misc_feature 20, 184, 189, 190, 191, 192, 193, 220, 223, 224, 225, 226,227, 228, 229, 232, 233, 234, 241, 243, 244, 245, 246, 247,249, 250, 251, 252, 253, 254, 255, 258, 259, 260, 261, 262,263, 265, 266, 272, 276, 286, 287, 290, 320, 321, 322: n = A,T,C or G
  misc_feature 330, 331, 336, 338, 339, 340, 357, 358, 359, 360, 361, 362,363, 364, 366, 367, 381, 382, 392, 393, 403, 411, 413, 415,425, 426, 427, 430, 436, 441, 446, 448, 451, 461, 463: n = A,T,C or G
gtgccgggccccccctcgtngagtacttctagaaattaattaaggcggggaataaaaaagtattgaaacaaacgaagataaaagcacaatataccaaaacctgtgggatacagcaaaaacagggctaaggggaattttatagcaataaatgcctacagcaaaaaaaaaaaaaaaaaaaaaaaanggggnnnnnccccttttttttttttttttttttttnggnnnnnnnggnnnttttttncnnnnnannnnnnnccnnnnnntnnaaaaancggntttttttttnnaanggggggggaaaaaaaacccctttttttttnnngggggggnnccccngnnnaaaaaaaaagggggggnnnnnnnnanncccccccccacaannccccgggggnntttttttttngggggggngngnaaaaaacccnnnttnaaaaanttttnttggncnccnaatttttttnanccccccccccccc

SEQ ID NO: 19618 - DNA, 376 bp, Homo sapiens
  misc_feature 357, 358: n = A,T,C or G
agtacttctagaattaattaaggcgggaaaggaagcatggagaaagtgagaaaaataaccaaaataagatgataaaattcaaatgtattggtaaagggactaatgcttaagttaaaagacaaagattgttaaggtaggttaataaccaaaaacatctagctttaagctgttgataagaaatacatcaaaagcctaaggatatagaaagctttccacaagatgattatgtcaggcaaatattaaaatagaaggctggcatagctatattaatatcagataaatagatctgtaaggcagaaaactttgtaaaagccagatgttcatctctgtgtatttctgccccgaagttgcatgacnnaaaaaaaaaaaaaaaaaa

SEQ ID NO: 19619 - DNA, 494 bp, Homo sapiens
  misc_feature 35, 41, 45, 53, 63, 69, 73, 77, 82, 97, 100, 108, 111, 115,116, 118, 122, 124, 131, 143, 145, 147, 149, 153, 177, 179,181, 223, 240, 253, 291: n = A,T,C or G
agtacttctagaattaattaaggcgggagaggaancagganagancatgtggngaggtgccangctctntatnacanccagnttttacaggaactantanagcaaganctngctnncncctntnccctaanaaagggcattancntntncgtnaaggatccactcctgtgacccaancncntgccattcgtcccacctgcaacaatggggatcatgatttcancatgaggattggagganacaaacatccctnctatagggatgtttaggctttctatttcttcctgactnagttttggtaggtggcatgtttctaaaaatttatgcatttcttctagattatcccatttgttggcatataattatacatgatagtcccttataatcttttttatttcagagacattcattttaatacctcttttaaaatttctgactttatttatttgagccttctctctttctttggattgctaagggtttgtcaattttat

SEQ ID NO: 19620 - DNA, 693 bp, Homo sapiens
  misc_feature 419, 422, 431, 459, 475, 481, 489, 497, 501, 510, 526, 531,535, 536, 540, 554, 561, 564, 566, 579, 593, 621, 631, 637,650, 661, 667, 670, 671, 674, 675, 676, 680: n = A,T,C or G
agtacttctagaattaattaaggcgggaggatcgcttgagcccaggagtttgagaccagtcaaggcaacatagtgagagccccatttctacaaaagatagaaaaaattagctaggcaaggtggtgcaagcctgtagtcccagctacttgggagggcacagtgggaggatcacttgagcccaggaagttgaggttgtagtgagctatgatcgtaccactgcactccagcctgggtgacagagcataccctgcctcaaaaaagatagagatagagagatagagaaatagggggagagagagagagaaatagtagcttttgggttactagaaaggattgcccaaaataaaaccttgtgtttaggaggaaaagagttataaggaataaaactaattctttggtcttttttttcccttcctttnttnttccttaangttcccttttttaaggaatggccacaanaatacaacccaccttnaccttnttttttanaaaaaatnaatnacaccattnaaaccacccttccccngattngaannggtnaaaaaaaacttttnttgcccntgnanacaattaaaaaanccttttttttaaantaaataaaaaaatatttggtgccatttntttttctaanggaaantgaaaataccccnaatttatggcngaaaanacnnttnnnttanttttaaaaaaaaa

SEQ ID NO: 19621 - DNA, 388 bp, Homo sapiens
  misc_feature 49, 51, 58, 66, 71, 75, 81, 101, 106, 110, 144, 155, 246,260, 278, 285, 297, 301, 306, 307, 311, 312, 313, 320, 322,338, 339, 344, 346, 349, 351, 356, 362, 363, 364, 367, 369,370, 376, 378: n = A,T,C or G
agtacttctagaattaattaaggcgggggagaagcagccgtgctgccangncacccanacctccanacagncggntagccncactgcccgttccttttacncccangttntgctccttgagagcagattggctgatgcccccgnaaccccagccnaagctctgcctcaaagaccgagtgacataagccattcccaccctcctaggttcacatccagggctgtgtcttccttgggggaggagatggngcccgctagatcanggtatacgcagtcaggcnggggaanaccctgcctttncttncttanngcgnnngaacacnanacccattcactgaccnngggtncntgncntgaanacggcnnnatnanncctttncnattttgggct

SEQ ID NO: 19622 - DNA, 196 bp, Homo sapiens
  misc_feature 53, 56, 60, 67, 79, 88, 89, 93, 102, 117, 122, 134, 174, 183: n = A,T,C or G
tgccgggccccccctcggaagtacttctagaattaattaaggcgggggtgcanaanggcngggtacntctttccatttncccttgcanntacncttactttntccctgactaccaantggantgacgggtgaanaatcaagctcataatatgatacacctcagacagtacccancaaatcttntgatttccccagc

SEQ ID NO: 19623 - DNA, 364 bp, Homo sapiens
  misc_feature 171, 181, 183, 190, 192, 193, 199, 201, 218, 222, 224, 226,228, 233, 237, 240, 243, 246, 250, 252, 254, 256, 263, 265,278, 286, 287, 288, 309, 310, 313, 317, 318, 330, 331, 335,341, 344, 345, 346, 347: n = A,T,C or G
agtacttctagaattaattaaggcgggcgcctgtagtcccagctacttgggaggctgaggcaggagaatggcgtgaacccgggaggcggagcttgcagtgagccgaggtcccgccactgcactccagcctgggcgacagagcgagactccgtctcaaaaaaaaaaaaaaanttacccgggngngggggtntnntaaaantncaaaatttacccgggcnttgnantntnacctnctcnggnggntgnggcngnananttgtttnanccccaaaaccggnggttgcannnacccaaaattttgcccttgcnntcnaccnngggcaaaaaagnnaaantttttnttnnnnaaaaaaaaaaaaaaaaa

SEQ ID NO: 19624 - DNA, 211 bp, Homo sapiens
  misc_feature 34: n = A,T,C or G
cgtttcgttccgcctgggcgggattctgacttanaggcgttcagtcataatcccacagatggtagcttcgccccattggctcactcacccaccacattaacaacataaaaccctcattcacacgagaaaacaccctcatgttcatacacctatcccccattctcctcctatccctcaaccccgacatcattaccgggttttcctcttaaaa

SEQ ID NO: 19625 - DNA, 126 bp, Homo sapiens
agtacttctagaattaattaaggcggggtaacttacatgatgattatgctttctcttcttttttgtattcttaattggcacttttgtgtgatccttgaagctccaggacgggtccttttaaacagt

SEQ ID NO: 19626 - DNA, 844 bp, Homo sapiens
  misc_feature 54, 59, 67, 70, 71, 72, 77, 83, 96, 110, 158, 220, 222, 225,231, 264, 276, 296, 305, 308, 310, 311, 313, 315, 327, 340,341, 343, 344, 347, 348, 350, 355, 361, 364, 367, 368, 376,379, 392, 395, 396, 418, 425, 431, 437, 439, 447: n = A,T,C or G
  misc_feature 449, 459, 460, 462, 463, 466, 475, 478, 483, 484, 497, 507,509, 510, 511, 520, 523, 533, 535, 537, 539, 542, 546, 553,569, 577, 581, 584, 592, 601, 604, 619, 629, 651, 653, 666,669, 682, 684, 686, 688, 690, 691, 697, 699, 702, 703: n = A,T,C or G
  misc_feature 710, 720, 724, 726, 727, 739, 744, 745, 752, 759, 764, 765,773, 775, 791, 805, 806, 812, 816, 817, 818, 820: n = A,T,C or G
agtacttctagaattaattaaggcggggaagggtgcatagctgttttagctganggacntggtgccnacnnncccanacctanctaggctaagtcnagatcaacattccngggttggtaatgttggatgatgaaacattcatttttaccttgtggatnctagtgctgtagagttcactgttgtacacagtctgttttctatttgttaagaaaaaactacngnatnattgcntaattcttgatggtaataaatttgaataatcanatttcttacatnctttaaaaaaaaaaaaaggntcaacaatnccngnncncncccccggggggngcgcccacccccnntnntgnngnttgcnattacnccnccnnctgggggnctnattttttaaattntannatactttccccattttttctangaaccangcgganctgccnanttcttggncntttgacaatnngnnttnatacttccngantgaannccccctttctttnattaattacntnnncaaagaaangtnttgccctcantnancnggncccnacatttngggcttttaaaaaacnggattccnattnccngggaacgntttttaaanccnaaacccactttttanccggttacancgaccgggggggttttaactancngggtcaaaatggnttnttgaaaatttttntngngngnnaaaacncnaannttttttngcccaatcgncccntnnaaatttaaattnccccnnaaaaaanttttttnaaatnnggggcccngnttttttaccacttttnaaaccccccttttnncccctntttnnngntaaaaaaaaaaaaaaaaaaaaaaa

SEQ ID NO: 19627 - DNA, 339 bp, Homo sapiens
gggtaccgggccccccctcgagagtacttctagaattaattaaggcgggagaataagcagcagaataacatctctacagacaataaaagcacactagaaagacacacctacagatcaaaaccttaactgtttcaaaatgtgataaaagacattaagaaaatgataacagatatgaaactacataaatcagaagtagaaaaattcagaaatgaagtgacagaactcagaaatgtattagaaatgaaaggaaaaatcatttcagaatgaagattaaaggataataagcaaaacagataatgccataagacaaatagaaggcaaaaaaaaaaaaaaaaaaaa

SEQ ID NO: 19628 - DNA, 357 bp, Homo sapiens
agtacttctagaattaattaagccccttttctttataaattactcagtcttgcatagttctttatagtagtgtgaaatggactaatacatacatttatcttttaaaatagtgcaacagacctttctggaatccttaagccattactcttccatttacacagaaacaaagcaatggttaagagaagtagaagtgagagatatcacatctgagtaaaataaaataaggaaacaaaagaagaattgagaagtcaaagaaaataaaaactaatctatattttttatagaaagaataaattaacctagtaattttataatgaattacctatataatatgttgttcatgctatatattcatct

SEQ ID NO: 19629 - DNA, 326 bp, Homo sapiens
  misc_feature 248, 249, 272, 281: n = A,T,C or G
agtacttctagaattaattaaggcgggtgtggtggagaacgcctgtaatccccgctacttgggagactgaggagggaggatcaattaggcccaggagttggagatcagcctgagcaacatggtgaaaccccatgcctacaaaaaaaatttaaaaagaatcaccctttgttgacttcatcccctggttgtcttctgctacggcccttactagcatttgaaattatttcacgtttttacttgataatcgnntctctccactcttcactcaccanccccaccanacacacacacacacacacacacacacacacacacacacacactta

SEQ ID NO: 19630 - DNA, 833 bp, Homo sapiens
  misc_feature 18, 19, 556, 593, 602, 613, 616, 621, 628, 629, 661, 688,704, 722, 730, 749, 782, 783, 785: n = A,T,C or G
agtacttctagaaggaannaaggcggggtagctgagcaatgcttgtgaatcttttcttaagaaatcccaaaaagccaatattagttaaaattctgttgtttaatttggttatcttgctttataaattatgcctctaaacaatcaaatctatttttgaaatagactgaatgatgtcaagaaatatacctactgctatccgtatgtggtggattagaaatgtgttaaatctgcaaaaggtataaagatgtcagtttaatttctttgataatttaacctatgttgtatgtgaattatttattataaacttagcacgattctgtgactgtttttctctgtttcaccgttcgttgagtgtaagcaatgaaaatgtcccaaataagttttttaagttttactttaataagattaatttcagtaaacattctagttgttcagtgtaacctttttatcttgatgcattgtaagtaaaatgaatcatttactcttgaaatgccagtccattgacctgatgtagataatttagggattttcatataaaaatagctgtttagggaanggggaaatccatttcccctgtctctggttgggggggnacatctttngttgaattcanatntttanaaaggtnnttttcttttttggggggtaaatataaccttanaaaattaaaatcccctgttttcttctnatgttagtcctggccngttttaaatttttaaatnttttaccnttattaatccttgggaatnaagtttttagtttaatggttccccaaaaatctnntnttaaaataaatggttttccaaatgcctaaaaaaaaaaaaaaaaaaaaa

SEQ ID NO: 19631 - DNA, 418 bp, Homo sapiens
  misc_feature 25, 66, 68, 171, 185, 187, 193, 197, 202, 203, 212, 218,222, 226, 227, 228, 230, 231, 233, 236, 238, 246, 247, 254,257, 260, 269, 272, 275, 279, 285, 288, 309, 316, 319, 333,356, 368, 382, 383, 384, 385, 386, 387, 388, 389, 390: n = A,T,C or G
  misc_feature 391, 392, 393, 394, 395, 396, 397, 398, 399, 400, 401, 402,403: n = A,T,C or G
cgcggcgtcttttcaactcctgcantcaagggtaacaacaggctgggctaccgggccccccctcgngnagtacttctagaattaattaaggcgggtggatcacgatgtccagagatagagcccatcctggctaaaacagtgagacccccgtctttacaaaaaaaaaaaaantttttttttttttntntaaatnaccnggacnnggggggggncccctntttncccnnntnntnggnancctggggnnggaaaanggnttnaccccgggnggntgnggcnggaaanttntttatttccaaaaggtaaatnttgcagnganctgaaattgggccnttgccctccaccctaggcagcangagtgaaactcntcttaaaaaaaaannnnnnnnnnnnnnnnnnnnnnggggcccccccccgg

SEQ ID NO: 19632 - DNA, 433 bp, Homo sapiens
  misc_feature 29, 30, 33, 34, 35, 36, 38, 41, 48, 50, 51, 55, 56, 60, 64,65, 72, 89, 90, 93, 95, 99, 100, 104, 110, 111, 113, 117,118, 119, 120, 124, 125, 126, 129, 132, 133, 137, 142, 143,155, 159, 164, 166, 167, 170, 171, 172, 174, 179, 184: n = A,T,C or G
  misc_feature 186, 188, 192, 231, 249, 251, 252, 253, 263, 264, 265, 270,274, 279, 283, 287, 288, 289, 335, 419, 420, 421, 422, 433: n = A,T,C or G
agtacttctagaattaattaaggcggganntannnntnatnacagcananntggnngagntagnnacacaantagaccttcacaaagtnnatnantctnngggntggttnntngaannnnatcnnnacnatnnatangatannccggtcgcgggnctantagcnannaannnanaatantctgntnantgcngtaaaaaatgatccaggggatatcgccgggggtcccacntgaagtacaaactgccgncnnngaatgctatnnncaccnctangcaantctncttnnnaatctagaagaattggataaattcctggacacatacaccctcccangactaaaccaggaagaagttgaatccctgaatagaccaataacaggctctgaaattgaggcaataattaatagcctaccaaccnnnnaaaaaaaaaan

SEQ ID NO: 19633 - DNA, 355 bp, Homo sapiens
  misc_feature 5: n = A,T,C or G
ctganacaagcggtatggaaacagtgatggctcgctgccaggcactaactgaccccccatttcacggccataactacagcgtcactttccataacttcctcctgataagacaccactggccacggactggttctgctggtctatggaggatgtgactggagtgactcccgggccgcgcctcacctttggccatatagggcctaattgtcttacatgtaaatgtgaaatctcacctctcagtgaacatgggtcctgcgttacatgcatgtttatctagtacacatgcattaagacaggagagaggagcgcttgagcccaggagttcaagaccagcctgcgaaacacagcaagacac

SEQ ID NO: 19634 - DNA, 465 bp, Homo sapiens
  misc_feature 3, 32, 40, 45, 46, 56, 57, 62, 66, 69, 71, 73, 74, 75, 237,239, 261, 264, 268, 271, 278, 284, 307, 336, 338, 347, 362,364, 379, 407, 411, 434, 462: n = A,T,C or G
ttntggccgtcgttttacacacaggaaacagntatgaccntgatnnctggccgtcnntttcnacanagnantnnnagaattacattaaggcgggcacctgccgttccagctactcaggaggctgaggcaggagaatggcatgaacccaggaggcagagcttgcagtgagctgagatcgcaccactgcactccagcctgggcgacagtgtgagactccatctcaaaaaaaaaaaattntnttttggtcaaaaccataaatgnggngaanccncctgatnccttgngaatgttataatttgtcaaaaanatggtagtttaaaaatcctaagggccaancncaatggctntgcctgtaatcccancnctttcggaggtcaanatgggaggactacttgagcctaaaagtntganatcagcctggccaacacaggganacccccatcttttcaaaaaataaaaaantaa

SEQ ID NO: 19635 - DNA, 276 bp, Homo sapiens
  misc_feature 166, 187, 188, 191, 192, 200, 207, 208, 213, 216, 223, 224,226, 234, 236, 238, 247, 254, 260, 261, 275, 276: n = A,T,C or G
agtacttctagaattaattaaggcgggtaagatagtccgctcagaacccaccccgggccaggcacagtaatcccagttctttgggaggtcaaggccaaggatcattgagcctaagagtttgagatcagcctaggcaacgtagtgagaccctgtctctactaaaaanaaaaaaaaaaaaaaaaaaaannggnncccccccnggggggnnccccnacnccccctnnangggggttntntnccccccccnggggggnggtttnnaaaaaaaagactann

SEQ ID NO: 19636 - DNA, 335 bp, Homo sapiens
  misc_feature 5, 6, 7, 44, 45, 52, 53, 61, 65, 98, 99, 105, 117, 131, 140,141, 146, 149, 150, 151, 154, 170, 176, 181, 184, 191, 195,201, 202, 203, 221, 225, 228, 235, 236, 237, 245, 250, 252,255, 256, 261, 267, 272, 274, 276, 278, 288, 293: n = A,T,C or G
  misc_feature 305, 313: n = A,T,C or G
ctcgnnnagtacttctagaaattaattaaggcggggaaacactnnctcttgnntcctaacngaanggtggtcgccctccagcataccataccttgtanngggatngctctaatcagnaactaccgcccctngccctttcnncattnaannntcngcattctatgctcaanggctanctctnatncagctanatgntcctcnnnactactaaacctcctgcnacantgncattatnnngtaacttntggananaannatttnctggtnattcntnantntaccatcccnactgnctaccttgttangcctcagntttagccacagcaagaaggaaa

SEQ ID NO: 19637 - DNA, 545 bp, Homo sapiens
  misc_feature 28, 30, 46, 56, 59, 64, 66, 68, 69, 76, 78, 81, 84, 100,102, 143, 160, 168, 174, 205, 274, 292, 294, 296, 297, 298,301, 302, 303, 306, 309, 310, 350, 365, 460, 512, 517: n = A,T,C or G
agtacttctagaattaattaaggcgggnangggccatctccattgngatgattaantgnaccanantnnttctcananttntanacacaaggagggaatnanactgaggaagctgtgacataggacttgaagaccaaagactntgaaatttgcgagctgntcatgtgngaactnttatcactgctgtctttctattgagttaccnaatctagtatttttattgaagttgttatagaaaaactgaacagcaccatcaaacaaaatgtgtctaaantgaaatcttgaaaacttngncnnnccnnnganggnngaataacattcttctcaagctcatatggaacattcacccncacaggaccacattntgggccataaaacacaccttgatttgtgctgtcagaccacagtggaattaaggtagaaatcagtaacacaaaaatagctgtaaaattcccaactntttggaggttaaaccaccacatttattaagaactcatgggacaaagaagtcntcaanataaaaattttttttttaacttccaatg

SEQ ID NO: 19638 - DNA, 375 bp, Homo sapiens
  misc_feature 54, 151, 215, 216, 217, 218, 228, 229, 234, 235, 239, 240,241, 242, 244, 249, 250, 251, 252, 253, 255, 256, 257, 261,264, 266, 274, 275, 276, 281, 289, 292, 294, 297, 306, 321,335: n = A,T,C or G
agtacttctagaattaattaaggcgggcatggtggtggacacctgtaatcccanctactagggaggctgaggcaggagaattgcttgaacctgggaggcggaggttgcagtgagccactgcactccagcctgatgacagagcaagactcantctcaaaaataaataaaaataataaaacctccataaaaaaaaaaaaaaaaaaaaaaaaaaaagnnnncccccccccnnggggnncccnnnntnccccnnnnngnnngtanttntncccccccnnntgggncttttttnaananaanggccttatnttacctatcgcaaangggctcttttgttnaattttttttaatctaaaatgattgggcctctgaaaaaaa

SEQ ID NO: 19639 - DNA, 115 bp, Homo sapiens
  misc_feature 18: n = A,T,C or G
ccgggccccccctcgtanatacttctagaaattaattaaggcgggggccgggcttggtaacgatgtacgataccctcatagtgaccattaaacctgatcctccaccgcgaaaaaa

SEQ ID NO: 19640 - DNA, 336 bp, Homo sapiens
  misc_feature 29, 30, 31, 71, 77, 223, 312, 319, 322, 324, 325, 326, 329,336: n = A,T,C or G
agtacttctagaattaattaaggcggggnnnggtgactcatgtctgtagtcccagcactttgggattacanatgctngctcacaagtttactattaaagaaacatcaccctaggtgtatttttcatgtaaactggctttttcatataaaggacaaacatttttagtaaataatttaaaaacactaataaggctgggaatggtgactcatgtctgtagtcccancactttgggaggccaaggtgggaggactgcttgaggttagcagtttgagaccagcctggccaaaacagtgagactctcatctcaaaatnaaaaaantgntnnnggncgaaaan

SEQ ID NO: 19641 - DNA, 323 bp, Homo sapiens
  misc_feature 22, 23, 52, 70, 73, 75, 82, 83, 85, 94, 96, 98, 103, 104,106, 109, 111, 114, 115, 122, 123, 128, 136, 250: n = A,T,C or G
gggtgccgggccccccctcgtnnagtacttctagaaattaattaaggcgggntgggaccaactagtgctntgngngaaatgnncnaaaagggantntnaatanncnaancnctnntagaccnnttcangatgtaanacaagtgatgctttcagttgtaacacgtgacttggtgctgtccctgctggtctaagtagaactgtagattcatatgggctggtgttcctgtgcgctgtgggtgtggtgattcancctggcatttctaccataagtttttggtctgctgatttgctgccctgtcttctcttactttactttatcaata

SEQ ID NO: 19642 - DNA, 315 bp, Homo sapiens
  misc_feature 32, 55, 73, 100, 166, 167, 168, 172, 180, 190, 209, 212,222, 234, 237, 239, 241, 242, 247, 250, 252, 258, 266, 312: n = A,T,C or G
acttttaggaattaattaagggggggaacctntgatcccagctactagggtaggntgagccaggaaaattgcntgaacccgacaggtggaggttgcagtnagcccaaattgcgccactgcactccagcctgggcaacaagacaaagattgtcccaaatggaaactnnnaaantaaaaatntttgcggctnctgcccaggactgagctcnccnggtccctctnccacacttccantanancnnccctntgngncctgcntttagaanctctcgcaaatgaagctgcaggccgaaaaaaaaaaaaaaaaaaaanaaa

SEQ ID NO: 19643 - DNA, 405 bp, Homo sapiens
  misc_feature 20, 21, 109, 264, 266, 277, 282, 285, 287, 291, 296, 298,302, 309, 313, 318, 321, 331, 333, 336, 355, 357, 365, 375,382, 387, 390, 395, 405: n = A,T,C or G
agaattaattaaggcgggcnngatcacgagatcaagagatcaagaccatcctggccaacatggtgaaaccccatctctattaaaaatacaaagattagatgggcatggnggtgtgcacctgtagtcccagctacttgggagtctgaggcaggagaatcacttgaactcgggaggcagaggttgcagtgagcgagatcgcgccactgcactccagcctggcgacagagtgagactccatcttaaaaaaaaaaaaatccaaatggncnttttatagttnagtcnaancntttnttacncntttnaaaaaanaaanaaacnctntcctactttngnccncctgtaaaactcatttcantncctatttnattttctccnagttttncccanggncttantttaaaaatn

SEQ ID NO: 19644 - DNA, 415 bp, Homo sapiens
agtacttctagaattaattaaggcggggtttcaccatgttggccaggctggtctcaaactcctgacctcaagtgatccaccagcctcggcctcccaaagtgctgggattacaggtgtgtgccaccacgcctggctaatttttgtatttttcagtagagatgaggtttcaccatattggtcagtctcgtctccaactcctgacctcaggtgatccacccacctcagcctcccaaaatgctgggattacaggcgtgagccactgcgcctggcccataagttttaaaatgtgtatccatgctgtagacgctccctgcctgttagtcacctagtagctgtcttggtgatcacagcaactgtctcgtatcaaactgcttgtgttcaagtaaccttgaacttgacttcgtaatggcctcaa

SEQ ID NO: 19645 - DNA, 215 bp, Homo sapiens
  misc_feature 68, 96, 119, 124, 128, 194, 195, 196: n = A,T,C or G
agtacttctagaattaattaagatcaaagtatatatatatatatatatatgtgctgtatttgcaactntcgcattgtaatttcctatacacttatnaaagtattgttttgccatgtggnttatnaaanaaaaatgtacagtctcttaaaaaaaaaaaaaaaaaaaaaaaaaaaaaaaaaaaaaaaaaaaaaaannnaaaaaaaaaaaaaaaaaaa

SEQ ID NO: 19646 - DNA, 922 bp, Homo sapiens
  misc_feature 123, 124, 126, 151, 152, 153, 154, 155, 156, 157, 158, 159,160, 161, 162, 163, 164, 165, 166, 167, 168, 169, 170, 171,172, 173, 174, 175, 176, 177, 178, 179, 180, 181, 182, 183,184, 185, 186, 187, 188, 189, 190, 191, 192, 193, 194: n = A,T,C or G
  misc_feature 195, 196, 197, 198, 199, 200, 201, 202, 203, 204, 205, 206,207, 208, 209, 210, 211, 212, 213, 214, 215, 216, 217, 218,219, 220, 221, 222, 223, 224, 225, 226, 227, 228, 229, 230,231, 232, 233, 234, 235, 236, 237, 238, 239, 240, 241: n = A,T,C or G
  misc_feature 242, 243, 244, 245, 246, 247, 248, 249, 250, 251, 252, 253,254, 255, 256, 257, 258, 259, 260, 261, 262, 263, 264, 265,266, 267, 268, 269, 270, 271, 272, 273, 274, 275, 276, 277,278, 279, 280, 281, 282, 283, 284, 285, 286, 287, 288: n = A,T,C or G
  misc_feature 289, 290, 291, 292, 293, 301, 302, 308, 313, 327, 332, 339,349, 351, 353, 375, 377, 381, 388, 405, 408, 414, 415, 416,425, 434, 435, 440, 446, 448, 464, 472, 474, 481, 482, 493,499, 510, 515, 526, 527, 528, 534, 535, 537, 545, 565: n = A,T,C or G
  misc_feature 566, 568, 571, 574, 591, 594, 596, 608, 609, 611, 613, 617,620, 622, 624, 627, 632, 645, 651, 652, 657, 660, 661, 670,674, 693, 694, 700, 701, 706, 709, 710, 711, 712, 713, 722,723, 724, 725, 728, 731, 732, 733, 741, 744, 749, 750: n = A,T,C or G
  misc_feature 756, 758, 761, 784, 785, 787, 790, 791, 795, 803, 807, 810,812, 814, 815, 818, 826, 828, 829, 833, 836, 839, 845, 846,850, 854, 855, 858, 869, 870, 871, 873, 874, 875, 884, 885,890, 891, 892, 897, 898, 910: n = A,T,C or G
agtacttctagaattaattaaggcgggggtggagcttgccgtgagccaagatcgggcaactgcactccagcatgggcgacagagcaagactccgtctcaaaaataaataaataaatcaaaccnnanaaaaaaaaaaaaaaaaaaaaaaaannnnnnnnnnnnnnnnnnnnnnnnnnnnnnnnnnnnnnnnnnnnnnnnnnnnnnnnnnnnnnnnnnnnnnnnnnnnnnnnnnnnnnnnnnnnnnnnnnnnnnnnnnnnnnnnnnnnnnnnnnnnnnnnnnnnnnnnnnnnnnntcgccagnnggcgtnaatancaaaaaggccccgnccccnatcgccnttttccaaanananttttgcccaaccctgaatgggncnaaangggaaanttttgaaaccctttaanatntttttnnntaaaaaaanttccccggnnaaaantttttntngaaaaaaccccctttntttttttnanccccaannggggccaaaantttggnaaaaaaacccnttttnttatttaaaannnaaaaannancccccccngagggggggggggggggggnngnttnccncccggggaaaaaaaacnaantntttttttttatnnangngggngcncngnccntcccngggggggggaaanggggcnnaaaanaannccggttttntggnggggccaaatgggccccanntacctnnaaacnatnnnnntttttattnnnngtnttnnngggggggnacncggcnncccatnanaanccccttaaaatggggaacccccnnanggnnatancctttttntttngangntnngcnggggaaananncccntcntanacttgnngggnaagnnaanggtaaaaaaannntnnnggggggccnngcccnnnggccnntttaaaagtgtncccccccccccc

SEQ ID NO: 19647 - DNA, 402 bp, Homo sapiens
agtacttctagaattaattaagggggagcgagacccttgcactgccatttgagcccttgtgatctcatcttgtagaacatgttgtacaatcattttattggtatcattagtgttatttggggctggaataaaaatctcagtgcaccaaagagatttcccctttatccacgttaccctggttttcctttgttttatgtttaacctaaacgggcttaatataaaatagtgcttatttggtgttttaattgtctgcttctataacataagctgcactgtccattggggaactgctcaccatattgcccaacctgtcttgataggtttatacatgggaggcattcaagtaatattaattacctctctagaccagtgttagcaataacaaacacttgctagaatttt

SEQ ID NO: 19648 - DNA, 826 bp, Homo sapiens
  misc_feature 32, 96, 111, 132, 157, 165, 231, 252, 291, 302, 306, 322,348, 405, 421, 429, 440, 444, 452, 453, 473, 486, 490, 511,515, 518, 527, 539, 543, 561, 562, 575, 594, 595, 596, 604,607, 627, 630, 640, 645, 653, 654, 655, 659, 660, 679: n = A,T,C or G
  misc_feature 680, 683, 685, 703, 706, 709, 712, 718, 723, 726, 730, 734,742, 752, 761, 770, 772, 774, 789, 791, 792, 793, 795, 805,807, 812: n = A,T,C or G
tacttatagaattaattaaggcgggaggcganggaggagcacagcatgtcttacatggcaacaggcaagaagcttgtgcaggggaactcccctttntaaaaccatcagatnttgtgagacttattcactatnacgggaacagcacaggaaaaactcntccccacnattcaattgcctaccaccgggtccctcccatgacacatggggatcattaaaattcaaggtgagatntgggtggaaaacacagagccnaaccatatcaccaatatatccaaaacattatcatctcancatttaatcantgtnaacattattagtgagnttatttaaccttttttttgtactcancttcaaagtgcttgtaaaatgttataattattagcacatttttattttttggactancccacattttaaagtngtttcaangaagccaccantatngaacttannggggctacctgttattgggnacaagtggccaanctcnttggggaaggttaaattcacnatanaanggaaccttnacctccccgatnattnttggttaagacttggtanntcaagataccaantgttttaggggggttccannntcccttgntgnctcccaaaaaccaccccaanggnagggggaaanaattngggccccnnnaggnnaaaaattgggcccattttnnggncntaaaaaagaattttttgnatnggnttnacaganccctnggngaangggnaataaacnaaaatcagtngaccttttntcctaaaangntngggcccttaaagggncnnnanaccttcctantngaatngccctttttggggg

SEQ ID NO: 19649 - DNA, 351 bp, Homo sapiens
  misc_feature 1, 210, 212, 227, 231, 233, 237, 244, 246, 249, 250, 251,254, 258, 259, 267, 268, 269, 271, 278, 283, 285, 288, 289,290, 297, 302, 303, 304, 306, 308, 311, 312, 320, 323, 325,337: n = A,T,C or G
nccgggccccccctcgagagtacttctagaattaattaagcggggcatggttggtggcaggcacctgtagtcccagctacacgggaggcttaggcaggagaattccttgaacccaggaggtggaggttgcagtgagccgagatggcaccactgcactccagcctgggcaacagagcaagactctgtctcaaaaaaaaaaaaaaaaaaacngnccccccccggggggnaccncnattnccccttntnggnnntcntttnncccccccnnntngcccgtnttttnanaannnccaaaanttccnnntnanaannattttctnttnanaataaacctttnaaaaaaaaaaaaaa

SEQ ID NO: 19650 - DNA, 333 bp, Homo sapiens
  misc_feature 77, 83, 95, 98, 105, 197, 198, 201, 202, 209, 219, 224, 239,241, 242, 247, 250, 259, 260, 268, 269, 271, 280, 281, 282,283, 287, 288, 293, 294, 297, 299, 300, 301, 302, 311, 313,318, 319, 321, 322: n = A,T,C or G
agtacttctagaattaattaaggcagggggagaggcccccatcagggaccagactgttccaaaaaaaaaacaaaaancaaaancaaacaaaaaancanttaaaancccaaaaaaaaaaaaaaaaaaaaaaaaaaaaaaaaaaaaaaaaaaaaaaaaaaaaaaaaaaaaaaaaaaaaaaaaaaaaaaaaaaaaaaacnnaannaaggaanaaaaaaattnatatnaaaaaaaaaaaaaanannacgtnccncctcccccnnggaacctnntnttttatttnnnnaaannttgtnnttnannnnccccccctncncattnntnnattaaaaaaaa

SEQ ID NO: 19651 - DNA, 268 bp, Homo sapiens
  misc_feature 20, 176, 177, 178, 179, 206, 207, 208, 209, 210, 211, 212,213, 220, 223, 224, 225, 226, 228, 229, 230, 231, 232, 233,234, 235, 236, 256, 263, 265: n = A,T,C or G
accgggccccccctcgtaangtacttctagaaattaattaaggcggggggaggtccaagcagagtgttttattattatcgctttatgtttttggttattggtttttttgtatagaccaaagcaaagaaaataaaaataacacagatgaaaaaaaaaaaaaaaaaaaaaaaaaaaannnnaaaaaaaaaaaaaaaaaaaaaaaaaannnnnnnnaaaaaanaannnnannnnnnnnnaaaaaacccccccccccccnggggggncnccc

SEQ ID NO: 19652 - DNA, 156 bp, Homo sapiens
  misc_feature 16, 18, 24, 38, 139: n = A,T,C or G
cggcccccccttcganantacttntaaaattaattaangcgggggcggaccttgtgaggctcaattgacccgttacttgcaacctgaaaacaaatcatgttttttgacttaaaaaaaaaaaaaaaaaaaaaaaaaaatntaaaaaaaaaaaaaaaa

SEQ ID NO: 19653 - DNA, 450 bp, Homo sapiens
agtacttctagaattaattaaggcagggggtaactttactgatttgggggtggtttttagtttaatttttcttttctagcttcccatcgacggtcagtgcgcacgttgtaatcagctgaggccatgtcaggagacggagccacggagcaggcagctgagtatgtcccagagaaggtgaagaaagcggaaaagaaattagaagagaatccatatgaccttgatgcttggagcattctcattcgagaggcacaggtttagtgatataggattacatttccttctctatgggtccaatcacactacttggttctgcagtgaataatattttcataatcctaacattgtaaatgctgtttattggttttcaattttagaatcaacctatagacaaagcacggaagacttatgaacgccttgttgcccagttccccagttctggcagattctgga

SEQ ID NO: 19654 - DNA, 305 bp, Homo sapiens
  misc_feature 35, 36, 38, 40, 41, 42, 47, 48, 49, 52, 58, 61, 69, 77, 94,107, 113, 116, 117, 121, 128, 130, 166, 168, 171, 231, 239,240, 243: n = A,T,C or G
aagtacttctagaattaattaaggcgggataaganncncnnntgttnnnganaagccnacngcatccgnacacacgntcttggcatacagatcnatatacacggcanaattancannaacntctgctnanggcttccactgtggactgattcagtgtaaataaaantnccnccacagctagggagttcctgtcagttctgttggaagcagcccactccctcacttttactncttccttnnaancctaaatcagagctacttacagccaggcaggatggggctttccccaaagcaattggccgttt

SEQ ID NO: 19655 - DNA, 351 bp, Homo sapiens
  misc_feature 9: n = A,T,C or G
acttctagnaattaattaaggcgggagtcacatgattaataaatcatttaattagaaagacattagttattccattccattagagtcctgatgtttaatttactacaattaaatggtcagtttattaaatttcataggatttaagattgcatccaagcctataggactccaagttattcagtggctgtaagtatagcacccaaatccacttagctgtgactgtgggcaatcacctttctgagggctttacatatatacatttaatcatcacacatctgcgatgattaaattataatggctaaattataatattcacattttacaaaaaaaaaaaaaaaaaaaaaaaaaaaa

SEQ ID NO: 19656 - DNA, 206 bp, Homo sapiens
agtacttctagaattaattaaggcgggaaatggatgtagcagtgatcactataaaactggtcactgagcttggaagagaatgaaataacctagaatgaggatggaatgacaaatagactaataacagaaccctgaagaacactaacagtttaagattagacaaagaaccattaagccaaaaaaaaaaaaaaaaaaaaaaaaaaaaa

SEQ ID NO: 19657 - DNA, 311 bp, Homo sapiens
  misc_feature 5, 35, 234, 311: n = A,T,C or G
caaangctgggttccgggccccctctcgagagttnttctagaattaattaaggcgggcggatcacgaggtcaggagatcgagaccatcctggctaacatggtgaaacgccgtttctactgaaaaaaataacaaaaaaaattacctgggcgtggtggcgggtgcctgtagtcccagctactccggaggtgacagagcgagactccatctcaaaaaacaaacaaacaaaaactcanaggcatttattgagcaccttctataataagacagctattatttattgagcagtggcgtctcttttctttcttgttan

SEQ ID NO: 19658 - DNA, 461 bp, Homo sapiens
  misc_feature 6, 16, 18, 22, 29: n = A,T,C or G
cccggnccccccctcnanagtncttctanaattaattaaggcggggtaagatttgccgagttccttttactttttttaacctttccttatgagcatgcctgtgttgggttgacagtgagggtaataatgacttgttggttaaaggggacttcagctttttatataaacatccacttctctttcaaaagacttcaagtaaatataagaagatactgattgattctggattgtggtatagggatatcttgtcttattttttgtacttttctgtatttttaaaatttctcaaaataggaatgggagtgaggatgggaatgctgtatctgtggaagtcatgttatactggattcatttccaattaaatactaaacattttatagaaaatatttctaaaattttatcacggatgaatggatggacttgctctctatgtaatatgaaattaatctattttattaaaa

SEQ ID NO: 19659 - DNA, 571 bp, Homo sapiens
  misc_feature 176, 214, 233, 335, 361, 363, 366, 367, 368, 369, 374, 376,381, 384, 385, 386, 388, 389, 394, 398, 400, 401, 406, 413,424, 435, 451, 452, 516, 520, 522, 523, 526, 544, 552, 553,563: n = A,T,C or G
agtacttctagaattaattaaggcggggtaagatttgccgagttccttttacttttttttaacctgaccttttgacaggtgtgcactgttttgtctccagtgagcacataccatgcggattttatatgtacatcagtagtgtgaatccactggcacagtgttgtgtaaattgccanatgtggtgagattttatcttataaatgtgatcagatanaaaataacctcctgacagnaaactggtaagggaaaacccagccttgaaatgttttgaccctgatggacctggatgtttgtaatgggttttaatgttaaaatgtatatttcttttaaatcanatggaattaaaaggcaggtaaaatantnaannnnataanancattntannncnnttganaaananngccgngcccggncccaccccgcngggttgggaanccttcccaaattttcnncccccttaataaaggtggaaggttccgtaaattttaacggccgccggccttcaaccttggggcnccgntnncgntttttttaacaaaaccgnttccgttnnaccttggggngaaaaaaa

SEQ ID NO: 19660 - DNA, 221 bp, Homo sapiens
agtacttctagaattaattaaggcggggcccaagatcacatgattactacttacagatgtcctttattcaatgtaagctcacgttttcttgattttagcaatacttgtaataatttttaaaatataaatatatatgaaataaaagttcatcattgattgactaaaaaaaaaaaaaaaaaaaaaaaaaaaaaaaaaaaaaaaaaaaaaaaaaaaaaaaaaaa

SEQ ID NO: 19661 - DNA, 617 bp, Homo sapiens
  misc_feature 65, 93, 96, 105, 142, 149, 150, 153, 180, 183, 184, 185,186, 194, 202, 206, 208, 209, 210, 213, 220, 231, 242, 243,247, 249, 252, 260, 261, 262, 267, 268, 278, 282, 283, 289,319, 375, 394, 414, 418, 482, 541, 547, 568, 579, 590: n = A,T,C or G
  misc_feature 594, 598: n = A,T,C or G
gggccccccctcgagagtacttctagaattaattaaggcgggggaggtgtattgaagtcctccanacaaccctcaaatttgatgatttcctantanaactcacanaaataaagagctgttatactgtgaaaaaaaaaaaaanaaaaaannaanaaaaaaaaaaaaaaaaaaaaaaaaaanggnnnncccccccngggggggnaccntnnntcnctttttnggggaggtttnttccccccccnnctgngnctntttttatnnnttctnnaccctgtccnttcnnttgcgnagccgaatctccatctgctccttagccttntggaagctgagcatgctcattatcattctgcagaggtctcgaaatacacatcaacntcattggttggcagagganttggaggaactttgacatcntgantaatttccttgtctgacatgggtgccgtcgctgccgggttcagtaggattctcctcattgtaantcatctcctttgaaggtgtcatagtagtaatctcggtcctccaccacttcctccccttnttcctnatcctcatcatcctcaatccncaggctgcttntgtggaaagtntttnccanatctggctttcaagtaggg

SEQ ID NO: 19662 - DNA, 329 bp, Homo sapiens
  misc_feature 299, 310, 313, 314, 319: n = A,T,C or G
agtacttctagaattaattaaggcagggaaataaaaaaagaatacaagaaagaggacaccatgggttgtaaaagaagggaaagatgtgaaaatttcagaaaataaaagtatgttttataaaattaatgcctctcctttgaagaaataaaaccaggtattgttgacaggattgccactagtgattgaaactggttaggaagacctttcactttgcattttatactcttctgtattattgtattatctgcatttatttttgttttgaatacagattacttgcagtcttctttttttttttnggggcaaaatntcnntttgncaaaaaaaaa

SEQ ID NO: 19663 - DNA, 252 bp, Homo sapiens
  misc_feature 28, 30, 38, 41, 44, 45, 48, 54, 55, 59, 62, 67, 68, 69, 79,81, 85, 86, 104, 113, 114, 115, 126, 144, 148, 154, 170,194, 197, 219: n = A,T,C or G
agtacttctagaattaattaaggcgggntntttagagnctnaannctnaatgcnngctnaanttaannncccagctacntnttannccactattctctgaatgnttgcataannntaagcaccttnccactaagagtacataanctanaaatcntataagaaagctgggngccttgaaaatgtcagatgtgatntcnatgatgtagataaatatatatngtggcctttcaggactgtcacagtaacacttta

SEQ ID NO: 19664 - DNA, 537 bp, Homo sapiens
  misc_feature 22, 25, 31, 33, 36, 38, 41, 53, 55, 60, 78, 84, 90, 92, 95,99, 106, 107, 109, 111, 112, 114, 119, 121, 125, 127, 136,142, 151, 152, 153, 168, 170, 171, 177, 178, 183, 184, 189,192, 194, 195, 196, 197, 202, 206, 221, 223, 226, 227: n = A,T,C or G
  misc_feature 239, 246, 248, 254, 255, 257, 483: n = A,T,C or G
agtacttctagaattaattaangcnggatgnanggntntgncattacaggacnantgccnaaggagtgtgcacacttncggccncggatngnatncaangctggcnncntnncntgatncntcantntatgggganaaattnaaaattaannnttaaacggcagaatnannataaannacatnnattangcntnnnncgccnggangatttcccgtaaaancntanntgagcacttttnatatacncntttagnngnacatttaactttgtataatacagaaatctaaatatatttaatgaattcaagcaatatatcacttgaccaagaaattggaatttcaaaatgttcgtgcgggtatataccagatgagtacagtgagtagttttatgtatcaccagactgggttattgccaagttatatatcaccaaaagctgtatgactggatgttctggttacctggtttacaaaattatcagagtngtaaaactttgatatatatgagggatattaaaactaccctaagtatcatttgat

SEQ ID NO: 19665 - DNA, 454 bp, Homo sapiens
  misc_feature 29, 31, 111, 113, 117, 121, 122, 138, 140, 146, 151, 152,155, 157, 158, 169, 171, 172, 185, 194, 214, 215, 221, 224,232, 233, 242, 243, 258, 260, 261, 270, 271, 287, 290, 294,300, 301, 307, 316, 321, 324, 328, 329, 332, 343, 357: n = A,T,C or G
  misc_feature 368, 378, 387, 388, 393, 396, 402, 405, 415, 419, 420, 421,425, 427, 430, 431, 433, 435, 436, 437, 439, 440, 448, 449: n = A,T,C or G
aaaaataaataaagggggggggggggggnanccttgggaaaaaaaaaaaaaaaaaaaaaaaacaaaaaaaaaaaaaaaaaaaaaaaaaaaaaaaaaaaaaaccgaaaaaancnaaanacanngccccccccccccccncnaaaacnccccnnccnannaaaaaaaagtnannacccccccccccnccccccttntaaaaaaaaaaaaaaaaaannaccccnctntcatgggnnccccccctnnaatcccaaaataaangnnaaaccccgnnccaacgaaaaaccccnttnaaancccaannaaaggnaaagcccgnaaggnttnaaanntanaaaaaacaatncccaatttgcaccntcccaaccccnaaaccaaaanaaaaaaaannaaaanccncccctnctncccaaaaaanaaannnaaananaanncncnnnannaaaaaaannccccc

SEQ ID NO: 19666 - DNA, 295 bp, Homo sapiens
  misc_feature 21, 23, 24, 27, 43, 60: n = A,T,C or G
tggccgtcgttttcaacccgnannaantggaacctttgctggntgccgggccccccctcnagagtacttctagaattaattaaggcgggaggaaggagattttatataaaggtaattactttgtgataattgatcaagctgtaaatgtaatattagtgtatttttcagtatgtgaattttacttttcaaaataaatatttaaaatctaagctgaaatgagagagggaggaggaaggaagttagggaaggaggaagaaaggaaggcaggaagacaggccggaaaaaaaaaaaaaaa

SEQ ID NO: 19667 - DNA, 396 bp, Homo sapiens
agtacttctagaattaattaaggcgggggatatcttaaacatcatattactttatttagatttctactactccaattattaatgttatgtatttctcattgttttacttcttcatggtattatgaagactatatagatgattcaaccaagcccgcaaatctccctcttgtggaattccactggacccaatctgttttccatttccattgcaatactactaaagccatacaatatcaagcaccctccctctaggtccagggactatcacagaagaagcaggcatgtaagattttaaggactggtttcgaggggtcgagtgtaggaaaacagcctgttgcattgtaagagtgatgtcatcttgaagagcagctggcatgatgactgctgtttgactcc

SEQ ID NO: 19668 - DNA, 627 bp, Homo sapiens
  misc_feature 283, 456, 458, 529, 540, 592, 605, 614, 626, 627: n = A,T,C or G
agtacttctagaattaattaaggcggggttgtcctgaaagaattcataataaggtagactactcctctctggcttgcttattttattttttatttattttaatttctttatttgctttttgagacaaggcaactctgtcacctaggctaaagtgcagtggcgtgaatacagcgcactacagcctcaacatcccgggctcaagcaatcctctcacctccctcctgagtaactgggaccacaggtgcgcaccatcatacctggccaatttttgtatttttggtanagacgaggttttgccatgttgcccaggctagtctcgaattcctgcgttcaagccacccagctgccttagcctcccaaaatgctgcgatcacaggcataagccaccgcacccagccctctctggctttattttaaacacactgttttcatgttccatgttttttcttgctctanancaaatttggcaacacctgggagatacttttgggttataccaaacccgtgtggtaccttgggcaaaaaggtngggggaggganctttgtttgctactggctatcccgaatggggtaagagggccatgcctaaaanaccccctaaaaanaacaaaagncccccaaaaaann

SEQ ID NO: 19669 - DNA, 412 bp, Homo sapiens
  misc_feature 181, 182, 184, 185, 203, 205, 209, 211, 216, 217, 218, 219,220, 225, 226, 229, 230, 231, 232, 233, 244, 245, 246, 247,251, 256, 263, 266, 268, 270, 271, 277, 284, 286, 287, 294,297, 321, 334, 359, 361, 366, 377, 380, 382, 389, 396: n = A,T,C or G
agtacttctagaattaattaaggcgggtgcctgtagtcccagctactcgggaggctgaggcaggagaatggcgtgaacccaggaggtggagcttgcagtgaccccagatcacgccactgcactccagcctgggtgacagagcgagactctgtctcaaaaaaaaaaaaaaaaaaaaaaaaanngnncccccccccgggggggancnccantnccccnnnnnaaaannttnnnnnccccccccccnnnncctnttttnaaaaaantgntntnntggctnatgaaananngttttgnaantaaattacaacacaccctttgctnaaacaaaatgatnaatggaggtcattacacctactctnanaatcntgtggaaaaanacngnctgattnttacaanccgggggcctgggacc

SEQ ID NO: 19670 - DNA, 275 bp, Homo sapiens
  misc_feature 2, 15, 16, 180, 181, 184, 195, 205, 206, 207, 210, 212, 213,214, 215, 216, 217, 218, 219, 220, 234, 241, 252, 254, 255,256, 261, 262, 263, 267, 268, 269: n = A,T,C or G
cnggccccccctcgnngagtacttctagaaattaattaaggcgggtggggttggcccttgtcttttcaagtaattttcatattaaacaaaaacaaagaaaaaaaatcttataaaaaggaaaaaaaccaaaaaaaaaaaaaaaaaaaaaaaaaaaaaaaaaaaaaaaaaaaaaaaaaaaannaanccccccccccnaaaaaaaaannnaanannnnnnnnncccccccccccccnggggggnccccccccccncnnnccttnnngggnnncccccc

SEQ ID NO: 19671 - DNA, 883 bp, Homo sapiens
  misc_feature 260, 268, 269, 270, 285, 297, 298, 299, 300, 301, 302, 303,304, 305, 306, 307, 308, 309, 310, 311, 312, 313, 314, 315,316, 317, 318, 319, 320, 321, 322, 323, 324, 325, 326, 327,328, 329, 330, 331, 332, 333, 334, 335, 336, 337, 338: n = A,T,C or G
  misc_feature 339, 340, 341, 342, 343, 344, 345, 346, 347, 348, 349, 350,351, 352, 353, 354, 355, 356, 357, 358, 359, 360, 361, 374,411, 412, 413, 414, 415, 416, 417, 418, 419, 420, 421, 422,423, 424, 425, 426, 427, 428, 429, 430, 431, 432, 433: n = A,T,C or G
  misc_feature 434, 449, 474, 493, 501, 537, 553, 555, 558, 573, 583, 586,588, 589, 590, 596, 601, 605, 606, 614, 635, 636, 639, 643,645, 647, 648, 650, 658, 659, 670, 688, 695, 697, 720, 725,739, 741, 742, 744, 751, 752, 759, 762, 763, 764, 777: n = A,T,C or G
  misc_feature 781, 783, 784, 786, 798, 799, 800, 801, 805, 813, 814, 825,839, 850, 851, 855, 858, 863, 872, 877: n = A,T,C or G
agtacttctagaattaattaaggcgggcagatgatttgagcccaggagttcaagatcagcctgggtaatgtagtgagacgccatctctacaaaaaaattttttaaaaattagctgggcatggtggttcatgcctgtagtccaagctacttgggaggctcaggtgggaggattgcttgagcccaggaggttgaggttgtggtgagctgtgatcatgccactgcactccagcctgggcaatagagtgagaccgtctccaaanaaaaaaannnaaagaaaaaaaaaangcggccgccacnnnnnnnnnnnnnnnnnnnnnnnnnnnnnnnnnnnnnnnnnnnnnnnnnnnnnnnnnnnnnnnnntacaacgttcgtngactgggaaaaaccctggcggttacccaacttaaatnnnnnnnnnnnnnnnnnnnnnnnnttccccagctgggcntaaataagccaaaaaaggccccgcnaccccgaatcgcccctttnccaaacantttggccccaaccccttgaaattgggcgaaattggnaaaaatttgtaaaagncnttnaaattttttttttanaaaaaaaacnccncnnnaaaaanttttngttnnaaaaaaancccccctttttttttttttannacnaatngngnncnaaaaaatnngggaaaaaaantcctttttttttattttnaaaaaantnttccccccgaaaatggggggggnggggnttttttttcccgtntnnanaaaaacnnctttttntannnaaaaaaggggccnttgngnntntccctggggggnnnngggngaaaaaannttttttttttngggggggggggggngcccccttttnngggnaanccctncccccttanataantttttt

SEQ ID NO: 19672 - DNA, 438 bp, Homo sapiens
  misc_feature 396: n = A,T,C or G
agtacttctagaattaattaaggcggggtaaaagactaactttacagtagagaaagttaacactggtcagcaaggtgatcgaggtcaataccaacacacaaaactcaggttggtagtatgtactcttgatataatgtgatgaaaatggctctctacttctatgttcttacttataaaaatccataatcccatcctaattatgagaaaaaacaacagacaaattccaacagaggggcctcctacatagacctgattagtgctcctcaaagtaattaagggcactgaaaacaaggaaagtctaagaaactgacagagtcaagaagagcccagggagacatgacaactaaaagtgatgtactatcctacacggggtcctcaaacagaaaaagaacagtncataaaaactaaggaaatgttttaaaattatggactttgatt

SEQ ID NO: 19673 - DNA, 161 bp, Homo sapiens
  misc_feature 2, 134: n = A,T,C or G
tnccgggccccccctcgagagtacttctagaattaattaaggcggggcagctcatgaataatttttatgttgaagacttgtcgaaataatattttggttatgttgggttaaataaaatataaagttagtctgtnaaaaaaaaaaaaaaaaaaaaaaaaaaa

SEQ ID NO: 19674 - DNA, 499 bp, Homo sapiens
  misc_feature 24, 25, 64: n = A,T,C or G
ctgggtgaccgggccccccctcgnngagtacttctagaaattaattaaggcggggggatcaagnaacctgaagcatttcttcaaataattgttataagagatgaaatatggctttaccagtactattctaaagacaaagcacaatcaaagcagtggctaccaagatgtggaagtggtccagtcaaggcaaaagcagaccagtcaagaggaaaggtcatggcaaattttggggggaatgctcaaggtaatttgcttgttgactttttggatggccaaaggattataatatttgcttattatgagagtgttttgagaaagccagagctttaacagtaaaatgcctaggaaagcttcatcagagagtacttctccacaatgaaaaagctcctgctcattcctattagcaagcaagggcaattttatgagagttttgatgaaaaatcactaggcatccactttactgtcctgaattgactctttccaacttatttttgtttct

SEQ ID NO: 19675 - DNA, 411 bp, Homo sapiens
agtacttctagaattaattaaggcgggactaatgctgttaaaggcaaatggtttcctttccattaaaaccatattcctgcctgttaagttactgaggtaactccaaaaaattaagcagtaaaaaagatctccatgggatgtgccctaacacaaattctactcggcctattcaaccagcaccgtaatttttaacattcacttagcacctatgagtaattaaacaggcatcatcagagaatattccagttgctaaatggtaccccattattaattagtactatgccatggctctctctgagtatttctctgctcagttctagtagtatcttagcagtgataaaagtgttttgcccaaatagttattctcattttgtttcactttgattgaaacaaacatctgattttctttca

SEQ ID NO: 19676 - DNA, 799 bp, Homo sapiens
  misc_feature 411, 428, 436, 439, 461, 482, 492, 502, 528, 533, 538, 539,542, 545, 546, 549, 554, 563, 573, 578, 590, 591, 593, 594,597, 602, 624, 629, 630, 632, 633, 635, 638, 639, 640, 661,662, 665, 671, 686, 688, 691, 706, 707, 713, 714, 716: n = A,T,C or G
  misc_feature 717, 718, 722, 723, 724, 725, 733, 734, 735, 736, 737, 738,739, 740, 741, 742, 743, 744, 745, 746, 750, 751, 752, 753,754, 755, 756, 757, 759, 760, 765, 773, 774, 778, 781, 782,783, 785, 786, 787: n = A,T,C or G
agtacttctagaattaattaaggcggggggggtcaagatcgccgaagtagactgcactgctgaacggaatatctgcagcaagtattcggtacgaggctaccccacgttattgcttttccgaggagggaagaaagtcagtgagcacagtggaggcagagaccttgactcgttacaccgctttgtcctgagccaagcgaaagacgaactttaggaacacagttggaggtcacctctcctgcccagctcccgcaccctgcgtttaggagttcagtcccacagaggccactgggttcccagtggtggctgttcagaaagcagaacatactaagcgtgaggtatcttctttgtgtgtgtgttttccaagccaacacactctacagattctttattaagttaagtttctcttaagtnaaatggtgtaactcatngtcactgngtnaaacatttttcaagtggccaanttttccccttttgaacctttntttttggaanaaaaattaanatggggtttcccttttgaaaaaactnaaaanaaccnnttnaannggnaaaanaaaaatttntgggaaaaanttttngggggccccccnnanntanaaaanaatttttgggggaaaaaaaaanccccnncnncnaannntttttttttttcccccccccnnaantttttnaaaaaaaaggggccntnttngggaaaaaaaaaaannaccccnncnnntttnnnngggggggnnnnnnnnnnnnnnaaannnnnnnngnnggggngccccccnngggnccnnntnnnaaaaaaaaaaaa

SEQ ID NO: 19677 - DNA, 213 bp, Homo sapiens
agtacttctagaattaattaaggcgggagtaaatatctggcgatttttaaaaatgtgtgggtgaggtagtatttcaaggaagagaaaaaaatttccacaaagtatagaataaaaatgcaaaaacgaggcaagagagttaacttgtctagctggcgttaagatttcttccgtatgcaagtccaaaaaaaaaaaaaaaaaaaaaaaaaaaaaaaa

SEQ ID NO: 19678 - DNA, 433 bp, Homo sapiens
ggtgccgggccccccctcgagagtacttctagaattaattaaggcggggaaggagcagacaaggattactatcacttttcattcaacatatcctgtagtttgaatttttaaaagcaatcccatttatttatagagatattaaaattgtaataaaaatattagcacgacaaatgtaataatgcatttttgtaaatacaccttgactaagtagggtttattctgtgaatgcaagaatgacttgacatgaggaaatctacagtgaatctacaattcactacgttaagacattaggaggggaaagaaaaagacattaggaaccatatacaatctcaagaccatatgccagtcatcaataccatctcaaatgtcaaaactcaacatctactcaatgtgttgagcatgacgacattcttagaaagctagaaatagaaaa

SEQ ID NO: 19679 - DNA, 568 bp, Homo sapiens
  misc_feature 5, 6, 373, 433, 466, 476, 497, 517, 523, 530, 548, 549: n = A,T,C or G
ctcgnnagtacttctagaattaattaaggcgggcaattatattattcttctgtagttaagcaaacacttgttgagtgcctgctatgtgcacggcatgggcccatatgtgtgaggagcttgtctaattatgtaggaagcaatagatctcggtagttacgtattgggcagatacttactgtatgaatgaaagaacatcacagtaatcacaatatcagagctgaattatcctcagtgtagcttcttggaattcagtttctggaactagagatagagcatttattaaaaaaaactcctgttgagactgtgtcttatgaacctctgaaacgtacaagccttcacaagtttaactaaatgggattaatcctttctgtanttatctgcataatcctggttttctttcctctggctcctgggtgacaattggggaacactntttgctcttttaaaaaacaaaatctttccttancctgtaaatnaacattccgctttccggttgnaaaaatattttttaaaatgnttttgntgagggnccggaccctttaaacccnnacccttaaaaaaaaaaaaa

SEQ ID NO: 19680 - DNA, 334 bp, Homo sapiens
  misc_feature 56, 59, 69, 100, 111, 117, 122, 126, 134, 137, 146, 151,154, 280: n = A,T,C or G
gagcacgtcttacagaggaacaaaaataaggatgacagaaaacttcacctcaaaancantgcaaagganaaaacagtagagtgccatctttatgaatacnggagagaaaanagtcantctanaatnctatatancangccaaaatnttttnttnaataaagaagaaaattaaacttttgcagacaaaagacagagaaattaattactagctaatcttcacttaagaacttaaagtcgttcaggcaaatttaaatctacataaaggcataaaaagcagtanaaatagtaaacatgtgagcaaatataaaatagtatataaaatacattttaaaac

SEQ ID NO: 19681 - DNA, 199 bp, Homo sapiens
  misc_feature 1, 14, 16, 149, 151, 152, 157, 181, 182, 183, 184, 185, 186: n = A,T,C or G
nggccccccctcgngnagtacttctagaaattaattaaggcggggcatcaatagaggggcagaggagttccccggaacccgtgcagattaaagtaactgtgaagttttcaaaaaaaaaaaaaaaaaaaaaaaaaaaaaaaaaaaaaaanannagggngaaaaaaaaaaaaaaaaaaaaaannnnnnccccccccccccc

SEQ ID NO: 19682 - DNA, 437 bp, Homo sapiens
agtacttctagaattaattaaggcggggtaggcatagagactccagtgcagctttgtggtagaagaagatttatggacaggaaaaggaaagtgaagtacagaaaacacaaatgaggtttagaagcaactggattgcttacatttcagcgtttgccttattttaacacagttggaacaattggctacatttgattggcccaaactcagtgattggcacagatatgggctacagtctgtttacatctccacttgttgtagttcatgatgtacagaaaatctttaggctgaacttaaaatatataaggaggcagctttaggctaaacttgatttaacaattccccccttttgatcattttctcaattttgagagattgaccaaaactttagtcattcatgtcaccatcccagcataaatatacttatttggtcttgaaac

SEQ ID NO: 19683 - DNA, 390 bp, Homo sapiens
  misc_feature 8, 52, 60, 75, 79, 89, 90, 91, 94, 101, 102, 103, 128, 320,321, 322, 325, 326, 327, 328, 338, 343, 344, 352, 359, 360,365, 366, 368, 373, 376, 377, 383: n = A,T,C or G
tggcgcgncgttttacaatcacaggaaacagctatgaccagtgattactggncgtcattntgcatctcacagtgnaacngactattacnnntanccctggnnngcagacaatagtatcttaaatttanaaaaacctaaggactctaccagaaaactgttagaactgaggtttagtaaaattgcaggatgcaaagtcagcatataaaaatcagcagcatttctgtatgccaagagcaaacaatctagaaaataaaccaagaaaataatcttatttccaatagctacaaataaaataaaataaaatacctaggaaaaaaaannnaannnnaaaaaaaaanggggnncccccccnggggggnnccccnntnccccnttnngggggnttttttc

SEQ ID NO: 19684 - DNA, 398 bp, Homo sapiens
agtacttctagaattaattaaagtgactcaatactgccctgcccatctgctctgagtctgatcagtcataactctgcaagaaaacattttagctacttcttaaataaaaaattcacaccattagaatataccatacgtctaaactaagccataattttacatttaaattttttttcaatttatcctttaattccacagaatattttgaaatatttgcagcattaagttcaataaaccactcagcaatagggagtcagttctctcccgtgctaaaactagtagcagagaatattttaatcgtcagtaagaacttattttctatttttagctgtaagaatagctattcatttgtttcttaacaatatttcttctcctttagggaaaatctaatttccaag

SEQ ID NO: 19685 - DNA, 461 bp, Homo sapiens
  misc_feature 31, 34, 36, 41, 42, 46, 55, 59, 62, 69, 73, 78, 79, 91, 92,100, 104, 107, 108, 111, 112, 121, 123, 127, 129, 130, 133,138, 139, 140, 143, 165, 187, 188, 189, 190, 192, 207, 213,222, 234, 250, 269, 277, 278, 281, 282, 286, 288, 295: n = A,T,C or G
  misc_feature 302, 309, 314, 323, 337, 357, 413, 447: n = A,T,C or G
agtacttctagaattaattaaggcggggacntgntnacacnnactntccctatgntggnatnaggtccngganccaannaatacaatggcnnaggagacntttntgnngtnnccaccaccntntatnannatncacannncanacctataccgcgtttctgattncatccctaaaccacttccttannnngngtggatttgcaaaancaattnggggcctgnggagcctggggntggatagggccatggntggtcccccaccataccancgatccanntcnntgananaactgancttgttntccatcnccccnaactttatntttctttgaacttnttgggcatccccactcccanccccttttcctttatgaaatcttggatttggggctgaagggtgggagggagggcanagctctgcacactcaaaggctaaactggtgtcantccttttttccttt

SEQ ID NO: 19686 - DNA, 327 bp, Homo sapiens
  misc_feature 207, 209, 210, 211, 212, 213, 228, 229, 234, 245, 246, 250,252, 256, 257, 258, 260, 262, 268, 270, 272, 274, 276, 278,288, 293: n = A,T,C or G
agtacttctagaattaattaaggcggggtcctggccgggcagggacagggcagaggactctgagcgccccacccatgcctgcctggcttggtagagaagatggcacaggatggaggcgccccaagacggacagtgtacataagagtttcttgttgctttacaataaaacatgagaacccgaaaaaaaaaaaaaaaaaaaaaaaaaangnnnnnccccccccggggggnnccccnattcccccttnntggngntgtnnnancncccccncntngncngntttttaaaanaattnttgtccaaagttaattttaatctatacaattaaa

SEQ ID NO: 19687 - DNA, 639 bp, Homo sapiens
  misc_feature 2, 49, 51, 52, 54, 59, 70, 78, 81, 87, 89, 91, 95, 96, 97,98, 100, 104, 109, 111, 114, 121, 123, 124, 131, 133, 148,156, 158, 194, 199, 210, 212, 213, 214, 221, 226, 230, 235,237, 239, 240, 242, 254, 257, 261, 265, 266, 269, 274: n = A,T,C or G
  misc_feature 275, 281, 285, 291, 296, 315, 394, 414, 429, 454, 464, 470,477, 486, 490, 492, 500, 502, 511, 523, 525, 528, 529, 533,543, 545, 551, 557, 577, 578, 590, 623, 624, 626: n = A,T,C or G
tnccgggccccccctcgagagtacttctagaattaattaaggcgggggngnntngcttnattcctgcggncggtaccnaangaaccnangnggcnnnngntgcnaaaantncantaaaacntnnggtgggngnaaccgcggagcatancccacctncnaccatgacatgctcctacttaccagatccctgctanctacnatactaagccngnnncataacntgtcnaacngaacnantnncnctagggataacnatncagnactnnttnttttnncttatnaccngtttgntctancacctcgatgttggatcangacatcccgatggtgccaccgctattaaaggttcgtttgttccaccgatttaaaagtccctaccttaatcttaatttcngacccgggagtaatccaggncggttttctttctancttaaaaattccttcccttgtcccnaaaggggacngggganaattttngggccttcntttnanaaaaaggngnctttccccnggaaaaaatgantntcnntccncgactttaantntttttncccccncccccccccccaaaaaaacnnggggtttgtttnaaaaaaaaaaaaaaaaaaaaaaaaaaaaggcgnncnccccccccggggg

SEQ ID NO: 19688 - DNA, 441 bp, Homo sapiens
  misc_feature 5, 283, 295, 297, 299, 303, 304, 312, 320, 329, 333, 338,340, 343, 354, 360, 369, 370, 373, 377, 379, 383, 392, 395,396, 398, 409, 411, 412, 422, 423, 425, 427, 430: n = A,T,C or G
ggctnggtaccgggccccccctcgagagtacttctagaattaattaaggcgggtggatcacctgaggtcgggagttcgagaccagcctgaccaaacatggagtaactccgtctctactaaaaatacaaaattagccaggcgtggtggcacatgcctgtaatcccagctacttgggaggatgaggtgggaggattgcttgaatctgggaggcagaggttgcagtgagctgagatcatgccactgtactctagcctgggcaacagagtaagattccatctcaaanaaaaaaaaaggngngngggnntaattggngggggggnttctttaanttcnaagtnanaanaaaaaaaaccnttcccnattttaaannttntttntngccntttcaaaanttnngntaaaacccttngnntgaaattttnncntntcnttttaaaaata

SEQ ID NO: 19689 - DNA, 406 bp, Homo sapiens
  misc_feature 329, 378: n = A,T,C or G
gtacttctagaattaattaaggcgggactaagagagccgaggtcgctccccatccactctcacaaggtttgtggccatctctttgccttacaaattttgagctgtaggaaatctcctgagccgggcgcggtggttcacgcctgtaatcccagcagtctgggacgtcggggcgggcggatcaccggaggtcgggagttcgagaccagcctgaccaacatggagaaacctcgtctctactaaaaatacaaaattagccaggcgtggtggcgcatgcctgtaatctcagctactcaggaggctgaggcaggagaaatcgctttgattccaanaagccagaaggttgcggtgagcccgagatcgcgcccattgcacttcaancttcaaaaaaaaaaaaaaaaaaaaaaaa

SEQ ID NO: 19690 - DNA, 125 bp, Homo sapiens
  misc_feature 52, 67, 86, 87, 90, 95, 118, 122: n = A,T,C or G
ctggtggaagcaaaggctctccccatcaccaccttggttttaggtagggatntttaattttaactgnaagggacatctctcaactnnggnacacntaatttaatccctcaaaccagcnaccntca

SEQ ID NO: 19691 - DNA, 214 bp, Homo sapiens
  misc_feature 1, 25, 198, 199, 200: n = A,T,C or G
naagtacttctagtaattaattaangcggggtaaggagtctcaggccaaggatgtcattgaagagtatttcaaatgcaagaaatgaagaaataaatctttggctcacaaaaaaaaaaaaaaaaaaaaaaaaaaaaaaaaaaaaaaaaaaaaaaaaaaaaaaaaaaaaaaaaaaaaaaaaaaaaaaaaaaaaaaaaaannncccccccccccccc

SEQ ID NO: 19692 - DNA, 387 bp, Homo sapiens
  misc_feature 39, 87, 230, 332, 347: n = A,T,C or G
agtacttctagaattaattaaggcgggggtaagaaggancaaccatcataatttacaacctaaatcagatgaactaaaaggatccanaaatttccagctctgtgacagtacaaaacaaaattcatcaccagtaaccagtgcttgaaaggattctactacttgggtatctcagatggctttaaaaaaaaaaaaaatcagtctgaacattttctgaaataatacaacatttntatttaagaattgagattagaaaatattttatggctgcttaatgcacaaaattttaggggaaatttttaagaagactgaaagatattatattcttcatgatngggaataagaaaacntcaagcttttccaaagaacttccaagggccacatctgtat

SEQ ID NO: 19693 - DNA, 448 bp, Homo sapiens
agtacttctagaattaattaaggcgggaggaggttgcagtgagccaagattgcaccacttcgctcaagcttgggcaaaagagcgaaactccgcctttaaaaaaaaaaaagaactgaaagaagaaatgagcagcaacacaatactaacaggcgacttcaataccccactttcagtaagaatagaacaaccagacagaagatcaaacagaagacacagatgacttgaataactctttagaccaattggaactaacaaacatatacagaacacttcacccaacaacaggggatacacattctcaaacgcacatgtaatattctccaagacagactacatattagaccacgaaaaaagccttaaatgtaagaagattgaagtcatacaaatatattctccaacctcagcacaatgaaactacaaatcaatagcaaaaaaaacaaaaaacagg

SEQ ID NO: 19694 - DNA, 198 bp, Homo sapiens
  misc_feature 78, 81, 87, 110, 147, 151, 154, 164: n = A,T,C or G
agtacttctagaattaattaaggcgggaaaacaagtcgctataattgaaagccagaaaaaaaaaaccaacagattcanacncccaanatctcaaataattaacttgtcanaaatgtaatataaaacaaatagaacaaaaatgaccanccancangggaaattanaaacaaacagatccttttaaaaaaaaaaaaaaaa

SEQ ID NO: 19695 - DNA, 400 bp, Homo sapiens
agtacttctagaattaattaaggcgggggtaaaggttaaaagtatggattttggagcttggatttaaatccttgatccatcatttactagcattgtgaccttggccgagtttttaaatctctactgcaatttcctcatgtaaatggtataaatggtaatgatagtagattctaccttataacattgttatgagagttaaatgagttaatacaattttctcgtattctcattttattcttgccataaccctatgaagtaggtgctgctatatttctttcattattcaataaatgtttggagttcctactatgtgctaggtattgtgctgtactgcgtgagcaatggtgaacaaaacttgtaagtcaccttgatttaaaaatacaccaatgaataaatatta

SEQ ID NO: 19696 - DNA, 302 bp, Homo sapiens
  misc_feature 5, 16, 23, 24, 30, 31, 34, 37, 40, 46, 52, 55, 224, 225,226, 244, 245, 246, 248, 249, 250, 251, 252, 253, 254, 256,258, 259, 260, 261, 262, 263, 264, 265, 266, 267, 274, 286,290, 292, 293, 299: n = A,T,C or G
ttganaccggccgtcnttttcanncctgannaanggnaanccatgntgggtnccnggccccccctttagagtacttctagaattaattaaggggggctggggtggacaataaagaaggcgccatgagccagcctatgctgaaaaaaaaaaaaaaaaaaaaaaaaaaaaaaaaaaaaaaaaaaaaaaaaaaaaaaaaaaaaaaaaaaaaaaaaaaaaaaaaaaannncccccccccccggggggnnncnnnnnnncncnnnnnnnnnngattttncccccccccccngggngnntttttnaaa

SEQ ID NO: 19697 - DNA, 367 bp, Homo sapiens
  misc_feature 20, 21, 28, 36, 44, 45, 223, 247, 276, 287, 303, 310, 316,319, 345: n = A,T,C or G
gcccgtcgttaccaaccggnnataacangaacaaanactgggtnnccgggccccccctcgagagtacttctagaattaattaaggcgggaagcatgtacggtaccaatcgcaggttaactagaggccggtattctactactgtacgtccttactagttcattctaaataggctttgtgtggcagcatactaaaacccttatgtgcctatattttacctgggtntttttttaatcttcaaatattggncctcctgttacttcatgattaaacatggnccttgctgaanagtatattggtataantatggtnttactnatnaatggcctgttagccttcccctcctnttcctccactgggaatactaat

SEQ ID NO: 19698 - DNA, 539 bp, Homo sapiens
  misc_feature 22, 25, 26, 29, 30, 34, 37, 52, 53, 54, 58, 61, 63, 64, 65,67, 70, 76, 77, 84, 89, 91, 92, 97, 101, 103, 115, 118,122, 127, 128, 129, 131, 137, 142, 148, 163, 165, 167, 169,175, 176, 178, 179, 180, 184, 185, 188, 191, 192, 193: n = A,T,C or G
  misc_feature 195, 199, 201, 209, 211, 212, 225, 226, 228, 230, 231, 232,243, 250, 267, 276, 284, 288, 289, 291, 302, 309, 313, 314,317, 322, 324, 329, 331, 333, 337, 341, 346, 347, 357, 358,360, 368, 369, 371, 378, 381, 388, 424, 435, 441, 443: n = A,T,C or G
  misc_feature 455, 467, 479, 515: n = A,T,C or G
gaattaattaagggggccgatnatnnggnnaccnccngatataccggggtgnnnctcncangnnncnggnattatnngcatganccagncnncacgntcantnaactatacaaantgngacnatcgnnngnccactngtacntgacanacttgatgtaccttngntnangctgcnntnnnttanntcntcnnngngggnanaggatgcncnncctgattgcgctnnancnnnaatttccatangattcangacgcttttatatacanccatgtgancgggatantggnncnattatatcatnatttggntggnncanttatngncgtgnanangctnaaangatanngatgatgggnncntcccaganntnagctganatnatttttntgctcccaattttgtattaccaagaatataactccntttattttgtngggggntntatctttattanattattactatnttaaactttacnatgagttggtagttaccactctcaatgttggtatgnttaatctccctactagactttttt

SEQ ID NO: 19699 - DNA, 462 bp, Homo sapiens
  misc_feature 22, 24, 31, 35, 36, 39, 42, 44, 47, 48, 50, 54, 57, 59, 64,67, 70, 74, 75, 87, 89, 90, 94, 95, 96, 97, 98, 99, 100,102, 103, 104, 112, 114, 120, 124, 126, 131, 134, 140, 141,153, 159, 161, 165, 166, 175, 178, 203, 213, 215, 217: n = A,T,C or G
  misc_feature 218, 234, 241, 287, 300, 321, 328, 392, 396, 398, 426: n = A,T,C or G
agtacttctagaattaattaangngggttgnactnntanggnanaanntnccanagnantttangantcntgannatatgatttttncnntccnnnnnnntnnngactacanantgagcntctntnctccnaangaaaanncaaccacagatnttcctntngtgnnaaaagatcnagntgctgctgaaaagctggaatatgcntctttacatncntnnaactgttcagcacatngcttctnataaagttctaacttaagattctaaatcaatatataaggaaaatanatctattttttgncaaaaaaaattattacctacntgcccanataatgggcatggattaaaaaaattagacaattttcacttactattgaatgctaatctctctanaaancngctctctctaaaaatctgatctgtccanaaaaaaaaataagttttgccaatgacatttggggta

SEQ ID NO: 19700 - DNA, 566 bp, Homo sapiens
  misc_feature 4, 5, 44, 64, 98, 156, 201, 314, 427, 486: n = A,T,C or G
caanngctgggtaccgggccccccctccgagagtacttctaganttaattaaggcgggagagangaacaccaccaggaagatcaagaagtttaagatnggaggagaaggaggagagactcacggagctcagagagagaagaaagtcaaagcagaancaaagacaaatacaggaaaccaaggagagtaacgagctcacacangaaaagaaaattctgagagtgagaaaagaatgtactctaaaagtcgtgatcataatagctcaaataacagccaggggaaaaaaaaggctgatagagatcaaagtcccttcttnaaaaataaaaacaaagcagtcaggaccaatgaaattaaagtccttccatgttgaaaaaattaaggagggatgagaaggatccagaatcctcagtgggaaaaaggaaaaccaanaaatcaaaaaggtcaaagaaaaatgaccatgttacattgaaaaaaaataaaaaaatttngattcattgaaatcaagcccttgggaaccagatgaaggaccaaaagccggattgagtgagtttatattaaacttactttc

SEQ ID NO: 19701 - DNA, 171 bp, Homo sapiens
taccgggccccccctcgagagtacttctagaattaattaaggcggggaggaaataccaaatgcattgttgttctgctcaatacatctcacttgtttctaataaagaaagcagctgaaaaaaaaaaaaaaaaaaaaaaaaaaaaaaaaaaaaaaaaaaaaaaaaaaaaaaaa

SEQ ID NO: 19702 - DNA, 377 bp, Homo sapiens
  misc_feature 50, 89, 160, 161, 166, 169, 170, 172, 173, 174, 178, 182,183, 185, 187, 188, 202, 203, 204, 205, 206, 210, 219, 222,223, 224, 228, 243, 245, 247, 250, 251, 254, 259, 263, 267,268, 284, 302, 312, 319, 321, 329, 337, 339, 349, 355: n = A,T,C or G
  misc_feature 364: n = A,T,C or G
agtacttctagaattaattaaggcgggtgcctgttgtcccagctactcangggactgaggcaggagaatggcgtaaacctgggaggcanagcttgcagcgagccaagatcgcgccactgcactccagcctgggcaacagagcgagactccgtctcataannaatanaannannnaaanaaanngngnncccccccccggggnnnnncccnactcccccnttnnngggnttttttccccccccncngnggnngtnttttnaaangaannatggtgtgtgaaacantgtctgttttttgtgccngctctgtatnatgtttntnagaccatntttgtaananatgaataaantgctgntttttgccnaaaaaaaaaaaaa

SEQ ID NO: 19703 - DNA, 387 bp, Homo sapiens
  misc_feature 358, 361: n = A,T,C or G
agtacttctagaattaattaagggggctaggttgggaaaacccagtgtgtgaagatgacatagccttacattgaatgttattgggccagaatggtgcagaaagagagccagcaatgagaaatgggagagcacagagcagtgccccatctcagatacaatcagtgactttcccagcagcagagccttaagatacaggaaagaaaaactgacaaaattgaagggaaaaatcaacaattcagcaataatttggagactttgatacgccacttttaataatggatagaacagcttaagactataaaccaatgaggcctaacagacatctatagaacctcatcagaatacgcattcatctcanaanaaaaaaaaaaaaaaggaaaaaaaaaa

SEQ ID NO: 19704 - DNA, 388 bp, Homo sapiens
  misc_feature 21, 22, 87, 103, 357: n = A,T,C or G
agtacttctagaattaattanngcgggatatcagagtgtaactaaggtagtgaacacacacaaacacacattcacaaatacatgcanactaatgatcaagttnatgaataatgatgcaaaattttaagaaaatattagaataaaaatatttcagcattgtatttatttaattagccaaaaaaggtaatcatataatcatctcttttgatcaggcaaaaacaattagatttttctctcctttcttcactgttagttattattttgatgtatcaatcaatgcaattgtatacaaggccaaaaaatgagacatataaatgatacatccttcaaagaaggatttaaattcctctctctganatgttgtatgttgaaaatctgaaaatttctg

SEQ ID NO: 19705 - DNA, 324 bp, Homo sapiens
  misc_feature 30, 32, 33, 43, 50, 57, 59, 65, 67, 69, 76, 78, 79, 84, 85,88, 99, 101, 105, 118, 121, 140, 141, 143, 146, 147, 149,151, 153, 154, 156, 157, 166, 198, 200, 226, 256, 257, 303,306: n = A,T,C or G
agtacttctagaattaattaaggcgggggnanngcaaaggccnatgttgncgctggnanaaagtnancnggatatngnntcacnnccnaatgatttacngngctncaatgatgtttcngangccactgaggatttttcgnntnaanntnantnntnnctatacttntatattcacagttcaaaaagtcaagtgctgananatggtttaaagacaaaattcatgaangtatattttgtgttataattgttgatgggnnctttggttttctgtatttttccccctctctttaaaacatcactganctnccaataaatttttattga

SEQ ID NO: 19706 - DNA, 110 bp, Homo sapiens
agtacttctagaattaattaaggcgggtgtgctcttttagctgtccatgtttctaggggtattcatttgctttctcgttgaaacctgttgttaataaagtttttcactct

SEQ ID NO: 19707 - DNA, 433 bp, Homo sapiens
agtacttctagaattaattaagatgtgaaaatatcacatgccctcataacaagtgttgttctttttactttcttctagccaacttgttttagaaaattaagactctttttgatgactcagactgacaaaaatggaaaactttgcctatgtagactaaagaatgcctactgcctgagaaaatgcagacctaattgttggtttattttctcctccttaccccaccctgctctctctttttctctctgggtatctcaccagaactctcttcctgcccctctttctctttcttcctttactttcccttgcttttccctcttttcttactcctcctctttctctccccaacccccattctcatctgcacccttcttttctcatgtgtttgcataaacattcttttaacttctttctatttgacttgtggttgaattaa

SEQ ID NO: 19708 - DNA, 277 bp, Homo sapiens
aagtacttctagaattaattaaggcgggtggatctcttgaggtcaggctggtctcgaactcctgacttcaggtggtccgcctgccttggcctcccaaagtgctgggattacaagcatgagccaccgcgcccatcccatttaacaggttttttttaagtgtttcctttatgtctaatatcagaaacagtaggcagtatgtgtggtagtcaagagctagactgcctgggttcagatcctggcagtgccattttgcctgctctgtgactttgggcaaatt

SEQ ID NO: 19709 - DNA, 198 bp, Homo sapiens
agtacttctagaattaattaaggcgggaggtagatataggcctgttctttttagcaatgtgattcttgtgtttcttctggattcagcttctcctaaacagacagtttaattatagttgcggcctggccccaaaaaaaaaaaaaaaaaaaaaaaaaaaaaaaaaaaaaaaaaaaaaaaaaaaaaaaaaaaaaaaaaaaa

SEQ ID NO: 19710 - DNA, 394 bp, Homo sapiens
  misc_feature 1, 3, 14: n = A,T,C or G
ngngtacttctagnaattaattaaggcgggggtgattggaactgtgtaattgcaatgctcttacattttatattttacccagattaagtattaatagaatataaaaagttaaggctatgtattgtactcccttagagcatgggccagcaaactttttcttaaagatagtaaatagttcaggctttgatggttaagaggcaaaattaaggatattatatagatatttatataacattataaaatgtaaaagccattcttgaatagctcacagtttttttagaattccatttcaatttctctattggctttttagatttcttcctcccactgggcttgccttctttctgtaggtcacagttggtttccatattcttgatgatctttttaaaaaaac

SEQ ID NO: 19711 - DNA, 202 bp, Homo sapiens
aacaaaagctgggtccgggccccccctcgagagtacttctagaattaattaaggcggggtctagtgacaaatgagagggtgtggcctgtgcggagagaagccccggagaggacaaggtgaagagccaatggggaaccagaaatagaggaggggcgtgacctgcagccaataagtggtggggaatgtgaataaacatgatttc

SEQ ID NO: 19712 - DNA, 414 bp, Homo sapiens
  misc_feature 4, 15, 31, 36, 37, 39, 66, 73, 84, 100, 107, 152, 164, 339: n = A,T,C or G
ggtnccgggcccccnctcgagagtcttctanaattnntnaaggcggggtctccctttgttgagcangttagantgcaatgatgngatcatgactcactgnatcctcnaccacctggactcaagcaattctaccacctcagcctacatagtanccgggaccacanatgtgagccaccatgcccagttaattttttgattatttgtagagatgaggtctatgttgcccaggctggtctcaaactcctgagctcaagcgatcctgcctcaaaatcaatcaatcaatcaatcttagttaaactatcttcttaatgggtagattttactttttaattcagtttncaatgaaaaaaaggggtctatacttcccttctgtttaaaaaagctaagtggccatgctcattttgaaaatgcttc

SEQ ID NO: 19713 - DNA, 621 bp, Homo sapiens
  misc_feature 2, 19, 30, 31, 43, 56, 58, 69, 261, 281, 295, 302, 304, 324,329, 337, 338, 339, 343, 362, 370, 402, 426, 433, 434, 447,459, 466, 482, 489, 501, 502, 520, 525, 526, 531, 532, 535,536, 538, 559, 573, 591: n = A,T,C or G
gncgttttcaccccggacnaggggtaacannggctgggtgccnggccccccctcgngngtacttctagnaattaattaaggcgggctacagaaaataatctggtgttcttgctaactttgcccttcactgttgcttaattgtgaacagccaaaagctatatgttatggcttattgtgtgaaggtaactaagaagtggtgttccatgacttcagagtacattccatggcggagtccatttatttgagtttgaccatttaatnactttgctgggaaaatctgnaaaaaaaaaaaacnagtttgntnggggactaaacccccgcatntgtgngtgaaaannncttnaaggccccctggcctcccngggacagnctttgccggggggggggcccccccctggttcnccttttgatccccctttgggtttncttcccnnaatttaaaaaaanacctttggaaanaaaaaancgggcctttttctaanaaaaaanctcttccctttnnaaaaggtttttggaaaanacctnnttttnnacnncnaattttggttccctttaaccnaccctttttttaanaaagaccctttgttttgnttttttaaaaaaaaaaaaaaaaaaaaaaaa

SEQ ID NO: 19714 - DNA, 241 bp, Homo sapiens
  misc_feature 11, 36: n = A,T,C or G
gtacttctagnaattaattaaggcggggacatcagnagaattgagaatttagaatctctacaatggatcattcacaaagtccagtatgcaaacagaaattactagacatacaaagacaaaaccataaaacaaaaatcaagaaaaaaggacagtcaatagagactgacaccagtatgacccagatgttaaaattaacaaagatttcaaagcacatattataattatgatcaagactttttta

SEQ ID NO: 19715 - DNA, 193 bp, Homo sapiens
agtacttctagaattaattaaggcgggcagagatggaatatatcattggtagaataagtgtttggtaagtttttatttagtaaaatttagtagaagaaatgatgtccactttaaaattgtggagtttttaatacttgggacaaactgaaattgtttctagaaagtctctaaaaaaaaaaaaaaaaaaaaaaaa

SEQ ID NO: 19716 - DNA, 288 bp, Homo sapiens
gtacttctagaattaattaaggcaggcacaaagaaataatggatgaaaatgttccaaatttagcaaaaggcataaacctacagatctgagtagctgagcaaaccccaaacacaataagccaaaataaatcaggaatggccatattagtgtcagataaagaagactttagagcaaagaaaattaccagagacagagagggctgttacattgtaataaaagtgtcaaacaaccgagaagacaacaatcctaaatgtgtatgcagaaaataacacagctgccaaaaacatg

SEQ ID NO: 19717 - DNA, 452 bp, Homo sapiens
agtacttctagaattaattaaggcggggacttgctaattagtgtctgaaagtcaattatttaaattgatattcaatctaccacatattcaaatctaacaggttagagggtttttaacctaaatgtgtcattacctggtcttgcagatactcatccacagtaccaccatgtctaagatttgctaatagcatttcggcagcttcaattccaactttgtctgcatttacaccttaagataagcacaacattaaaacaaaacaaaacaaaacaaaacaaaactaattactaagagacaaaaagtttggtatatcccaattagcactggtatacaatttttaggcctcaaaaacccactcaatgcaccttttagaataagatctttagttatttaatattctgagtgtttgggatacacaagtcttatacctttaaatatactagtggaggaaaata

SEQ ID NO: 19718 - DNA, 272 bp, Homo sapiens
  misc_feature 35, 56, 192: n = A,T,C or G
agtacttctagaattaattaaggcgggtgtgcttnggtctgcaaattgactgtcanttctcaggagaatctgtcttggagcactaagtttgaaaatgtgccctgtatggaatgtctagtgagtgggagtgaaaggttatatttgcatttatgaagggctaagcaggatacagggaacaaagagaaagggganagaagagaagagaaaataataattaaaaaaaacagtaaatcattctctttttcttagaaaaaaaatggggcaatctgtta

SEQ ID NO: 19719 - DNA, 301 bp, Homo sapiens
  misc_feature 60, 88, 122, 123, 162, 194, 195, 212, 216, 225: n = A,T,C or G
tccgggccccccctcgagagtacttctagaattaattaaggcgggttatcaaagcttacngactgacggaagtgagaaaaggaggcanatgacaatgtgggatggggagcagaggagaggcnngagagagaaaggaagaagtggttattttagaattctctntatagtaaaaatatgttttttaaaaataaganncatttctttcaactatnaaanaagccccangaattcatagccattagattctcctataaaaaatgttaaaacaaaaaaagtcctttggacaatgatacttagataa

SEQ ID NO: 19720 - DNA, 436 bp, Homo sapiens
agtacttctagaattaattaaggcgggagagaaaagatgagccggattcatcagaaatacctcagggaacttacttataataaatggtaaagtattttgttcctttttttgccattataaataggattgctttcctggcttcctttttaagtagtagatgtatagacataaagacagaatagagagccccaaaataaatctacataccccacgttgaactgatcttcaacaagcatgccaagaacacaaaatgaggaaagggtagcagttttgattaatggtattgggaaaactgaatgtccacaacagaaaaatgaaaatggacccttatctcacaccacatatagaaatcaactcaaaatggattaaagacttaaatgtaagacctgaaactgtaaaactctagaaaaataggggaaaagcttcttggcattgg

SEQ ID NO: 19721 - DNA, 612 bp, Homo sapiens
  misc_feature 20, 21, 27, 28, 33, 35, 56, 64, 65, 66, 167, 284, 287, 307,311, 338, 342, 363, 372, 445, 449, 456, 466, 504, 529, 544,554, 586, 601: n = A,T,C or G
aaaagctgggtaccgggccnnccctcnngagtncntctagaattaattaattttcnagacatannnataacaaagatattcatggcctaaactgagtactggatcaaatggacctgatagatatctacaaaattctccacccagaaacaacagaatagacattcttntcatcagcccatggcacttactctaaaattgatcacataattggaagtaagacactcctcagctaaaaaaaaaaaaattaaaaaaaaatttaaaaagccggctcgctcaccagcggnggnagtctccaattgcgccctanaggngagtccgtattacgccgcgcctcactnggcncgtcgttttacaaacgtcgtngacctgggnaaaaaccctgggcggttacccaacttaattcgcccttgcaggcaccatccccccttttcgccagctggcggtnatanccgaaanagggcccganaccgaatgcgccctttcccaacaagttggcgcaagccntggaatggcgaaatgggaaaattgntaaagccgtttaaantattttttgnttaaaaaatttccgcggtttaaaatttttttngtttaaaaattcaancttcatttttt

SEQ ID NO: 19722 - DNA, 270 bp, Homo sapiens
agtacttctagaattaattaaggcgggtacatatgttggaattaacagacaaggacactagttattataaccatactccatatatttaaaaagttgcatacagacatataagactcaaagtgaatttctagacatgaaatctacaatatctgagatgaaaaatacactggatgggattaacagcagattaacattgcagattagtgaactttaaagcgtatcagtagaaactatccaaaacgaaaaaaaaaaaaaaaaaaaaaaaaaaaa

SEQ ID NO: 19723 - DNA, 301 bp, Homo sapiens
  misc_feature 29, 39, 50, 53, 54, 59, 61, 62, 66, 70, 72, 77, 78, 79, 81,86, 97, 102, 103, 106, 108, 112, 121, 122, 124, 126, 136,139, 153, 154, 192, 198, 218, 223, 225, 228, 234, 241, 254,271, 272, 273, 274, 275, 276, 277, 284, 285, 286, 287: n = A,T,C or G
  misc_feature 288, 289, 290, 301: n = A,T,C or G
agtacttctagaattaattaaggcggggnggcaggggangctgccaacgnacnngcttntnntttnggtncnacctnnncncgagnaccccgcaaanaagannatntntctntgaaacatnnanancattacaacnacntaaaaactttcttnnataagatactaaaatatttgcttacctttaaagttttnaacctnattattaatagcttactatnatacnanaanctatgngcacttngaacaagtctcantgccgaaaaaaaaaaannnnnnnaaaaaannnnnnnccccccccccn

SEQ ID NO: 19724 - DNA, 106 bp, Homo sapiens
  misc_feature 6, 18, 92, 95, 97: n = A,T,C or G
gaacanaagctgggtacncgggccccccctcgagagtacttctagaattaattaaggcgggccctgggccgcatggtggaacggagcctgcncancnagctggctg

SEQ ID NO: 19725 - DNA, 421 bp, Homo sapiens
agtacttctagaattaattaaggcggggagcttgttgtctctggggtaagcattagctgaacaaaaagagggccagtgggaacgtgctgacccttgtcagaaatgaaagtcacctcctatccgcataaacacctgccctgggaaagtgtgctgtgcagaaactccaagtcctgtcccagtctctggagaccaaggtctgtccatcatctgttccctgtagaactgtgacacctgcggggcactgcaagggctgaaaggctggcctcctcccctttgctggccactcactgggtaggaatttttaaaaatcttccttgggaccgggcgtggtggcaggtacctgtaagtcccagctacttgggaggctgagacacaataattacttgagcctgggagatggaggttgcagtgagcccgagat

SEQ ID NO: 19726 - DNA, 427 bp, Homo sapiens
  misc_feature 43: n = A,T,C or G
agtacttctagaattaattaaggcgggaagaggtggtggtcanaataacctatgttaatcaaaataaactccttagcattagttaaggttctttacctcaatctctcaaaattaatgttattctgaactaaaacttaaaaaaaaaaaaactaaatctctcagttctacttgtcttattacacatatactcatcttcttttccagaaaaaaataatattcatgtcctaaacttagaaacctaacctgaagttttgatctggatttttaggaagaaggaagtattgatggtttcatcattcttagctctataaaagacctattaatttttcataacttttagcttagtattatagttggccttttctctgtaagggacattcttaaatattcaagtctaattttctttaaaaagttcgcttgctttctt

SEQ ID NO: 19727 - DNA, 475 bp, Homo sapiens
  misc_feature 436, 437, 438, 439, 440, 441, 442, 443, 444, 445, 446, 447,448, 449, 450, 451, 452, 453, 454, 455, 456, 457, 458, 459: n = A,T,C or G
agtacttctagaattaattaaagctgcaattggcagtaactaaattctccgaggtttctttcctctcctctttgctactgaaaggtgcagaaatgcttttgacagcatctttcctactgacagatgaattgttttgacaggagaatttgaaaccttcaactgaagacacattcagatgtcaggcctggtacagggcgatcgtgttcatagaaataagtgagatgctttagatgtgtgtgcatgtcagctgccacctgaaagaaaggcctcattaaagattttcactgattaactctttgattgttcttgggatctcagatgggaattcacgctgcttgctgcagagctcttgggctaagtgtattttcttaattactgagaaatgcgtgttatcagtaagcagtgaaaagtcttgaaaaaaactaagtaatttccnnnnnnnnnnnnnnnnnnnnnnnnaaaggcgccccccccc

SEQ ID NO: 19728 - DNA, 282 bp, Homo sapiens
  misc_feature 64, 65, 66, 67, 71, 72, 73, 74, 75, 95, 96, 97, 132, 133,134, 135, 136, 143, 145, 146, 147, 148, 150, 157, 160, 161,163, 168, 170, 171, 180, 182, 183, 187, 188, 189, 192, 204,206, 208, 220, 229, 230, 236, 243, 256: n = A,T,C or G
agtacttctagaattaattaaggcgggaaaccgatgaaaaaaaaaaaaaaaaaaaaaaaaaaannnncccnnnnncgggggggcacaaaaaaaannnaaaaaaaaaaaaatataaccccccccccccccccnnnnnttaaaantnnnntnacttttnaanngnttttntnnccccccccntnngggnnnaanttaaaaaaaatnananttatggtttttnttgtgtgtnnaactangatccantgaaaaaacaaancaaatattctactgttgctatacttt

SEQ ID NO: 19729 - DNA, 381 bp, Homo sapiens
agtacttctagaattaattaaggcgggccaaactacagctccagccccagggtctgtttttgtactttctgcaagctaggaataacttgtatcaattttaagcgattaaaaataatttgaatagtatttcacaacatgtgaaaatcacatgaactttacatttctgtgactataaaggttcactggaacacagccatgctcattcagtgtctattgccactttcacactacaaaggtagaagtgagtagttgtgatggagaccatgtgacccacaaaacctgaaatatttactatctggtccttcacagaaagttttcccaagccatgggtctacaataatcgtaagtgatttattaacaagttttaagtttatgaaggtc

SEQ ID NO: 19730 - DNA, 425 bp, Homo sapiens
  misc_feature 32, 35, 43, 68, 70, 88, 127, 179, 186, 197, 220, 260, 265,273, 299, 305, 317, 319, 325, 326, 329, 340, 355, 360, 361,374: n = A,T,C or G
agtacttctagaattaattaaggcgggatagnagnagggtcgnggtgctggagtttaagttgagtagnangaatgcggtagtagttangataatataaatagttaaattaacgaatggttatgttanggttgtacggtagaactgctattattcatcctatgtgggtaattgaggagtntgctaanattttgcgtanctgggtttggtttaatccacctnaactgcctgctatgatggataagattgaaagagtgaacanttatntgcatacntgaagtattttcctgcttaaaaaagntatatncgtgttatttgntntaatcnnggntgtattattanatgttaacacatctngcatnnttagctgtattangtcatgtagtattgatattaggtgattcaatagtactagtttaaacctatt

SEQ ID NO: 19731 - DNA, 394 bp, Homo sapiens
  misc_feature 102, 122, 123, 143, 173, 203, 206, 209, 213, 220, 248, 251,259, 277, 281, 285, 286, 287, 293, 296, 298, 306, 307, 308,311, 325, 326, 334, 335, 337, 342, 343, 347, 349, 351, 355,360, 362, 365, 367, 369, 371, 374, 378, 387: n = A,T,C or G
agtacttctagaattaattaaggcgggcggatcacaaggtcaggagattgagaccattctggctaacacggtgaaaacttgtctctactaaaaaaaaaaatncaaaaaattacctggcgtannggcaggcccttgtaatccanctacttgggaggctgaggaaggaaaattgnttgaatccaggaagcaaaggttgcagtganatnacntcgngccactntgcactccaccctgagtgacaaagtganacnctgactcnaaaaaaaaaaaaaaaaangggngggnnngggggnttntncccctaannnccnccttttgggggggnngggggggnngnttttnngggncngnaaanaaaancnttntngntnaanaaanaaaaccccnttttttt

SEQ ID NO: 19732 - DNA, 248 bp, Homo sapiens
  misc_feature 12, 153, 155, 185, 187, 193, 196, 231: n = A,T,C or G
ccggcccccccntcgagagtacttctagaattaattaaggcgggcataacacagcaagacgagaagaccctatgggagctttaatttattaatgcaaacagtacctaacaaaccccaggtcctaaactccaaacctgcattaaaaatttccgntngggcgaacctgggaccaaaccccaccctcnanccagtnatnctgctaagacttcccagtcaaagcgaactctattntctcaattgatccataa

SEQ ID NO: 19733 - DNA, 226 bp, Homo sapiens
  misc_feature 6, 33, 54, 56, 58, 75: n = A,T,C or G
ggcccnccctagagagtacttatagaattaatnaaggcggggcaggaccgccgnanancgcactaaggagagtgnggaccctcgccctgtcctctaagctccatgtgaaatgtggataatattccttactgccataaatagccactggccgctgactacgcgtaaggcaaacaagcgacctgcgttcaagggacccgaagactaggggagaagcagcgagcgggtc

SEQ ID NO: 19734 - DNA, 202 bp, Homo sapiens
  misc_feature 2, 120, 121, 140, 147, 153, 154, 156, 157, 158, 160, 161,162, 163, 164, 171, 182, 183, 185, 186, 187, 190: n = A,T,C or G
cnggccccccctcgtatatacttctaaaattaattaaggcggggggggaaaaaaaaaaaaaaaaaaaaaaaaaaaaaaaaaaaaaatttttaaaaaaaaaaaaaaaaaaaaaaaaaaaannccccccccccccggggggnccccccncccccnntnnnannnnnttttttnacccccccccnntnnngcnccttttttaaaa

SEQ ID NO: 19735 - DNA, 432 bp, Homo sapiens
  misc_feature 52, 56, 57, 70, 72, 73, 122, 155, 164, 170, 174, 177, 185,221, 226, 256, 265, 272, 275, 276, 277, 278, 298, 299, 304,307, 314, 332, 343, 345, 350, 355, 357, 363, 366, 367, 370,372, 393, 395, 413, 418, 420: n = A,T,C or G
ctgggtgccgggccccccctcgagagtacttctagaattaattaaggcgggngganngcctttcttctgngnnaattgcgtacaggctacaggggttagcctggactaaaggcatccttgtnttttgagctattcacctcagtaggaaaaggatntaagggaanatcacngtanttnagttctgntgacctgtgcacctaccccttggaaatgtctgctgntgttnctaattccacaggtcatcagatgcctgctngataatatntaaccantannnncacctttcactttttcctanntttantanatatggnatttaaaacctttgtatncccccccatangnggttnccccncncccccnttnnaananatttttacccccccccctttngncctttttaaaaaaaaaanttttngnaaaaaaaaaaaa

SEQ ID NO: 19736 - DNA, 204 bp, Homo sapiens
agtacttctagaattaattaaggcgggagaggttttcaaaaggcatttagcatgaagaatgttatgtatgaaattgacattcagaaacagtgactaaagatgcagttgtataatacatgccacgtacaacctctggcctaccactacgctcagtggtaatgatgactttgaggcattccataagttaaaaaaaaaaaaaaaaaa

SEQ ID NO: 19737 - DNA, 419 bp, Homo sapiens
  misc_feature 39, 53, 55, 108, 125, 150, 157, 166, 179, 180, 181, 182,183, 185, 192, 193, 198, 204, 208, 209, 210, 216, 217, 219,220, 222, 225, 226, 230, 231, 238, 239, 246, 248, 253, 268,319, 344, 354, 373, 401: n = A,T,C or G
agtacttctagaattaattaaggcgggatcaaatcaacntcctttaaacaatnantaagaggttccctttcaaataaagataaagaatttgacttgggacactgccanacttctaactgttacanaaaaacattctgttgccacagcttnctgaagnaagaaaatnaattgaaaactannnnncnccccccnnggggngccccnatcnnncccctnnanngnagnntttnnccccccnnagagggngnttttnaaaaaaggaaatcangaaagctaaggcttcttggtggctcatggtggctcatgcctgcaatcccancattttgggaggccgaggcgggcanatcacctgangtcgggagtttgggaccancctggccaacatggtgaaaacctgtctntccaaaaatcaaaaatta

SEQ ID NO: 19738 - DNA, 244 bp, Homo sapiens
  misc_feature 226: n = A,T,C or G
agtacttctagaattaattaaggcgggctaatagatataaaacacctgaaactcatcagcagcttctcaataagatctcaggagtgaggagaagtaatgcaagatcccaaagtatgccagcgtataaaatcccaagtcaagaggtcaagctgccggtttctcaagtcgcttgcttggccctcttccaagttgtactttgctcctttccttttcttcccttcctcanaaaaaaaaaaaaaaaaaa

SEQ ID NO: 19739 - DNA, 186 bp, Homo sapiens
  misc_feature 54, 60, 63, 70, 72, 73, 89, 91, 100, 102, 104, 107, 111,117, 131, 135, 147, 151, 157, 159, 163, 166: n = A,T,C or G
agtacttctagaattaattaaggcgggggtgctaggaggataaactccctgganaactgntantgaagantnntatgactaatcctgtntntttgtgatntnantancccntaattnaaaaatatattacnttcnatcttgtaagangcanactggntnaagnatntcctgtgctactgatgaaac

SEQ ID NO: 19740 - DNA, 250 bp, Homo sapiens
  misc_feature 182, 196, 197, 222, 223, 224, 225, 226, 227, 231, 232: n = A,T,C or G
agtacttctagaattaattaaggcggggttccccggcttccaagtcgctgtttcgtcaaagcacgagggccgcctgtggccttaattcctaacggcggccccggttctcccttctcggcaataaaccaggcctagttttgtaaaaaaaaaaaaaaaaaaaaaaaaaaaaaaaaaaaaaaaanaaaaaaaaaaaaannaaaaaaaaaaaaaaaaaaaaaaaannnnnngggnncccccccccggggggggc

SEQ ID NO: 19741 - DNA, 308 bp, Homo sapiens
  misc_feature 2, 299: n = A,T,C or G
gngtacttctagaattaattaaggcggggggtccagaaggcagactgctatgggttgaactgtggtccccaagaaatgtatgtgaagtccttaacacccagtatcttacacagtaaccttatttggaaaaaggatcattgcaaatgtaattaggatgaggtcacatgatggagtagggcaggaccctaatccaatatgactggtctcctaataagaagatagccatatggagacagagacaaaggaagaatggaatgtgaagatagcagcagagattagggtgattaaaaaaaaaaacnaaaaaacca

SEQ ID NO: 19742 - DNA, 416 bp, Homo sapiens
  misc_feature 7, 117, 120, 122, 127, 128, 133, 134, 135, 145, 150, 151,161, 162, 164, 175, 179, 180, 181, 182, 183, 184, 187, 188,191, 194, 200, 202, 206, 207, 209, 211, 213, 214, 215, 219,227, 236, 241, 242, 243, 249, 252, 256, 258, 260, 261: n = A,T,C or G
  misc_feature 262, 275, 280, 281, 283, 285, 287, 289, 290, 294, 295, 296,302, 306, 308, 314, 316, 327, 335, 339, 342, 344, 345, 346,350, 353, 356, 357, 362, 365, 366, 367, 369, 372, 375, 380,384, 385, 390, 391, 392, 394, 398: n = A,T,C or G
cccctcnagagtacttctagaattaattaaggcggggctcgcagtgagctgagatcacaccactacactccagcctggaagacaaagcaagactccatctcaaaaaaaaaaaaaaanggncnggccnnggggnnncccccttttntcccnnccttttgggnngnccggggggggngttnnnnnnggnnggnaantaaaancnttcnngntnannngggnaaaccccnttttttttnaaaannnaaaaanttncccngncnnnggggggggccccnttttnncntncntnntcgnnnggttgnggcngnaaaatngntttaaccccangggggggncccntcntnnncccnaanttnnccccnttnnntnccnccnggggnaaannaaaannncntttnaaaaaaaaaaaaaaaaaa

SEQ ID NO: 19743 - DNA, 247 bp, Homo sapiens
  misc_feature 3, 26, 27, 28, 30, 32, 33, 36, 63, 216: n = A,T,C or G
acnggccgtcgttttacaggaaacannnangnncangattactgggtccccgggccccccctngagagtacttctagaattaattaaggcgggtggaaaggcggaggcgagccctggaggagggaggccacaactccgagctgcccacctggtgctgagctggggccccgcctcctttctgttttatttttgaggaaataaaataaccaagtgctnaaaaaaaaaaaaaaaaaaaaaaaaaaaaaaa

SEQ ID NO: 19744 - DNA, 321 bp, Homo sapiens
  misc_feature 19, 20, 52, 54, 55, 57, 58, 59, 74, 75, 90, 136, 137, 299,301: n = A,T,C or G
gtaccgggccccccctcgnnggtacttctagaaattaattaaggcggggtantnncnnntataccttctgcttnntgagttagactacanaataactttgcaaggcagagccagagctaagtaccccctgaaaccnngactagctacacttgagaatcagctactgggagcacacccgtctatgtagcataaatagtgggaagatttataggtagaggcgacaaacctaccgagcctggtgatagctggttgtccaagatagaatcttagttcaactttaaatttgcccacagaacccntntaaatccccttgtaaattta

SEQ ID NO: 19745 - DNA, 458 bp, Homo sapiens
  misc_feature 1, 176, 192, 193, 195, 196, 198, 199, 205, 206, 211, 216,217, 220, 222, 241, 244, 247, 256, 262, 282, 283, 317, 322,324, 335, 345, 347, 352, 372, 381, 382, 388, 405, 407, 410,411, 414, 415, 422, 424, 432, 433, 438, 439, 443: n = A,T,C or G
naagtacttctagaattaattaaggcgggcacctgtagtcccagctactcgggaggctgaggcaagagaatggcgtgaacccaggaggcggagcttgcagtgagctgagatggcgccactgcactccagcctgggcaacagagcgagactctgtcttaaaaaaaaaaaaaaaaaanttggggtggggtttannanntnncccttnnattcntaccnnttnangaggttgaggcaggcaaantgnttnaccttaagnattttngacccccctgggcaaaaaannaaaacccttttttttttaaaaacttaaaaaattnccccntnttggggggggngccccttttntncccanaacttgggaaacttggggcnggaaaattnntttaanccggggaggaaaaggtngnaannggnnttaaatncnttcccccnnttccnncctngggggggggaaaaaa

SEQ ID NO: 19746 - DNA, 677 bp, Homo sapiens
  misc_feature 249, 584, 593, 619, 644: n = A,T,C or G
attaattaaggcgggggaataggagagcaatgccctagggaaaagagggcactaggggaaacaatggttacagtgcactgcagaatgaccaatggcacctacttccagagttttccttcaactaaaaagagatggcattttcttatgattcagtaaccgcattacttacatcaacattatggttgctatagacaagcctaggtagctagcctctatttacatcatcccactaagggtatccaaacccangtaaccaaattttagaacactatcagatagtttcctgcattcaagacttcaactcataactctttgaactcttattagatataaggaatctaagatgtattataggcattcctataattagccatatttacaagatacaaaatatttggataaaaagcaaatttcatcacatcgtataatgtacagataagggttataaagtaaattaatttatttttagcaccattatatcaatccaaacactgcaaattaatttcttttcaaactcaaaagatagttttcattaatcatgatggcacatcctctctctcaataaaccccaatgctgttttatngggctgggngggaatagtttaccatttagtaattngattttttaaaattatgttctcaanactaggctgcattttcctcaaaaaaaaaaaaaa

SEQ ID NO: 19747 - DNA, 433 bp, Homo sapiens
  misc_feature 425: n = A,T,C or G
agtacttctagaattaattaaggcgggtggtctgaatatttacgtccccctgaaattcatcttttgaaaccgaattactaatgtgatgacgttttggaagtgattaggtcataagggtggggccctcctgaatgagatttttgccattactgaaaaggctggagagagacccttcaccccttccatcgtgaggatacagcaagaaggcaccgtctataaaccagaaagtgggccctcaatagacactgaatctgccggtgctttgatctaggacttcccagcctccaaaactgtaagaaacaaatttctgttgttgataagccattcagtttatggcgttttgttatagcagtttaaatggactgagttagtatatgaattatatttcaataaagctgttattaagtaaaggaaaaaaaaaaaanaaaaaaaa

SEQ ID NO: 19748 - DNA, 823 bp, Homo sapiens
  misc_feature 29, 31, 46, 60, 82, 90, 98, 115, 116, 123, 135, 137, 144,146, 174, 228, 241, 258, 259, 264, 265, 269, 283, 296, 327,329, 338, 346, 357, 364, 373, 378, 384, 393, 404, 405, 407,425, 441, 444, 447, 449, 453, 457, 458, 465, 470, 471: n = A,T,C or G
  misc_feature 474, 477, 480, 484, 508, 515, 516, 518, 531, 534, 545, 552,553, 555, 560, 564, 574, 577, 589, 591, 592, 597, 608, 617,626, 627, 628, 630, 632, 635, 640, 642, 665, 667, 671, 679,682, 686, 689, 693, 701, 702, 707, 708, 713, 725, 728: n = A,T,C or G
  misc_feature 735, 738, 750, 754, 760, 761, 762, 767, 768, 771, 774, 776,780, 793, 794, 795, 798: n = A,T,C or G
agtacttctagaattaattaaggcgggcntnacacaccaagacganaagaccctatgganctttaatttattaatgcgaacngtacctancaaacccncaggtcctaaactaccnnacctgcnttaaaaatttcngntggggcnanctcggaggcagaacccaacctccgagcntgtacatgctaagacttcaccagtcaaagcgaactactatactcaattgatccnataacttgaccancggaacaagttaccctnnggatnncagngctttcctattctngagtccatatcancaatagggtttacggacctcgatgttggatnanggaccatcnggaatggnccagccgtttnttaaaanggttctttngttangcgganaaagggtcntactggatctnnanttaatacccggattttgnttcaggggccggtttnttnttngntttnaaannggcgggncgggnnttnccncantccnagggaaaaataaaaaaattccccnccccccnncntcgcggggagccnccncgggtttcccntttttcnngnttttnaaanaaaaaccccnccntggggttttgcncnnaattntttaataaacnaaattcccngggaatttnnnananggncattncnaagttttttttttaattttaccncnaaanaaaccccnccntggnggnaaanaaaatttnnaaaannttganaaaaggggcccnttntaaaaanaanagggggggcccncccntgtggnnnttttnnganaantntatngggggggggggcnnncanaaaaaaaaaaaaaaaaaaaaaaaaa

SEQ ID NO: 19749 - DNA, 415 bp, Homo sapiens
agtacttctagaattaattaaggcggggagtagatgccttctagctctaagaaagaagatggatggtgattaaacatttccaagagtttgtggagtgttagaagctgagagaatgcaggcttgagatcctctcattattctttgaagccaatcaaattgtgagataaaaacctgagccagagaagcaattgggtagggcccttgggacaggagctaaaatttggaagagctgctattagaagtggcagagggagctgacgagcagaatgtagaattgctgagtggttttgagagcttggaaactataaatttgtagtggcatcggtcccatgattgttgtatttcctccagcagaagtcagcagtccacttatgagaactcaaaaaatgctgattgaaactgaaactggaggtgc

SEQ ID NO: 19750 - DNA, 447 bp, Homo sapiens
agtacttctagaattaattaaggcgggtgaatggggtggggtgcgaattatagctcactaaaactgcttcagaagacaagatgaggaggcagcactagggccagatggcagaggagcttataagtcatccctcagagacggaacttcatcctgatgatggcagcaggaagcctttgtagggactggtgtgaagggatttgctgctgggcaaggaatggaatggaggggcagaagtgggtatggagagcactggagtgagagtgagatggtaatgcggtcagaggagaaggcgcagcattgaagtcatgtccatgattagctcctgctttctcacactcactgtgttgctttgcagaagacagtttccctctttgggcctcagtctccccaccagtcacaaggctactttggaaaagtctggcaggtcctcaaaagttttaatgtaaa

SEQ ID NO: 19751 - DNA, 337 bp, Homo sapiens
  misc_feature 146, 150, 154, 155, 157, 164, 166, 168, 172, 175, 187, 190,192, 194, 198, 205, 207, 208, 213, 217, 219, 220, 224, 225,232, 236, 239, 245, 256, 261, 262, 269, 273, 280, 282, 286,287, 290, 293, 294, 297, 299, 309, 311, 315, 319, 322: n = A,T,C or G
agtacttctagaattaattaaggcgggagaatggcgtgaacctgggaggcggggcttgcagcgagccgagatcacgccactgcactccagcctgggcgacagagcaagactccgtctcaaaaaaaaaaaaaaaaattttttttttngggnaaanntnttttttntngnaaanaancttttttaaaanaancntnattncaacccncnnccttntttngnnccannaaaaatntaancanttgggnattaaaaaaantattnnaagggtntaanttttttnantttnnggnttnnaancncccttttttnantggncctnttnaaaaaaaaaaaaaaa

SEQ ID NO: 19752 - DNA, 618 bp, Homo sapiens
  misc_feature 550, 596: n = A,T,C or G
agtacttctagaattaattaaatgtttaaggaacatttcaccagaacagtatgacagtttggatggtatgtatacccaaataacttagcctttaaatatctaaacaaagcaaacagaataacaaggagaaactgacaaattctcaatgggaataggtgagtttttagcatatagtcatgcactgcataatgatgtttgagtcaacaatggactgcctatacaatgatgttcctatgagattataatggagctaatgaggataattcccatcatctaatgacatcataactatcttaatgatatagcacaacacattactcatgtatttgaggtgatgctggtgtcaacaagcctgctgcattgactgccagttgtttaaaatatagcacataccattgtttgcagtacataatacttgaaaatgataataaactagtatattgctgatttatgtatttgctatactatactttttatcattattttagagtgtacttccactgatgtaaaaacaagttaactgcaaaacaacttcaggcaggccctttangaggtattccagaagaaagcattgttatcatagaagatgacatctnccatgcatgttattgtccccaa

SEQ ID NO: 19753 - DNA, 282 bp, Homo sapiens
  misc_feature 282: n = A,T,C or G
agtacttctagaattaattaaggcaggaaaggaggctgaatcaaataaagtagtagaataaataaataaataaaagttaaaaataaaaaagccccgaagcccaggtaccttgtctttttctcctcagaacttcagttaataaacacgaaatacctggctgaggaacgcaagtccaaacctcagtgtgcaaaataacttgtataatctaaacaaactgtagtgttcttgaagacatgatagaataactttgttaaaaaaaaaaaaaaaaaaaaaaaaaaaaan

SEQ ID NO: 19754 - DNA, 799 bp, Homo sapiens
  misc_feature 43, 52, 182, 188, 189, 218, 219, 220, 229, 236, 237, 242,243, 245, 246, 251, 252, 253, 254, 260, 261, 262, 266, 277,279, 282, 286, 292, 293, 298, 305, 309, 315, 317, 318, 319,320, 321, 322, 323, 324, 326, 328, 329, 330, 333, 334: n = A,T,C or G
  misc_feature 336, 337, 338, 339, 341, 343, 346, 348, 349, 351, 352, 355,358, 359, 363, 364, 365, 375, 376, 377, 381, 382, 383, 385,386, 397, 399, 400, 403, 404, 405, 408, 409, 410, 411, 414,415, 416, 418, 421, 422, 423, 424, 425, 426, 427, 430: n = A,T,C or G
  misc_feature 440, 446, 447, 448, 452, 453, 454, 455, 464, 467, 479, 482,483, 484, 487, 490, 492, 494, 499, 502, 506, 510, 513, 514,515, 523, 524, 525, 526, 527, 534, 540, 554, 555, 556, 557,558, 559, 563, 568, 569, 571, 572, 573, 574, 575, 576: n = A,T,C or G
  misc_feature 577, 578, 581, 582, 583, 584, 585, 587, 588, 590, 591, 592,593, 594, 595, 615, 617, 618, 622, 623, 626, 627, 630, 633,634, 635, 636, 637, 638, 639, 640, 641, 642, 643, 644, 645,646, 647, 648, 649, 651, 652, 654, 655, 656, 657, 658: n = A,T,C or G
  misc_feature 661, 664, 665, 666, 674, 676, 681, 683, 686, 687, 688, 689,690, 691, 694, 695, 696, 698, 699, 700, 701, 702, 703, 704,705, 706, 707, 708, 710, 711, 712, 713, 714, 715, 716, 717,718, 719, 720, 721, 722, 723, 724, 725, 726, 727, 728: n = A,T,C or G
  misc_feature 729, 730, 731, 732, 733, 734, 735, 736, 737, 738, 739, 740,741, 742, 743, 744, 745, 746, 747, 748, 749, 750, 751, 752,753, 754, 755, 756, 757, 758, 759, 760, 761, 762, 763, 765,766, 767, 768, 769, 770, 771, 772, 773, 774, 775, 776: n = A,T,C or G
  misc_feature 777, 778, 779, 780, 781, 782, 785, 793: n = A,T,C or G
agtacttctagaattaattaaggcggggggatggaggctgtantgagccganatcatgccactgcactccagcctgggtgacggagccagatcctgccaccgcagtcattctggatgacagagtgagaccctgtctcaaaaaagaaagaaaaaaatttttttcctctgtaataaagcaatangcctannaaaaaaaaaaaaaaaaaaaaaaaaagggnnnccccccccnggggggnnccccnntnnccccnnnngggggnnntttnacccccccccntnggncggntttttnnaaaanggaaaancttnggaaanannnnnnnngntnnnaannannnnantnttncnntnnatnccnngacnnntgttggcttnnnaaannntnnaaaaccttttnannaannnggnnnnaannncnttnnnnnnnggnccccctcccncaaaannntttnnnnaaaaaaaanatngggggggcccanccnnnccnaanangntcccnggncctnaaanggnnnaacccctnnnnnggggctnaacccncccaaaggggggtnnnnnnaaanaaaannannnnnnnnaannnnnannannnnnntaataaaaaaaaaaaaaaancnncccnnggnnggngannnnnnnnnnnnnnnnncnntnnnnnttntannnggaacccncnttttncnaannnnnnttnnncnnnnnnnnnnnannnnnnnnnnnnnnnnnnnnnnnnnnnnnnnnnnnnnnnnnnnnnnnnnnnnnntnnnnnnnnnnnnnnnnnnaanaaaaaaancccccc

SEQ ID NO: 19755 - DNA, 126 bp, Homo sapiens
  misc_feature 7, 33, 34, 35, 106, 113: n = A,T,C or G
aacaaantctgggtcaccgggcccccccctcgnnnatacttctaggaattaattaaggcgggcataccaaggccaccactacaccacctgtccaaaaaggccttgnatacggnataatcctattta

SEQ ID NO: 19756 - DNA, 726 bp, Homo sapiens
  misc_feature 71, 218, 220, 221, 223, 224, 232, 241, 253, 254, 255, 256,257, 258, 260, 261, 262, 263, 267, 285, 293, 295, 307, 314,316, 324, 326, 334, 342, 344, 345, 349, 358, 363, 369, 375,379, 388, 391, 395, 400, 404, 405, 409, 411, 415, 416: n = A,T,C or G
  misc_feature 429, 448, 458, 468, 469, 474, 484, 495, 498, 506, 529, 537,538, 539, 543, 544, 553, 564, 593, 603, 623, 642, 649, 665,676, 682, 684, 686, 690, 691, 693, 697, 700, 705, 708, 711,712, 717, 724: n = A,T,C or G
agtacttctagaattaattaaggcgggcgcctgtagtcccagctactcaggaggctgaagcaagagaatcncttgaacctgggaggcagaggttgcagtgacctgagatcatgccactgcactccagcctgggcaacagggcaacagagtgagactccatcacaaaaaaaaaaaaaaaaaaaaaaaaaaaaaaaaaaaaaaaaaaaaaaaaaaaaaancnncnncccccccnggggggggncccccccccccnnnnnngnnnntttnttcccccccccccccatngggttttnanaaaataatatgnaaataananaagggtcntnttgataanccttattnanncttnatcattttnaattnattggnccctangtanaaataattnggnaccntttantggnnggcncnttcnntaacctgatttantaaaaaattcttgtaaaantgaaattaanccccttttcnnttttngaaacaaagnccttgcttaanccntattgttnttaaaaaataagccaaaaaatgntttggctnnntttnntaaaaaaanaaatttaaatngggggttgggggggggcaagggggtaaantttccaaagnttttttaattttaaaaaaanggaacctacccaatttttngtccccncggggggactttttgnggggggccccncccccntntnaaanngngacnttnggaanttnggnnttttnaaaaaangg

SEQ ID NO: 19757 - DNA, 439 bp, Homo sapiens
  misc_feature 2, 14, 32, 33, 39, 40, 42, 55, 96, 103, 107, 108, 109, 111,118, 121, 134, 136, 153, 166, 172, 178, 182, 183, 193, 207,213, 238, 249, 272, 297, 331, 388, 402, 405, 412, 415, 423,424, 428: n = A,T,C or G
gnagtacttctagnaattaattaaggcgggcnntggctnngntgaaagtatatcnttgtataaatccttttttactaaatacaaactttgaggccngccattncggnnnangtttgtnatnccgtcactttggnangcctaagcgtgcagatnacaacgtcatgangttaanaccacnctgnntaacacaatntaacctcttctctnattagnacacaaaaaacaaaaaattagctcngcttggtggcnggcgcctgtagtcccagctactngggaggctgaggcaggggaatggcntgaacctgggaggtggagcttgcagtgagccaanattgcgccactgcgctccagcctgggtgacagagtgagactccgtctcaaaaaattnaaaaaaaaaaaaanaanatttttnaanaaaatttnnaaanaaaaaaaaaaa

SEQ ID NO: 19758 - DNA, 417 bp, Homo sapiens
  misc_feature 30, 31, 41, 47, 52, 54, 59, 66, 67, 71, 73, 75, 87, 88, 105,106, 116, 118, 119, 120, 143, 144, 149, 151, 155, 167, 169,171, 172, 176, 184, 187, 191, 196, 210, 373, 381, 384, 417: n = A,T,C or G
agtacttctagaattaattaaggcgggganntaattattgnaccaantaacntnaaaanaaatgcnngcancnanaaacgagttcannatgctttttgccaaganntgagacattntnnnagaggtcaggaggagatgacttnntattntnacanatacgggatatntncnncatnaacaaganccncctnatgtncacagggaacactncactggatgcccctgccctttgccggtttcatattgcactcaggcatcacgcggggccacatgacatgccacttcttccatctattacatctctgagtctaaatgaaaatgaagagaagaccggaccttttgttgtacactggctaaacaataaagaactgcnttttactntgnccatggaagttttttttacagcacttaaaaaan

SEQ ID NO: 19759 - DNA, 405 bp, Homo sapiens
  misc_feature 103, 112: n = A,T,C or G
agtacttctagaattaattaaggcgggagactttctaaacagtttttctttcaggaattctgtagcattcccccttccctctgttaggaaccaaggacatcanaaatagcanctttaagtggcaagccggaggaactctgttagaataatccacacagtgaggcaaatatcaatctaagcattgtggatggaaggaatggtctttggagagagcatatccatctcctcctcactgcctcctaatgtcatgaggtacactgagcagaattaaacagggtagtcttaaccacactatttttagctaccttgtcaagctaatggttaaagaacacttttggtttacacttgttgggtcatagaagttgctttccgccatcacgcaataagttcgtgtgtaatcagaaa

SEQ ID NO: 19760 - DNA, 538 bp, Homo sapiens
  misc_feature 136, 216, 319, 320, 321, 331, 333, 335, 336, 337, 340, 341,342, 345, 347, 350, 351, 352, 355, 358, 361, 365, 369, 373,374, 377, 381, 382, 383, 385, 386, 392, 394, 395, 397, 404,408, 413, 414, 415, 418, 419, 424, 433, 438, 440, 441: n = A,T,C or G
  misc_feature 442, 452, 454, 455, 460, 461, 467, 471, 472, 473, 487, 489,508, 512, 515, 519: n = A,T,C or G
agtacttctagaattaattaaggcgggcatggtggctcacgcctgtgatcccagcactttgggaggccaaggcgggtggatcctttgaggtcaggagtttgagaccagcctggccaacatggtgaaaccccatctntactaaaaatacaaaaaaattagccaggcatggtgtcgcacacctgtagtccccagctactcgggaggctgaggcaaganaatcgcttgaacctgggaggcggaggttgcagtgaaccaagatcgtgccgctgcactccagcctgggcaacaagcaaaactccatctcaaaaaaaaaaaaaannngggaccaaancncnnntcnnnaananaannnagnccnttnttancaantttnnttngggnnngnncttttncnncnccttttnaaanattcnnnggnntaaanttttttttnaaaantnnnattttttccntnnccggnncaaaanttannnaaacctttaggggncngccccatttaaaaaaaaanaacntantccnttaaaattttttaaaaaaa

SEQ ID NO: 19761 - DNA, 124 bp, Homo sapiens
  misc_feature 29, 31, 34, 36, 58: n = A,T,C or G
agtacttctagaattaattaaggcggggntnatnanggaaagatttgttaatttgatnaacttctatcttaaaacttttgaattaaatcaaaaacaaagactacaatgcaatcaaacaagtcta

SEQ ID NO: 19762 - DNA, 267 bp, Homo sapiens
  misc_feature 1, 17, 25, 54, 91, 131, 246, 247, 251, 253, 254: n = A,T,C or G
ntcgagaagtccttttngaatttanttaagggcggggatcctggattcagaaantcctgtaccggtggtaataaaaaaaaaggaaatggcntggaatccttgcctcctgtggatttaaagggccattgtgnaagggaaaccaatgcagtgaaagaaaagtctttcatattagggacagaatatcattgcatcacatttatttatctttctggggtatttttatagcccttaataaaaaatattaanncccnannaaaaaaaaaaaaa

SEQ ID NO: 19763 - DNA, 193 bp, Homo sapiens
  misc_feature 146: n = A,T,C or G
agtacttctagaattaattaaggcgggtcagaggactgtaatgatagaattaaattagtgtcactaaaaactgtcccaaagtgctgcttcctaataggaattcattaacctaaaacaagatgttactattatatcgatagactatnaatgctatttctagaaaaagtctagtgccaaatttgtcttattaaat

SEQ ID NO: 19764 - DNA, 408 bp, Homo sapiens
  misc_feature 10, 11, 13, 16, 18, 39, 45, 53, 100, 101: n = A,T,C or G
agtacttctnnantgngngaaaggggggggatgagctgnacatcntttttttntttctcggctgcgagatttgggcacttttgggggtgccggtggcccnngcctatggcgcaaggttgggcaggcttctctgaggaggaactgaggagactaaagcagactaaagatccatttgaaccacagcgacgtctccccgcgaagaaaagtcgacaacaacttcagcgagaaaaagcccttgtagagcaaagccaaaaacttgggcttcaagatggatcaacctcattacttccagagcagctgctttcagcaccaaaacagagagttaacgttcaaaaaccacctttttcttcccctactcttccgagtcatttcactctcacctcccccgttggtgatggacaaccacag

SEQ ID NO: 19765 - DNA, 403 bp, Homo sapiens
  misc_feature 111, 116, 118, 127, 128, 133, 135, 142, 144, 146, 149, 150,152, 153, 160, 162, 163, 172, 180, 181, 182, 191, 192, 196,197, 198, 205, 209, 216, 221, 223, 229, 232, 245, 248, 249,252, 254, 255, 260, 263, 264, 265, 268, 270, 273, 274: n = A,T,C or G
  misc_feature 280, 282, 283, 285, 288, 289, 312, 315, 328, 333, 335, 338,347, 354, 355, 360, 364, 367, 368, 371, 380, 381, 386, 391,393: n = A,T,C or G
agtacttctagaattaattaaggcggggcttgcagtgagccggggagatcgcgccacagccctccagcctgggtgacagagcaagactctgtctcaaaaaaaaaaaaaaanttacntngaaaaaaannttttnanctgttancncnctnntnnttttttntnncttgggggnaaaacctnnnatttttttnnaaannnaaaaggnaaanttttttnaaaanantttttnaangggtcccctttgnggnnggncnnagggnctnnnccntntanncccacntnntnggnnggctgcggggggaaaaatccttngancctggaaaggggnggttntnttnacccaaaantgccccnntgccntttnccnnggnaaaaaaagnnaaacnccttntnaaaaaaaaaa

SEQ ID NO: 19766 - DNA, 627 bp, Homo sapiens
  misc_feature 19, 305, 307, 312, 333, 340, 369, 372, 375, 390, 392, 431,433, 484, 521, 546, 558, 562, 578, 592, 607, 613, 619: n = A,T,C or G
gtaccgggccccccctcgngagtacttctagaaattaattaaggcggggaacaatctacaaaatactaatgcatgtcaaacatttcctcggcttggtcataagcaatccatgtattacctcatttaatcctcacaacaaccctctaagaaaagtactattatctccccttacagaggaggaaactgaggcacagagaatgtcaccccaagcgatctatgttgaaagtacataccccggccaggcgcagtggctcacacctgtaatcccagcaccttgggaaggccgaggcgggtgggatcacctnangtcangagttcgagaaccagcctggncaagtgnaacactgttttttcttaaaaatccaaaantanccnagccttgggggatananccaaacttcctcccaaaaaaaaaaaaaaatttttttttnanggggggggggtccccaatttctttttcaaaaaaaattttggggaatgtttnaaaaaaaaattttggcccggcccaggggccccccccnttatcccccccttttggagggcccngggggggggttncaangggggggaaaaaaaanccccgggggcaaanggggaaaaccccccntttttnaaaaanaaaaaaaa

SEQ ID NO: 19767 - DNA, 327 bp, Homo sapiens
  misc_feature 151, 181, 184, 185, 194, 201, 202, 203, 205, 206, 207, 208,210, 215, 218, 219, 220, 221, 222, 223, 224, 225, 242, 243,244, 245, 246, 256, 258, 259, 264, 272, 275, 276, 279, 280,293, 299, 303, 312, 315, 320: n = A,T,C or G
gtgccgggccccccctcgagagtacttctagaattaattaaggcgggagaatcgcttagaacacgggaggtggaggttgcagtcagcagagatcgcaccactgcactccaacctgggcaacaagagtgaaactccatcaaaaaaaaaaaanccaaaaaaaaaaaaaaaaaaaaaaaaaaanggnnccccccccnggggggnnncnnnntnccccnttnnnnnnnnttttttccccccccccnnnnncccttttttnannaaagnacgtaaangannganntggggaaaggaangggganccgnaaagggaanggnaaagnaaaaggg

SEQ ID NO: 19768 - DNA, 647 bp, Homo sapiens
  misc_feature 10, 482, 510, 513, 525, 540, 542, 562, 568, 584, 621, 633: n = A,T,C or G
agagtacttntagaattaattaaggcgggagccagggcgtcagggcctgcggacgatgtgtgtgtgaaagggcgcgtcagccataagaagccatatgcgtgcgagccggtccccaccgtccccgcggcgttgtcaccatcatcatgaggccactggagcagcctcaggctctgctgccggggggccgggcgcggggtgcgtcgggctctgcaggttggcactcacacccagcgcgcaggatggcaggaatagcacatttcaaacctacaagaaagaagtgtgcctcccccgtcattcgatgcaccctggcccctgggccatctgctgtgaatgccagaccaagattcgggggccgcctgcctgtgtccagggtggaagcagcactgccttactgggtccctcttgtccctgagaccccgaaagcagcacccctgctggatgcatgctgctggcacaactgctggcggatctgcggtgatgantgcctgttgtccaaattccagcagcttncangccccctaccangaccagctaccgggntnctggaagcgcgttttgctgncccttngggcttctgaaccctncttcaaggcccattcccaaggttcattcattggccantttcgccaattntttttggggggttt

SEQ ID NO: 19769 - DNA, 458 bp, Homo sapiens
  misc_feature 3, 14, 55, 57, 58, 63, 67, 68, 74, 82, 90, 92, 96, 97, 103,117, 178, 180, 186, 189, 191, 197, 200, 203, 204, 205, 206,210, 217, 231, 232, 236, 237, 248, 251, 263, 329, 340, 359,371, 396, 403, 413, 429: n = A,T,C or G
aanctgggtaccgngccccccctcgagagtacttctagaattaattaaggcgggngnngaggntggnncctggntgctgagntcggggtnanccannatcatncctttgctctccancctgggcaacaagagtgaaactcctcagaaaaaaaaaaaaaaaaaaaaccccccccccccncncggggnggnancccccnttnccnnnntttnttatccncccccccccccccnntggnnaaaattacacnttnatagtgatattnccactctttacgtttgattacagaccgcttttgtcttttgcatcctaatggcttatttcattttangattgtattcnttctcatatatcaactaanctacactagcanaaaagtgagtgaaaataaaatgtanaaaccantaaaatccantgctcttaaataccanggaaaacagaactagtcactgcttggaat

SEQ ID NO: 19770 - DNA, 283 bp, Homo sapiens
agtacttctagaattaattaaggcgggtaggcctaggattgtgggggcaatgaatgaagcgaacagattttcgttcattttggttctcagggtttgttggctaattgaagttattaggctcagcttcagtcatgtgtaagttttgcagtgtaatacatatgtagtctggtctgtatatatgaaaatttgaattaaactgcagaatgtttatgtctagttatggtttaaattttcttagtagtatataaaaggtaagagtactgaaaaattaataaaattgcaa

SEQ ID NO: 19771 - DNA, 427 bp, Homo sapiens
agtacttctagaattaattaaggcggggaaagtcatgtcacagactctgcccacagcagccattctgaggtgccttttcagtctcttatcctcttttgagctttcctcttcttaattttttgttttgttttgttttcattgtactcattaatcccctcctcaatttttaacagaattataaaagcaaagtcaaaaggtccttcaggatgactgggaggcttcctaggataacttttgcatttgaaaatggaaaaaataaattacttgatatttgtgataagactaagatttcttaaaagtctgcacatcaatatattacctggcttaggagggtgagggcacagtatccatctgcacataatacaccctccatttttgttaccaagagaaagcttccatcaggtagctttaccaatacatttccatt

SEQ ID NO: 19772 - DNA, 318 bp, Homo sapiens
agtacttctagaattaattaaggcggggtagaaactacaaaagagataagtgaattcgaagacataagagaaaaaactatcttaaattaaacaaagagaaaaaaagactgaaataaaatgaccaaaaaataaatgtggggggacaacttcaattaaatttaaaaatatgcaatcatagctcataaatgtgggtaaaaaaagtatgtgaaatataatggctatattttcttcaaatttgattaaaactataagccaaaagatccaagtaactcaacaagctctaagtacgaaaaataaaaaaaaaaataaaaagtatga

SEQ ID NO: 19773 - DNA, 887 bp, Homo sapiens
  misc_feature 79, 86, 92, 99, 121, 122, 130, 137, 142, 143, 163, 166, 170,172, 176, 180, 185, 186, 187, 188, 189, 191, 192, 194, 195,197, 200, 201, 203, 204, 206, 208, 209, 210, 212, 213, 217,226, 227, 229, 243, 273, 294, 308, 337, 339, 348: n = A,T,C or G
  misc_feature 368, 371, 402, 408, 412, 416, 432, 433, 444, 448, 450, 451,492, 510, 518, 523, 525, 530, 543, 573, 578, 583, 584, 586,594, 600, 601, 604, 606, 615, 619, 623, 625, 634, 635, 641,645, 649, 650, 652, 655, 673, 686, 697, 699, 700, 701: n = A,T,C or G
  misc_feature 703, 710, 711, 713, 716, 718, 730, 735, 739, 746, 759, 760,764, 767, 775, 795, 796, 798, 807, 809, 814, 815, 819, 827,831, 844, 847, 850, 852, 856, 857, 859, 860, 867, 870, 874,875: n = A,T,C or G
agtacttctagaattaattaaggcgggggtggtggctcatgcctgtaatcccagcactttgggaggcagaggcgggcanatcacanattcangagatcnagaccatcctggctaacacggnnaaaccccnttctctnctagnnaaaaaaaaaaaaaaaaaaanatnctgncncccncccnggggnnnnntnnanntnccnntnnangnnngnntttnacccccccnncncagggatgggtttnaaaaacacatttcaaaacctacaagaaaanaaagttgtgcctcccccgttnatttcgaatgcaanccttggcccctggggccattcttgcttgntnaattgccanacccaaattttcggggggcncgnctgccttttgttcaggggttgggaaaacaancaattngccnttanttggggtccccttttnncccttgaaaancccncnnaaaagcaagccccccccttgccttggaatgccattgcttgnttggcaaacaaaacttgntttgggcnggaantntttcnggtgaaattaaantgccctttttttgtttcaaaaatttccaanacaanatttnnangggccccnctttanncangngaaccaaanattnaccngngtttccttnnaaaacncgantttnngnttntccccttttgggactttnttgaacctttttnttcaagggctntnnncnaaagggnntnatntnttgggccatttntcccnaatnttttttnggggttttaaaannttgnaantttttaantattttttaaaaaaaaaaanncnaaaaaattntnttctnngatnaaaaaatntttnttaaaaatcaccnatntantnaaannanntattttnaanatannttttttttttta

SEQ ID NO: 19774 - DNA, 435 bp, Homo sapiens
agtacttctagaattaattaagagcgggagctacttagggtgagcctgccttcttccattctatccgaagtctcttctaaagttgcggaattgtccatatccattagttcaggattttttgttttttagggcttcactaaagtttcaggtttctatttaacatgtaattctgtataccaaatgtaccagaaagggttatgttattcatgaaaaaaaaaagagaatagttttgtctaattcaatagttatctaaaagttggttcaaattacagatttaaaaaaggttattcataaaacaatgtagtaaggaatcattaggcaaaaaaatgtgggaaaagtttaaatcataaaatattttttaaaccctgataaagaattggagacgtttggctaattaaacattttcataaagctgttagttttgattaaagtaaa

SEQ ID NO: 19775 - DNA, 123 bp, Homo sapiens
  misc_feature 37, 43, 53, 60, 84, 89, 97, 103, 104, 110, 111, 112, 113,122: n = A,T,C or G
agtacttctagaattaattaaggcggggttatgatgnctgtgnggaaagcggntgtgcanacattcaattgttattattatgtnctacntgccaggngccaannaaaaannnnaactgaaant

SEQ ID NO: 19776 - DNA, 244 bp, Homo sapiens
  misc_feature 2, 174, 175, 181, 182, 183, 184, 186, 188, 189, 190, 192,193, 194, 202, 203, 205, 209, 210, 222, 223, 224, 225, 234: n = A,T,C or G
tnggtaccgggccccccctcgagagtacttctagaattaattaaggcggggggggagggaaaaaaaaaaaaaaaaaaaaaaaaaaaaaaaaaaaaaaaaaaaaaaaaaaaaaaaaaaaaaaaaaaaaaaaaaaaaaaaaaaaaaaaaaaaaaaaaaaaaacccccccccccccnngggggnnnncncnnncnnntttaaaanngntttnncccccccccccnnnnggggttttnaaaaaaaaaa

SEQ ID NO: 19777 - DNA, 293 bp, Homo sapiens
ctcgagagtacttctagaattaattaaggcggggtatatttttagattaaagaagactaaggagacatgaccactaaatccagtttatgatccttggctggaccctgaatccaaaagtatgatggtaatagtaatgtataaaggtcattagtgggtcagtggggaaatctgaatagggattgtatatttttagatcttacaacattatagctttgcaggagaatgtgcttgttcttaacatatacatgtatttgctggtcaagtgaagtgatgtctgcaagttaattccccaa

SEQ ID NO: 19778 - DNA, 176 bp, Homo sapiens
  misc_feature 57, 155: n = A,T,C or G
agtacttctagaattaattaaggcgggagccccaggttctggccctgtggacctgtntcgggagctgctggaggaagggaaaggagtgatcagccgtcatataaaactatttattcataaatattttccaaaatgaaaaaaaccaaaaaaatttnaaaaaaaaaaaaaaaaaaaaa

SEQ ID NO: 19779 - DNA, 495 bp, Homo sapiens
  misc_feature 1, 22, 23, 31, 34, 36, 37, 54, 55, 59, 75, 76, 83, 123, 136,138, 146, 151, 152, 158, 160, 164, 188, 211, 220, 230, 241,295, 298, 392, 440, 471, 478: n = A,T,C or G
ngagtacttctagaattaattnnggcggggnganannaagaatgaaaggatatnntacnatgaagaaaagaaaanncaaaaangactttctagacataggcaggaggccgacaagttaaaaantgaaccaatattntnaatggtanaggtnnccaacntntggnctgggggccatgatttgcctgcanagtgtgtttcatttggcccattnaatatttcntaattttggnaattcttttcncacatttaaaagttggaagatttctggatgtcctgcttctctttgaatatcatncanccacgcacagcccacgatgtctccagttcccctcttctccaccctctctatcactttacatgcgaccccagtcgctcatgtctgcgcctgtaangtacttgccgtttacaatccctggctcctaaagctctggaaacagtcnggagtggctgggaggattaccctgggttganaaaacancctgatcaaaaacttaa

SEQ ID NO: 19780 - DNA, 412 bp, Homo sapiens
  misc_feature 59, 226: n = A,T,C or G
agtacttctagaattaattaatatatatcaaaaggttaacaggggttatcagtgggcancagtatttcaggtgtttcttttttgtttttttctatttttttctccgagaaatgtggaattaaagggggaggagagggtaaagaagaaaaataaagaaattaacgttcactgggaagtgaataaggatcaagtaaaaccttatttaccctcaaggtagttattaccntctcattttgaccgatggggaaactgaggcccagagagattgcatcatgctcaaggagacatagcgactgacaggaaagatctaattccaaagcctataatcttcctgtgtcagaagattatgaacagtctattcatgttcactttcataagagagacagaaataagacaggggtaatttaatcag

SEQ ID NO: 19781 - DNA, 317 bp, Homo sapiens
  misc_feature 288, 290, 302, 303, 310, 311, 313, 316, 317: n = A,T,C or G
agtacttctagaattaattaaggcggggctgtggggtcagtatcagccgctttcagattttcatcaataaaatttccaatttcatcgggattggcagggcggggaagataccgggggacactcatgagggttggtgtaacgtcgttacgagtcacttcaggccgagcgtccaggcccctgtgcagctggctcaagtcaaagtcctggccctcttactccttcctctctcctcctccttccccattgctgtaaatatttcaacgaaatggaaaagaaaaaaaaaagacntntaaaaaaaaaannaaaaaannanaann

SEQ ID NO: 19782 - DNA, 318 bp, Homo sapiens
  misc_feature 5, 15, 16, 19, 34, 38, 213, 306: n = A,T,C or G
ccgcntttcaccccnnaanaagaggaacctatgntggntaccgggccccccctcgagagtacttctagaattaattaaggcggggcggtgatgtagagggtgatggtagatgtggcgggttttaggggctctttggtgaagagttttatggcgtcagcgaagggttgtagtagaagagcgatggtgagagctaaggtcggggcggtgatgtanagggtgatggtagatgtggcgggttttaggggctctttggtgaagagttttatggcgtcagcgaagggttgtagtagcccgtaggggcctatnaaaaaaaaaaaa

SEQ ID NO: 19783 - DNA, 422 bp, Homo sapiens
agtacttctagaattaattaaggcgggtgtgttgtttctagtaatgcatgtaaatacatcatcaatctagttgatgtcaatggattcagttaaaatgacttactttttacatattaatttaacaatgtaatatatttacttaatattttatgtgataacgtgagttacagcatggtttctcaacatgagcactactaacatttggggctactttgttgctgtggctgtcctgggcactgtagaatgtttagcagcatagctggcctctacctactacatgccagtaatacatcctcctttctccaagttgtgacaactgaaatatagcaaatgtcccccagagggtaaaatcatatcagttgaaaaccaccaagttacagttatgattacataaatcagaactgctaattaaagtaaaataa

SEQ ID NO: 19784 - DNA, 605 bp, Homo sapiens
  misc_feature 217, 296, 324, 327, 332, 339, 358, 375, 388, 396, 399, 400,422, 429, 464, 468, 469, 475, 479, 481, 484, 488, 493, 495,497, 520, 528, 531, 532, 533, 535, 537, 538, 543, 544, 545,546, 547, 548, 549, 550, 551, 552, 553, 554, 555, 556: n = A,T,C or G
  misc_feature 557, 558, 559, 560, 561, 568, 569, 570, 571, 596: n = A,T,C or G
agtacttctagaattaattaaggcgggggacgatggcgagaggggagggggagcgagttcgcatctctccttttcctggttagactctgttcaaccacattcttatgttggcagatctgcttccagattgatttttagagcaccatcactttcacattcctgattctgattttgttttgttttgtttgggttttctgaaacttaaaatgctgccccnaaaatactatatttttgagtttgtgttctgaaagcctccgtgctgctggatctttggggggaaatacaggatccttcancattgaggtgtttaaaatttgcaactancantgcanttttttntaaatattggggattttanccttttttaaaaatttntccaaaccttggnggccctgnaanntttaatgtcccaataaaacttngaatccncaaaaatgggggggggggaaaccaaaaattttttncaannaaaacngggnanttnggtnttttngntnccggggaattcccccaaaaaaanttcccccnttnnntntnnaaaannnnnnnnnnnnnnnnnnnttttttnnnnaaaaaaaaaaaaaaaaaaaaaaccnccccccccc

SEQ ID NO: 19785 - DNA, 168 bp, Homo sapiens
agtacttctagaattaattaaggcgggatggagaaaggaggtagggagagtcatccaaggaacatgagcaacatgttaaaagccaagtggtttaatttctggagatggtgaacccaagaggctctgctgggagacaacaaaaaaaaaaaaaaaaaaaaaaaaaaaaaa

SEQ ID NO: 19786 - DNA, 524 bp, Homo sapiens
  misc_feature 263, 266, 271, 272, 279, 282, 283, 284, 285, 286, 287, 288,289, 290, 291, 292, 293, 294, 295, 296, 297, 298, 299, 300,301, 302, 303, 304, 305, 306, 307, 308, 309, 310, 311, 312,313, 314, 315, 316, 317, 318, 319, 320, 321, 322, 323: n = A,T,C or G
  misc_feature 324, 325, 326, 327, 328, 329, 330, 331, 332, 333, 334, 335,336, 337, 338, 339, 340, 341, 342, 343, 344, 345, 346, 347,348, 349, 350, 351, 352, 353, 354, 355, 356, 357, 358, 359,360, 361, 362, 363, 364, 365, 366, 367, 368, 369, 370: n = A,T,C or G
  misc_feature 371, 372, 373, 374, 375, 376, 377, 378, 379, 380, 381, 382,383, 384, 385, 386, 387, 388, 389, 390, 391, 392, 393, 394,395, 396, 397, 398, 399, 400, 401, 402, 403, 404, 405, 406,407, 408, 409, 457, 467, 511, 514: n = A,T,C or G
agtacttctagaattaattaaggcgggcagatcacaaggtcaggagttcgagaccagcctggccaatatggtgaaactccgtctgtactaacaatacaaaaattagccgggcgtggtggcgggctcctgtagtcccagctactcgggaggctgaggcaggagaatcgcttgaacccgggaggcagaggttgcaatgagccaagattatgccactgcactccagcctgggcgacagagcaagactcggtctcaaaaaaaaaaanaanaaaannaaaatcnaannnnnnnnnnnnnnnnnnnnnnnnnnnnnnnnnnnnnnnnnnnnnnnnnnnnnnnnnnnnnnnnnnnnnnnnnnnnnnnnnnnnnnnnnnnnnnnnnnnnnnnnnnnnnnnnnnnnnnnnnnnnnnnntgcaagcacatcccccttttcgccagcttgggcgtaataagccaaaanaggcccgcanccgatcgcccttttcccaaacaagtttgcgccaacccttgaatnggncgaaatgggg

SEQ ID NO: 19787 - DNA, 621 bp, Homo sapiens
  misc_feature 28, 30, 33, 34, 36, 38, 60, 62, 66, 69, 79, 88, 93, 109,116, 118, 121, 126, 127, 128, 129, 132, 133, 144, 145, 146,171, 174, 176, 177, 196, 199, 203, 212, 214, 238, 240, 243,255, 256, 260, 275, 277, 281, 284, 306, 307, 309, 312: n = A,T,C or G
  misc_feature 315, 318, 321, 341, 363, 364, 372, 373, 375, 381, 406, 421,426, 427, 435, 436, 437, 452, 456, 478, 480, 499, 510, 511,516, 524, 533, 545, 551, 559, 560, 575, 588, 589, 594, 599,607: n = A,T,C or G
agtacttctagaattaattaaggggggnantgnncngngatacataaggaatttcctgtncnccanatnggaaatggantgaaacaanccctnccatgccatgtccccntgggccncnccntatgnnnnaanntttccatattnnngtgggcactcccaacctcaacactngtncnnaaggtcacacgcttgcccngtngctnaatgaatgnangcagtatcccagggcactgaacangnggnaagatgatcatnntccntctggatgataagananaaantancttttccaaatgaatgacttgnntntanccntcnatntactaaaaccttgttcctgnctggggcttttcaagtgtaatnntggggganncnctcctntaaaagttgattttaaaagctgtanggggattttaagaangaatnnggcaaccnnntattaaaaaaatggngccntttgtgaaattgccaaaccccntnttcccttttcgccaggganaaaattgcctnnttttnaaagcctnatttaaccnctttttcctaancccccnaccaaaannggaaaaaaataattngggggaggggggnnggganaaaanacaatttngggaaaaaaaaaaa

SEQ ID NO: 19788 - DNA, 591 bp, Homo sapiens
  misc_feature 95, 109, 158, 165, 170, 239, 242, 250, 271, 272, 273, 274,286, 300, 303, 309, 314, 315, 319, 321, 322, 323, 325, 331,335, 336, 338, 341, 342, 343, 353, 361, 362, 369, 385, 390,391, 392, 393, 394, 416, 417, 429, 431, 432, 434, 437: n = A,T,C or G
  misc_feature 438, 439, 441, 446, 447, 457, 461, 467, 475, 483, 492, 493,498, 499, 502, 504, 518, 521, 522, 527, 533, 553, 565, 568,571, 573, 574, 575, 577, 583: n = A,T,C or G
agtacttctagaattaattaaggcgggtggattgcctgagctcaggagttgaagaccagcctgggcaacaacggtaaaaccccgtctctactaanatacaaaaaattanccaggcatggcagcatgcacctgtagtcccagctactcgggaggcaganacagganaatcncttgatcctgaaaggcggaggttgcagtgagccgagatattgcgccactgaattccagtccgggcgacngancaagactncatctcaaaaaaaaaaaaaannnntgcccccccccnaaaaaaaaacccanggntggggnggggnncatngnnnancccctnaaanncnttnnnttgggggggntggggggnnaaaatcnttggggttttaaattnaaaannnnntggcccaagttggggggccaanncttttttggctncnncnaannnantaaanntttgaatttnattntaaaanaaagggcnggggcccnttccccctnnaattnnaancntttggggggggggncanntcccntggggnggggggttaaaaaaaacctnggccaaaaatangcnaantnnntntttttnttaaaatt

SEQ ID NO: 19789 - DNA, 369 bp, Homo sapiens
  misc_feature 23, 35, 36, 75, 90, 224, 349: n = A,T,C or G
taactctaacaggcctgggacanggcccacaattnngatatctggccccttgactttagaaacttgatgcactanaggggctaaggtgtnctcattctactaatagctccaacactctgatgggtagggccaaccaaagtgcttcatcagggtggtggcaagagggatctgtgcccacttgcatgtccctgcagccacaatggggtgcacacacattggcttangtggggtactgacaggagcatggctgtggcattcctgcatgtgctcacaccctatctactttattaaatgactgaggacctgtctctgttatatgtatatctccattaacatctttccatattgntgtaaagtgaatttcacgtt

SEQ ID NO: 19790 - DNA, 314 bp, Homo sapiens
  misc_feature 15, 16, 17, 18, 46, 50, 57, 59: n = A,T,C or G
agtacttctagaatnnnngaaggagagagggtacagggagctgtgntttntcctttncnctccaggttgggtgagagagccagatcccgtctcaaagaataacaaaagacttttaactcaagatgtcagaaaaaaaaagttttaagaaaattcagcaaggctgggtgcagtgactcacactttgggaagccgaggcaggtggatcacgaggtcaggagttcaagaccagcctggccaacatggtgaaaccccatttctactaaaaatataaaaattaacccgggtgtggtggggtgtgcctgtaatcccactac

SEQ ID NO: 19791 - DNA, 561 bp, Homo sapiens
  misc_feature 473, 477, 496, 545: n = A,T,C or G
agtacttctagaattaattaacaaataataatcatacatattcatggggtagataatgttctgatacatataatgtacagaaatcaaatcaaggtaattaacatatccattatctaaatatttatcatttctttgcgttaggaatgttcagtatcttccttccagctatttgaaactatatagtattgttaactacagtcatcctacagtggtatagaacactagaacttatttcttctatctagctgaaattttgtatccttcaacaaatttctccctatcccttccttcctcctacccttcccagcctctattatctatccccgccttaattaaggcggggcagaacgtgagggctgggcggagggcttagggatgagaaacatgtccggagggccgggggcaggacttaatcagaactaaatcactggccgggcacagtggctaacgcctgtaatcccacactttgggangccnaggcagcgggtcacctganaatcaggagttcgagaccagcctggccaacatggtgaaacccccatttnttccttaaaaattcca

SEQ ID NO: 19792 - DNA, 391 bp, Homo sapiens
  misc_feature 59, 90, 102, 104, 185, 223, 263, 285, 315, 338, 343, 352,359, 362, 373: n = A,T,C or G
cttctagaattaattaaggcgggggttattaaagaggaaatttgagccagctgattacnaacacataatcaaagcttctgagcagtccanaatgagataaangnttcagtgttttcacgaaaaactgatatacatttttcctgtgagttaatgagatcttccagaaagagaatgtaaaaattgangaacttaggacatgttgttcaatcttagggaatagacntttgaaagaaaaggaaggaacatgaggaatgaagggaacnaatgagaaacatgtgcctgctntcaacttatagttggggaagcaaattggtnaacattggcgaattttatggggntcttngatgacccnccttctnaangctttctttgntaaatttgggaaattttt

SEQ ID NO: 19793 - DNA, 404 bp, Homo sapiens
agtacttctagaattaattaaggcggggggaatgttcttttaaaagcagaacttatttctaaaagtaccaatacttaacgatactaataataattttgcatataactatttctcagatgtattacatgttttttggtcacattatctatataacagaaatattttacattttcctaatatttaagcattatcaaaatggattattttgtgccacgtggctgggtgctaatcttgactctgtgacttcctagctctgggatcctggtaaaattacctctctgtgtctcagtttcttcatctgtaaaatgaagagaacaatagtacctatttcacagaatagttgaagattaaatgagttaatagtaataaagtgattaaatcatttctggcacatacttttacac

SEQ ID NO: 19794 - DNA, 194 bp, Homo sapiens
agtacttctagaattaattaaggcggggtaataaacttagagcttagagttttttagtatttccttgtactgaccaaagttaaggtgtaatcagtttaaagtaacttattataaaacacttttttaaagccttataaccacaaagcaaaaactcataatacattaatatcaaagcccaaaaaaaaaaaaaaaaa

SEQ ID NO: 19795 - DNA, 415 bp, Homo sapiens
agtacttctagaattaattaaggcggggaggagaaactgctgttcaaaaaagtcaatatcctgaaaggctgtgggaaacttccagactacaaaaagctagagacatgataactaaatacatttcctgaccctagactggatcctgtgctggaagggaaaattctagaaaggacattatatggtcaactcccaaaattagaatatggacaggttagaaaaaagtactgcatcaatgtaaatttgtgaaagtggtaaccgtattactgtggttatttaagagaatatgcctattcttaggaaatacacattcaagaatttaggattaagtggctacagtgtatgtaatcttccctgaaatctcaaagggtttggaaaaatattgtatgtctgtatatttgcatttgttagcccatgt

SEQ ID NO: 19796 - DNA, 339 bp, Homo sapiens
  misc_feature 52, 143, 144, 148, 157, 158, 159, 162, 167, 170, 172, 175,176, 182, 186, 189, 215, 217, 220, 226, 227, 231, 232, 234,239, 241, 246, 253, 257, 263, 269, 274, 276, 277, 278, 280,289, 293, 294, 295, 296, 297, 302, 312, 328: n = A,T,C or G
agtacttctagaattaattaaggcgggggaattgcttgaacctgagaggcanaggttgcagtgagccaagatcgcaccactgcactccagcctggtgatagagtaagactgtctcaaaaaaaaaaaaaaaaaatttaaaaaanncccnccttaaatnnncancttcnttngnaanncaaaancccnttnttaaaaatttttttaaaggggaaaantnccncctttnntttnntntttantncaaanggttttnggcnaaaaangggggntaaancnnntnttttttttnggtnnnnngcccncaatttttanttcccggggatttttnttttttttttt

SEQ ID NO: 19797 - DNA, 413 bp, Homo sapiens
  misc_feature 340, 342, 353, 370, 384, 402: n = A,T,C or G
agtacttctagaattaattaaggcgggagaggatcaggaaaaataactaatggttactaggcttaatacctgggcgatgaaataatctgtacaacaaacccccatgacacgtttacctatgtaacaaaactgcacatgtacccctgaacttaaaagttaaaatacacacacaaacacacacatgcatgtgcacgtgcgcacacacacacacacacacacacacacacacacacacacatatatatgtgtgtttgtccaaaatctctcattgttttctgtgggagggctggtctcatataactactccttttttaattgaaatggaactcacaaaactcananacagtagttgngtataacaaaaatgaangctttcaaaaggtnttgtacagttttcttatncacaaaagaaa

SEQ ID NO: 19798 - DNA, 512 bp, Homo sapiens
  misc_feature 51, 53, 55, 83, 85, 90, 103, 106, 133, 139, 189, 195, 198,202, 203, 204, 208, 209, 210, 211, 212, 213, 214, 223, 224,245, 246, 252, 253, 259, 268, 269, 275, 276, 281, 284, 289,436, 476, 490: n = A,T,C or G
taccgggccccccctcgagagtacttctagaattaattaaggcgggggacngntncaacacacagtgcctcaagctggcctancngcctncaacacactacgncanaaggacccgggtctttgaaactgtgtnttgaanctaatgtattaatgtgacatggaggaactcaataaaactcctgcttaaanatatgnaanaaannnaaannnnnnnccccccccnngggggaacaccccattctccnnaagganntaacantcccccccnnttatgnncccanttncaaanctttaaaatatatgggctgggtgcagtggctcatgcctgtaatcccagcactctgggaggctaagctgggcggatcacgaggtcagatcgagaccatccttgccaacatggtgaaaccctgtctccaccaaaaatacaaaaaattanctgggcgtggtggtgggcgcctgcagtcccagcttattcnggaggctgaggcangaaaatggcgtgaacctgggag

SEQ ID NO: 19799 - DNA, 300 bp, Homo sapiens
  misc_feature 260, 262, 284, 285: n = A,T,C or G
agtacttctagaattaattaaggcggggagaaatcaataggaattattcaatttgaagaacaaagagaaaaaaggttttaaaaagttaacgtattatcactgacctgtggaacaatgctatgagtctagcatatctgtatttgctatttcagaaaaagaggagagaaataatggagcagaaaataatttgaaaatatacttgctaaaaaattctcatttttgtgacaataattgatttttatatccacaaattttagganancaaacaaataaataaaaaaatnnaaaaaaaagcggccg

SEQ ID NO: 19800 - DNA, 443 bp, Homo sapiens
  misc_feature 414, 415, 416, 417, 418, 419, 420, 421, 424, 425, 426, 427,428, 429, 430, 431, 432, 433, 434, 435, 436, 437, 438, 440,441, 442, 443: n = A,T,C or G
agtacttctagaattaattaaggcggggagtcagtgatttaaggatatattttggaggtaaagtaaaaaggaattcctgatagatcctggggaaagggaaagcaaagaatcaaggataactttcataacccaagttgggcagatgggaatgccatcttctaagacagaaaaaaaacttggagaagaggtgattggtgggcttttggggtaattaagagttctcttttgaacaagttgagtttaagatgtttattaagcatccaagtaagggtgtcacataggcagctacagttctcgagagaggttatattttaaatagccatgtggcatagtgaaacccaacacattgttttatcaattccaagacagaatttttcaacaactgcttctttttgattctgtataaaagactgnnnnnnnnaannnnnnnnnnnnnnnannnn

SEQ ID NO: 19801 - DNA, 286 bp, Homo sapiens
  misc_feature 6, 17, 21, 26, 27, 30, 31, 55, 57, 66, 72, 79, 109, 116,135, 138, 153, 182, 189, 204, 210, 212, 224, 227, 237, 238,244, 250, 263, 274, 278: n = A,T,C or G
tgggtnccgggcccccnttcnagagnnctnntagaattaattaaggcggggcgangntttgcaccntaatcnttaaagntgcaatatattttaagcattttaaccttgntttaganctgaacagcaggagaaggnttncagataagaaacaanggagcaaaagcaaacaatattcaataccnagagganggggcaaagacaganaaaagnanaacttttggttnccnaaaaaaaacnnaacctncatccntggagcggaaatngggggagggangggnaacaagga

SEQ ID NO: 19802 - DNA, 443 bp, Homo sapiens
agtacttctagaattaattaaggcgggtttgatcttctagccagaccattacaacttcctccatcttagcgataatgctgttccactttcttatcattcatgtgttcagtggagtagcactttcaactttcttcaagaatgtttccttcgcaatcacaacttgactgtttgggacaagaggcctagtatttggcctacctctgctttcaacacgccttcctcactaagcttaataatttctagttctttttatttaaagtgagagatgtgcaaatcttccttatacttgaacacttacaggccattataaagttattaattggcctaatttcaatattgctatgtctcagggaataaggaagcccatggagaggaaactagggaagagctggctggtggagcagtcaaaacacacacattattatataagtttaccattttac

SEQ ID NO: 19803 - DNA, 585 bp, Homo sapiens
  misc_feature 477, 488, 513, 544, 559, 570: n = A,T,C or G
agtacttctagaattaattaaggcgggcacctgtagtcccagctactcgggaggctgagacaggagaattgcttgaacccgggaggcagaggttgctgtgagctgagatcgggcaattgcactccagcctatacaacaagagcgaaactctgtaacaaaaaaaagggggtgtggggggagaatacaaagataaaaagaaaaaaagtaagaaaaaatgggaaaatttgggaaaaaagagaaaaaaataaaatcagtaaggacgttgcttaaccaatcaagttcaatcaactatatatgtcatctgtagacgaattaatccaataacagcagaatgcatacacttctcaagcttgcctagaataggccccaagatagatcacaccctaggtcatatgacacactttaaaacattttataaataggaatcatactatgtctgctctcataccacaatggaaattatacttccaattaatnaaagaaagctngaaaatacttcccaatgccttgaanattaaaaccaatgtacatttttaaagttacnccattaggtcccaanaaaaaaattcncaaaaaaaaaaattt

SEQ ID NO: 19804 - DNA, 483 bp, Homo sapiens
  misc_feature 233, 482: n = A,T,C or G
gggtgccgggccccccctcgagagtacttctagaattaattaaggtgggacatcatggctgagcttgctcttgggtaatttagcaaaagttatttgctgtaagtttgatattatttcaaaataaaacgaaggtcataagggactattataaacagctttataccaatatttttgaaattttagatgagatgacaaattcctaggagaaaaaattatctacattgatataagcnataaaaaatagtatatccaatagctagtagaaaaaaatccaacccatagtttaaaaccttcctaacaaagaaaactcaagaacagatgtctacctgtaaattcttccaaacattagaaaaaaataccaatctgatagaaattcttcctgagaatagaaaaaaatgagaacagcacccaaactattgtatgagggtcatcataactttgatatcaaagccagtccaggacattaagaggaaagaaaaatnc

SEQ ID NO: 19805 - DNA, 413 bp, Homo sapiens
  misc_feature 4, 289, 293, 294, 297, 298, 301, 302, 304, 306, 307, 316,317, 323, 331, 332, 335, 336, 339, 344, 350, 355, 356, 357,360, 361, 364, 369, 372, 378, 387, 388, 400: n = A,T,C or G
ggtnccgggccccccctcgagagtacttctagaattaattaaggcgggcagatcacgaggtcaggagatcgagaccatcctggctgacacggcgaaaccccgtctctactaaaaatagaaaaaattagcccggcgtggtggcgggtgcctgtagtcccagctactctggaggctgacgcaggagaatggcgtgaacccgggaggcggagcttgcagtgagctgagatcgcgccactgcactccagcctgggggacagagcgagactctgcctcaaaaaaaaaaaaaaancttnnccnnggnncntnncccttttanncccacnttttgggnnggnnaanggggncccttnttttnnnccnnggntttgnaanccaccntgggaaacnnggaaaactcccntttttccaaattt

SEQ ID NO: 19806 - DNA, 467 bp, Homo sapiens
  misc_feature 393, 434: n = A,T,C or G
gtgccgggccccccctcgagagtacttctagaattaattaaggcgggggaagggaggggtctgaacaataccatagtagggctggttcagtcataggctaaggctgggtcaaggaaagcttggttcttgaaagtcttaaagcagagctaaaggcagtgcatgtgtaagagtagtattcctggccggacacactggctcatgcccgtaatcccaacactttgggaggccgaggcgggtggatcacacggtcaggagtggatcacagggtcaggagattgagaccatcctggccaacatggtgaaacccctgtctctactaaaatacaaaaaaaattagccaggcatggtgatgtgtgcctgtattcccagctacttgggaggctgaggcagganaatcgcttgaatccatgaggcaaaagttgcagtgagctganattgtgccactgcaatccactctgtctcaaaaa

SEQ ID NO: 19807 - DNA, 428 bp, Homo sapiens
  misc_feature 57, 66, 127, 175, 332, 343: n = A,T,C or G
agtacttctagaattaattaaggcggggtaagatttgccgagttccttttacttttnttaaccttnccttatgagcatgcctgtgttgggtttctgtgatggtgagaataatggacatggggaagtngcatctttccctggcccattgaaagaagagaatctgttaaatgttccnaagccactgccaaaacaactgtgggagaccaaggaggtgggtgaacagtactcagctatgtttgttgtcactgaatgtttgtacttagaggtcattgaaaaatcctgcagaggtgaaagcaagaggaactgggggaaaaggagaagatttgtctganaacagagatangaatatacaagggaaggacgcttcaagtaaaaattatcgcgcttgtgtcaatgaattaacacattgatctcttggcttactaatt

SEQ ID NO: 19808 - DNA, 469 bp, Homo sapiens
agtacttctagaattaattaaggcgggggaaacaatataagaaagaagttgaagcaaaacaacttgaaccaactattcaatcactagagatgaaaccgaagactacaagaaatactccaaatcagataaataaatctttggattttcataatcaggaagaaatgaaagatctgatggatgaaaattgcattttgaagacagatattgctatactccgacaggaaatacgcacaatgaaaaatgacaacctggaaaaagaaaataaatatcttaaggaccgttaaaattgttaaaaaaacaaacgctgcccttgaaaagtatataaaactcaatgaggaattgataacaagaacagcattccggtatcaacaagagcttaatgatctcaaagctgagaatacaaggctcaattcccaactgttgaaggaagaagaaagcaacaaaagactggaagctgaaattgaatcat

SEQ ID NO: 19809 - DNA, 383 bp, Homo sapiens
  misc_feature 38, 47, 50, 62, 86, 88, 100, 101, 103, 123, 132, 139, 153,157, 170, 172, 187, 189, 190, 227, 229, 235, 236, 237, 242,252, 253, 254, 255, 263, 269, 270, 271, 285, 290, 304, 310,311, 312, 314, 317, 318, 319, 325, 330, 335, 337: n = A,T,C or G
agtacttctagaattaattaaggcgggagaagggtaanttacagggngtncattttatcatncttgaaatgttaactaaaaatttnangacaaaatatgnnanccttgtataacatgcagatnattgcttanaacttgnatatactttaaaanggcncacataaagtatncnaacatttcaaaattntnntggaaataacttagacatttattatccctaagacaanantagctnnnaacancaaaaaggannnncccccccngggggnnngccggggacccccnttgangggggagtgaaaancccccnnntnggnnngtttantgccntcatntnatgataaaagggccaatccagcaagaggatataaaaattccaaata

SEQ ID NO: 19810 - DNA, 684 bp, Homo sapiens
  misc_feature 469, 501, 558, 559, 560, 561, 562, 563, 564, 565, 566, 567,568, 569, 570, 571, 572, 573, 574, 575, 576, 577, 578, 580,582, 584, 591, 592, 608, 611, 616, 617, 627, 632, 641, 643,645, 646, 652, 658: n = A,T,C or G
taccgggccccccctcgagagtacttctagaattaattaaggcggggagggaaagcattaggagatatacccaatgtaaatgacgagttaatgggtgcagcacaccaacgtggcacatgtatatatatgtaacaaacctgcacgttgtgcacatgtaccctagaacttaaagtataataaaaataaaaaaattaaaattaaaaaataaaaaataaattttgatttagatcatagaaaacactactcttgtttatgacttaaagattatatagatcaggcttggtggctcatgcctgtaatccagcattttgggaggccgaggtgggtggatcacctgaggtgaagaattcgagaccagcctggccaacatggtggaaccccgtctctactaaaaatacaaaagttagccgggcatggtggtgcgcgcctataatcccactacttgggaggcttgaagccaggaaaatcncttgaacctgggaagcaaaagtttgtggtganctgaaatcgcccctggacgccaaccttgggaacagaacgaagactccatcttcaaannnnnnnnnnnnnnnnnnnnnanananaaaagcnncccccccccggggggnggnacccnntttgcccccnttttnggggggggntntnnaacccncccccntttttggggggtttttttttaaaaaa

SEQ ID NO: 19811 - DNA, 172 bp, Homo sapiens
  misc_feature 3, 12, 14, 15, 19, 20, 21, 22, 27, 37, 38, 39, 40, 50, 57,86, 103, 113, 123, 146: n = A,T,C or G
tanaggaaacanannctgnnnnccggnccccccctcnnnngtacttctanataaatnaaggcgggagtggtaggaatgaaacaatnaggaagaaagatagaanttagaagtgnaaaaactggnaagacagaagtacgggaaaggcntaaaaaaggaatagagaaagataggg

SEQ ID NO: 19812 - DNA, 566 bp, Homo sapiens
  misc_feature 40, 41, 50, 52, 55, 56, 58, 61, 62, 64, 65, 66, 68, 70, 77,79, 82, 87, 90, 107, 112, 113, 114, 116, 120, 131, 152,168, 169, 174, 184, 188, 194, 197, 200, 204, 207, 209, 214,217, 222, 225, 233, 288, 291, 292, 302, 303, 307, 314: n = A,T,C or G
  misc_feature 318, 322, 463, 485, 486, 505, 536, 543: n = A,T,C or G
agtacttctagaattaattaaggcgggcggatcactagtnnacgaatttnanacnncnctnncnnncntnttgaaancngcnctctnctnaaaatacatacgattanctggnnntngtgncgcacacctcntatctcatctatttctgaggntgatgcaggagaatannttgancctggcacgnagangttgcnttnaantganatnangccantgnactcnagnctgggcancagacagagactgcgtatccgataaaataaaacttgaaagaattatttgcccggntgnngctcacatgnnaaangaaaatntggntctnccctggagctggcctccgcgtgtttccttatcatggttggtcaatttggaggtgtttaatttgaaatggatttaaggaacaccttagaacactggttaaggcatttatttttcttgggacatttattttcttgggcatgtntttccaaggggttgttttcccnnaagggggattgggcatgcnaatccgggttgggacttggagtgggaaaaanaaccctnacccttttaatttgggggggggc

SEQ ID NO: 19813 - DNA, 471 bp, Homo sapiens
  misc_feature 3, 38, 81, 91, 141, 167, 221, 229, 233, 234, 247, 248, 249,250, 259, 269, 274, 275, 280, 291, 306, 308, 312, 313, 321,329, 335, 342, 376, 394, 396, 398, 406, 418, 420, 425, 432,443, 446: n = A,T,C or G
gtnccgggccccccctcgagagtacttctagaattaantaaaaagtttcaaatctagacactaaatgtgtgtgaatgtacnaagaaaacanaccattgcttatgctgttatatactaaagaaattttgttttgcttgctgntttaacttgacagatgaaggactttngttgaacttcatattgtaagaactgttaataaaggttgtcaagttaaaagcctnataaaaanaganngacaaaacaaacnnnnccccccccngggggggccncccannccccnttttggggatnttttaagcccccccnangggnnggtttttnaaaaaatnaatggnttttgcncaaaacccccaggaaagtccccgggggctccatnccggactttacaacagantngnctttaccncaaacctacggntnggccngaaaaanatcctcatatnggncagggtcgctttcaaaaaggggaag

SEQ ID NO: 19814 - DNA, 168 bp, Homo sapiens
  misc_feature 1, 4, 6, 7, 34, 43, 46, 49, 52, 55, 58, 61, 63, 65, 75, 79,107, 123, 133, 168: n = A,T,C or G
ncgngnntacttctagaattaattaaggcggggnagcgggggnagnagnagnagnagnagnananagaaattagnaagntaaaaacatacttttagaagaaaaaagnataaatttaaacctgnaaaagtaggnaagcaaaaaaaaaaaaaaaaaaaaaaaaaaaaaan

SEQ ID NO: 19815 - DNA, 667 bp, Homo sapiens
  misc_feature 8, 34, 48, 107, 174, 176, 181, 196, 213, 216, 218, 222, 225,232, 233, 236, 238, 242, 243, 245, 249, 253, 275, 287, 289,291, 296, 297, 302, 321, 324, 334, 338, 340, 342, 343, 348,349, 362, 395, 397, 404, 407, 410, 415, 422, 429: n = A,T,C or G
  misc_feature 438, 439, 441, 445, 449, 453, 461, 473, 553, 572, 588, 613,620, 624, 642, 643: n = A,T,C or G
agtacttntagaattaattaaggcgggtgatcanagagcatactctgnctgattttttaactatattaaaactttttttaatggcctaacgtaggtttatcctgganaatgttccatgtgcacttgagaaaaacatgtattctgctgctgttggagtagactataaatgtctantngattntggtattttcaagtntaccatttccttgttanctntnaccngtntattatnnaananaaanngntgantggnggcttgtgcctataatcccagnactttggaaggncnangcggnnggatnatttcctcctaagaagttnaanaccaacctgngcancntnntgagnncctgtctctccgngtcaacaagagctttaatgatctcaaagctggnanccccccnctnggnggccnactgttncccgaanaagaaagcnncntaanaccngccnctggaaangggaattatcantctagactgactgctgctataaagtaagcacaagtgaaaggtgtgaaaacagaaaagaaacctaaaacttgcattagagngaacacaagatgtttcccnaccaagtaaaaatganttctgatatttccccaaagtagaanaaatgantttnttactggaacaacttttnntaaaaagccaaattaaattccaat

SEQ ID NO: 19816 - DNA, 236 bp, Homo sapiens
  misc_feature 47: n = A,T,C or G
agtacttctagaattaattaaggcgggatgttaaggttgggtctgcncctactcagggttcctttagcttgatactgctggtcttttggactggcaaactctttgttgcattatagaatgttagccagcatctctgaggtctatccattacatactagtagcaccctggtccctaagttgtgacaactaacaatgtctctaagaccttgccaaatgtcccctgggagtgggggcag

SEQ ID NO: 19817 - DNA, 107 bp, Homo sapiens
  misc_feature 4, 15, 43, 53, 89, 93, 105: n = A,T,C or G
cctngagagtacttntagaattaattaaggcgggggaggctcnatcttccatnattttccacagatagaattgaacatatatcaatctngaanttctaaaattanca

SEQ ID NO: 19818 - DNA, 126 bp, Homo sapiens
agtacttctagaattaattaaggcgggtgtgctcttttagctgttcttaggtagctcgtcagatttgatgatttcctagcaggacttacagaaataaagagctatcatgctgtggtttaaaaaaaa

SEQ ID NO: 19819 - DNA, 461 bp, Homo sapiens
  misc_feature 23, 24, 26, 30, 32, 33, 44, 46, 50, 52, 53, 54, 58, 67, 70,83, 87, 89, 92, 95, 111, 112, 119, 128, 136, 139, 142, 154,162, 163, 167, 176, 322, 357: n = A,T,C or G
agtacttctagaattaattaagnngncgtngnntatgtggagananaaancnnncaanaaagagtcnaanggcccgcactcantggncnaantgntacacaaacagggaannaatccgnaactatgcnatgttacnaancantcatgctcaatnctgagccnngagncctgctccngtggtgaatgatacattaattcagactaatctttgggggctttattttgtaagttagaactttcaagggaaacatgttcaacactattattttgttataaatttataactttgttattacattgtgtaacaaatataaggtttacngagctatgagaattggtgctatcaccattagctanttgctgtaatgtcaagaaaaatgttcaccagatgcaagaaatgtaccttttcttttttagaaagccaaaatgtactttagacatgaaatgcaactattttaaag

SEQ ID NO: 19820 - DNA, 277 bp, Homo sapiens
  misc_feature 34, 47, 49, 69, 153, 157, 168, 174, 180, 184, 186, 188, 190,193, 199, 201, 203, 204, 206, 208, 216, 218, 220, 222, 223,229, 232, 233, 246, 249, 250, 251, 258, 261, 263, 267: n = A,T,C or G
agtacttatagaattaattaaggcgggcctgtantcccagctaatcngnaggctgaggcaggacaatcnattgaacccgggaggcagaggttgcagggagatcgtaccattgccagcccgggcaacaagatcaagactccatctcaaaaaaanaaangggaaaaaatngtttangggggnaaantngntnaancccggnantnnangncccccctnantngnntttttnccnntgttttccacccnggnnnacggggnggntntttnaaaaaaaaaa

SEQ ID NO: 19821 - DNA, 433 bp, Homo sapiens
  misc_feature 379, 382, 389, 398, 402, 403, 404, 406, 413, 414, 415: n = A,T,C or G
agtacttctagaattaattaaggcgggtggatcacgaggtcaggagatcgagaccatcctggctaacatggtgaaaccccgtctctactaaaaatacaaaaaattagccaggcgtggtggcacgcacctgtcccagctactcagaaggctgaggcagaatggcatgaacccgggaggcggagcttgcagtgagctgagatggcaccactgcactccagcctgggtgacagagcgagactccatctcaaaaaagaaaaaaaagaactaataaccatttaatagcccatgtttttctatcagctccttccaccaacaagtttctgcaaatgacttaagacaactgtaggtctaaaatataaaagacccataaacaccaaanaanaaaaaanaaaaaaaanaaannnanggaatannnaaaaaaaaaaaaaaaaaa

SEQ ID NO: 19822 - DNA, 203 bp, Homo sapiens
  misc_feature 7, 10, 25, 28, 37, 38, 43, 55, 74, 99, 103, 131, 135, 159: n = A,T,C or G
tggccgncgntttacatcccggaanaantggtaccanngctgngtgccgggcccnccctcgagagtacttctanaattaattaaggcggggtaaaacantctnactcaggtttttaaagtactgttgtttngctnctgtgttggaattaaacaataatnatgcacaggcagaaggaaaacaattaggagcctactggaatagt

SEQ ID NO: 19823 - DNA, 226 bp, Homo sapiens
agtacttctagaattaattaaggcgggggagaatgttttcatgttacttatactaacattagttcttctatagggtgatagattggtccaattgggtgtgaggagttcagttatatgtttgggtttgacaggtagtgacgtgtagtttgacactgttaacttgttaaatacagtgaaaagtttgtgagtgaagaatgctgagaagattgtaatgctttgtacaaat

SEQ ID NO: 19824 - DNA, 537 bp, Homo sapiens
  misc_feature 30, 36, 37, 39, 51, 53, 55, 71, 76, 89, 90, 96, 102, 109,197, 217, 248, 250, 266, 304, 308, 313, 314, 315, 316, 318,330, 346, 347, 355, 360, 361, 363, 379, 382, 385, 386, 394,398, 399, 403, 406, 416, 422, 428, 441, 450, 452, 458: n = A,T,C or G
  misc_feature 464, 465, 488, 503, 512, 516, 517, 518, 523, 524: n = A,T,C or G
agtacttctagaattaattaaggcggggcncagtgnntnacacctgtaatntnantactatgggaggccanggcanaaggattgcttgnncccaanaactcnacatcancctggacaacatggcaaaatcctgtctctacaaaacatacaaaacttagctgggcagtggtggcatgtgcctgtggtcttagctaccncgggaagctgaggtgggaanaccacttcagcctgtgaggtggagactgcantnagccaagatcacgccnctgcactccaacctgggtgacagagcgagattgcctcngatngaaannnnanctatggattttnttttttgccaaaaaannaatgtganataannanttatatgtgaatgtgnggnaanncaacattngggnngggnatnattttttccnaaaaanttaaanggcttctgttttntttaaatananaaaatngtgacnntttttaaaaaaaaaaaaaaaaantcccccaaaccaaanggggggaanaaannnccccnncccccccccgggg

SEQ ID NO: 19825 - DNA, 416 bp, Homo sapiens
  misc_feature 19: n = A,T,C or G
agtacttctagaattaatnaaggcgggcaaatgctcacaaagacctacgaagctgttatctctcatgtctgctttacctccaagcactgcacaagcaggaagaaaagaaaacagcaaagttgtaatctttctggctaagtaaacccaactgcaagaactagtagatttatatttgatgtgagcaggcatttgagaaaatctctgtcaaatagctagctcacatgaagctaataaagcagagatttttattgctaaacacgacaaaaggatgatattttaaaaataattttgaaaactcaccaaacaaacaagtaaaatttacaataagcaacaaaaaaaacccaacgggatgagagagaatattatttcagggttgttgtaatagaaaaagtctagttttcagcaacagcaatgaa

SEQ ID NO: 19826 - DNA, 603 bp, Homo sapiens
agtacttctagaattaattaaggcggggtgcagtggctcacggctgtaatcccagcacttcagaaggccaaggcaggcagatcatgaggtcaggagtttgataccggcctggccaacatggtgaaaccccatctatactaaaaatacaaaaatcagccaggcgtggtggcgggtgcctgtaatcccaactactcggaaggctgaggcatgagaatcacccgaaaccagaaggcagaggttggagtgagccgagatcgcactactgcactccagcctgggcaaaagagtgaaactccatctcaaaaaaagagaaagaaacagaaacttctccttatataggggttttcacattcttaggatttttctcctggtcgccccccgccaacaaattactgtcttcttgaagataagtttctccttgaaaaataaaagctcgtagaatttatccatataagaacaaaagattcaggcagtatctaacctagtaggttactatgctatcgctacatctgtttgtctacgacaaaatccttacttaattctaacagtaacttgagtttttcagaaatgcataatagaaaatattctatttattctaaataa

SEQ ID NO: 19827 - DNA, 484 bp, Homo sapiens
  misc_feature 52, 71, 82, 86, 93, 96, 102, 103, 105, 108, 116, 164, 170,189, 197, 200, 208, 210, 211, 218, 219, 231, 253, 259, 282,284, 285, 286, 287, 288, 293, 294, 295, 301, 302, 306, 313,315, 316, 317, 326, 328, 347, 359, 360, 369, 374, 415: n = A,T,C or G
  misc_feature 416, 423, 424, 428, 450, 468, 470: n = A,T,C or G
gggtgccgggccccccctcgagagtacttatagaattaattaaggcgggcgnatgacttgagggaacaagntcaagaccagnctgnctttacnaanaatacnnanatnatcaggcntggtggcacacgccttcagaccagctactcgggaggctaatgcagganaatcgnttgaacccgggagacagantttgcagnganctgagatngnnccactgnnccctggcctgancaacaaagcgagaccccttctntgacanaaaaaaaaaaaagtagctcttcntnnnnnccccnnngggggnnggtncgtttcncnnnccagggggncntttattcccccccccttancctatgtttttnnccaaagctntatgngaaagcttcattactgtggtggagtttgggccatttcacannaaaagtnntcanggaaattcgatctccgtgaaancccccgcaaagggaaccngnaacacccccccacc

SEQ ID NO: 19828 - DNA, 276 bp, Homo sapiens
  misc_feature 152, 153, 156, 161, 172, 179, 181, 191, 197, 199, 200, 222,246, 247, 254, 257, 270: n = A,T,C or G
tacccgggccccccctcgagagtacttctagaattaattaaggcggggggaggtgtattgaagtcctccagacaaccctcagatttgatgatttcctagtagaactcacagaaataaagagctgttatactgtgaaaaaaaaaaaaaaaatnnaanatgcnataaaaaaaanaaaatantncaaaccaagngagcantnncaaaattcttaagaatcttaantatcataaatttcagcaagaacannttctctnaanttatttaaaaaanaaaaaa

SEQ ID NO: 19829 - DNA, 399 bp, Homo sapiens
  misc_feature 33, 37, 40, 42, 44, 45, 47, 50, 51, 53, 57, 61, 75, 76, 92,103, 104, 114, 117, 123, 144, 146, 165, 216, 230, 255, 390,391: n = A,T,C or G
agtacttctagaattaattaaggcgggcgcctnttcnaantncnncnggnnangatnaatngcagaccacgctannccatctaggtgtcacnaatgaaatggnnctaatcactnagntgcacncttggatggtatggataacangnactctccatctttacctgntcctggaactgaaaaactgtaacttgtgtgaaaatgagcctttggaccagnctttattaaaacanacaaacatgagtagtctgcatatcnaatatctagagctctaaaccccccaatacttaaaagtctaattgctgtcctgtggtttcattagtctgataggaagatagggatttcctcagtcacagatgatattttgaaggaaagctgcaataaagccaaaannaaaaaaaa

SEQ ID NO: 19830 - DNA, 432 bp, Homo sapiens
  misc_feature 34, 36, 37, 40, 43, 54, 59, 88, 98, 106, 109, 118, 130, 133,150, 152, 162, 170, 191, 195, 196, 197, 198, 204, 205, 218: n = A,T,C or G
agtacttctagaattaattaaggcgggagcgccnannccnagncccaatgctantggtnacttcgttaatggtagggtaggaaaaccnagaggtcatncatgattnctnaagttttcnactttgataacnaanaaaaggtaatttttttncnttattgcaanaataacantaataaaattttattactggncggnnnntctttnnctgctaaaacacnaatgaacagttttccagtattcccctccagccctttgacttaagatactttttaatcacaagtgaacagaaaagaacaatcaaaaaagccctacttattggtattagtgaagaaacaaagctacctgaattgggaattactttaaaactgcactgtagtgtattttagttacataaagtaattaaaattaatgtttagaaaaaagtcttagtcc

SEQ ID NO: 19831 - DNA, 779 bp, Homo sapiens
  misc_feature 74, 197, 198, 199, 201, 202, 217, 218, 223, 227, 234, 235,236, 240, 242, 243, 248, 257, 258, 260, 263, 265, 266, 272,279, 285, 288, 303, 304, 318, 320, 324, 346, 355, 362, 363,364, 365, 366, 381, 386, 392, 394, 397, 407, 417, 421: n = A,T,C or G
  misc_feature 434, 438, 447, 454, 455, 464, 465, 466, 467, 480, 484, 488,489, 497, 500, 501, 503, 504, 506, 507, 509, 514, 515, 517,518, 520, 521, 522, 535, 540, 544, 546, 557, 558, 561, 570,572, 575, 576, 578, 587, 599, 602, 605, 617, 628, 629: n = A,T,C or G
  misc_feature 635, 642, 644, 645, 663, 665, 667, 670, 673, 677, 686, 693,695, 701, 708, 711, 712, 735, 739, 743, 749, 763, 764: n = A,T,C or G
agtacttctagaattaattaaggcggggagaagccttataaatgcaatgactgtggcaaagcttttaatcgtanctcaaggcttacccagcatcaaaaaattcacatgggatagaccacttacatataaatgtgtatatatgtgaataaacctatagccttaacgaaaaaaaaaaaaaaaaaaaaaaaaaaaaaaannngnnccccccccggggggnnccccnattnccccttnnngggngnnttttnccccccccnntnggncnntttttnaaaaaanaaaacnggnaaaaaattcccaaannggaaataaaatttnanttgnatccaaaaaaaaaatccaaacnatcccaaanaaaaggnnnnnaggcccggaaacaantttanattttncnaanaaaccctaanatccctaatnccantttgagggaaaanggangggcaaaantgtttannaaagggctnnnntaaacttaaaaangccntttnntgccgaanttnntnncnntnaaaannannannnctttttctttttnaaaanggantnttttttttttnnganaaaaaaaantnatnntnttttaaaangggcgaaaaaangtnccntttttttttttncccccccccanncccttnggggggngnncccttttccccaaaaaantntnggnttntttncaaaaaatnttttttnanaaaaanaaaaaanccnnggggttttttttttttttttaancccntaanaaaaanattttctccccccnnaaaaaaaaaaaaaaa

SEQ ID NO: 19832 - DNA, 678 bp, Homo sapiens
  misc_feature 573, 638, 652, 670: n = A,T,C or G
agtacttctagaattaattaaggcggggatgacagaccaccattggaaacaaggtggtttgactccagagcccgcaccctccaccacaacgcctcactgcttttctcttgcgctggaaagatctcatctctcactgggaggactcacctttctgtctgttccgctggtgatgatctggaactcctcagggtgatagcacacacactggaataaggtgttggctagtatcatctgattcctcctgagacgcctggaaagtagattcaaaagctgtgaaagtcgactttctcttccctaggaaatttattcactattcaagctggatttggtgcaagctgggatttgggttggtttatctccatgccaaacatctcatactgctcagcaaagtggtgcttgtatttcttcaaaacagacttcaggtcaccctgtcctctctacttctgtgtactccggttggcctatcagtgaccaccagaggacaatgggaagggccctttcctaaagacagagcacgaaactcaatgagaacccttaagttccagggaagaagaagcagaagaggctgaactncagccaacctgctgcctccacacaatgtacttgatcctgaggccccattttggaagtgggagctncctacagtctgaanaagcaaaatgtggggaangggatttt

SEQ ID NO: 19833 - DNA, 280 bp, Homo sapiens
  misc_feature 91, 103, 105, 127, 132, 138, 149, 151, 152, 153, 154, 162,169, 170, 171, 173, 181, 182, 183, 186, 190, 198, 199, 207,208, 209, 214, 216, 234, 251, 268: n = A,T,C or G
agtacttctagaattaattaaggcgggagggattgcttaagcctgggaggcagaggttgcagtgagccgagattgcgccattgcactctancctgtgtgacanancaagaccctgtcccaaaaaaanaaaanaaaaanaaaaaaaaaangnnnncccccccnggggggnnncnattatccnnnaantagnatgttttnnaccccccnnntctgncntgtttttttaaaaatatntagagatttaacctatnatttaactttgacaaanttatgaaatggt

SEQ ID NO: 19834 - DNA, 430 bp, Homo sapiens
  misc_feature 108, 130, 131, 145, 147, 148, 154, 157, 160, 164, 166, 171,174, 175, 177, 179, 186, 200, 201, 219, 221, 223, 224, 232,236, 244, 249, 252, 257, 271, 272, 273, 279, 280, 292, 294,296, 297, 298, 299, 300, 301, 302, 312, 318, 322, 326: n = A,T,C or G
  misc_feature 327, 330, 339, 341, 345, 352, 353, 355, 359, 361, 362, 370,375, 376, 383, 390, 391, 395, 399, 406, 410, 414: n = A,T,C or G
agtacttctagaattaattaaggcgggcggatcacgaagtcagcagatcgagaccatcctggccaacatggtgaaaccccgtctctactaaaaaaaaaaaaaaaaaanttacccgggcttgggggggggnnccatttttcccacntnnttgggnggntgnggcngnaaaanggnntnancccaggnggcaaactttgcanngacccaaaattgcccccntncnntccacccngggnaaaaaagngaaantcnttttnaaaaaaaaaaaaannntttaannttcccccccccncntnnnnnnntttttccccntttggnttgncccnnaanggggggggntnaaanttaaatnntnaaantnnttttaaantttannccccccnttttttnncccnaaanttttttnaaantttnaaaaaaaaaaaaaaaa

SEQ ID NO: 19835 - DNA, 248 bp, Homo sapiens
  misc_feature 229: n = A,T,C or G
ggtaccgggccccccctcgaaagtacttctagaaattaattaaggcggggtacacaagggtttctagcactgaggacaaaccctcctgcccacaggaagtgctttccagcagtctacgctgagagcagaaaggttttctggttttctgggcatgaaggggatatggaaaagtcacaaatagaataaagcaatagcaatacataaaaaaaaaaaaaaaaaaaaaaaaaantttttaaaaaaaaaaaaaa

SEQ ID NO: 19836 - DNA, 579 bp, Homo sapiens
  misc_feature 31, 33, 36, 37, 42, 51, 59, 61, 65, 70, 74, 83, 84, 87, 90,126, 167, 172, 208, 222, 227, 238, 242, 254, 257, 261, 278,287, 290, 291, 293, 294, 296, 299, 300, 301, 302, 306, 307,310, 314, 315, 334, 336, 342, 344, 353, 354, 360, 361: n = A,T,C or G
  misc_feature 362, 368, 382, 387, 401, 406, 416, 420, 435, 440, 446, 447,450, 451, 456, 461, 463, 464, 478, 479, 489, 493, 498, 500,508, 515, 524, 525, 548, 550, 555, 556, 557, 561, 563, 572,578: n = A,T,C or G
agtacttctagaattaattaaggcgggcggntnatnngaggncaggggatnaacaccancntggncaacntggngaaacccannctntgntaaaaaatacaaaaattagaatccggcgcagtggcncaaacctgtaatcccatctacttgggaggttgaggcagganaatcncttgaacccgggaggcggaggttgaggtgagccganatcgctccactgcnctccnccctgggcaanagancaagattccatntcnatgnaaaaaaaaaaattaaanaaatgactnggnnannangcnnnnaatnnccntccnnccttattgagagtgttttngncccccntntttgggganntttttnnnggtatnctggtgggaaattnaaacngggaaagtatatgngtganaagtactggnttgntgcttctgtatgganggganctaaannganntgacntgaangnncaaaactacataannactttgggtnaacncattngncccaacanaattaanattttggannttggttaaaactttaaagaaaancngtaannnatcncnaaccaaatntttttng

SEQ ID NO: 19837 - DNA, 353 bp, Homo sapiens
  misc_feature 336: n = A,T,C or G
agtacttctagaattaattaaggcgggctaatgacactatctgtgccaatgagttggaaatagagcgcctcaccatgagggtcaatgacttggttggaaccagtatgactgtcctacaggagcagcagcaaaaagaagaaaaattgagggaatctgaaaaactattagaggctctgcaggaagaaaagagagaattgaaggcagctcttcagtctcaagaaaatctcatacatgaggccagaatacaaaaggagaagttacaagaaaaagttaaggcaactaacactcaacatgctgtagaagctataagtttggaatctgtgagtgcaacgtgtnaacagctgagccaagaa

SEQ ID NO: 19838 - DNA, 423 bp, Homo sapiens
  misc_feature 109, 126, 133, 139, 160, 163, 183, 204, 229, 252, 276, 280,316, 340, 374, 376, 397, 423: n = A,T,C or G
gggtgccgggccccccctcgagagtacttctagaattaattaaggcggggggggggacgagcgccgggttccgtccaagccctgttgaagcaggaaacccctacgactntcggcgaaaaacgtctntcatcanagactnttaatagcagagttgaccaancanaaaaattggcgagcttgacnacaggctatttgaaatatccnctcagagataataaaagaaaaagcntgaagcatgcctacaagatctanaaaatagcctcaaaagggcaaatntaanagttattggccagtagagagagagatagcagagtanaaagtttattcaaagggataatcncagagaacttcccaaacctagagaaagacatcantnttcaagaacaagaaagttttntaaaaacaagcaggatttaaaccttn

SEQ ID NO: 19839 - DNA, 301 bp, Homo sapiens
  misc_feature 12, 13, 290: n = A,T,C or G
gccccccctcgnnggtacttctagaattaattaaggcgggtgaagggtctggcatctcattgtccaggtgcagtgttctggtgagtttcagatccttcatactatctgggagagctaatgatttgtttcctaagaaaggaactcagataagacaaatataactttctcaagttttaagattggaggggggaatcactttctaggtttattcaaaagaaactataaacatcagttctatgagacaaatgggctagttcaaaatcattgtcatgtttaaaattttattactncctgccccccc

SEQ ID NO: 19840 - DNA, 337 bp, Homo sapiens
  misc_feature 26, 29, 39, 41, 43, 44, 45, 62, 124: n = A,T,C or G
tctggccgagttacgccggcgtttcnccntaataagggnanannnttggtccgggccccccntgggagtacttctagaattaattaagcgggaaaaaaaggattctaaattggaaagaaacaantcaaattatctctgccaatgatataatctcatatgtagaaaggcctaaagattccacaaaaaaaagtagcactaataaatttagcaacatagcaggatacaaggtcaacacacaaaaatagttgcattttcatacactcacaatgaacaattcgaaaaggaaatcaggaaaacaattccattgacatagcatcaaaaaatatttaggaattaa

SEQ ID NO: 19841 - DNA, 471 bp, Homo sapiens
  misc_feature 30, 36, 37, 46, 56, 60, 100, 114, 165, 167, 175, 176, 178,179, 184, 193, 196, 204, 237, 244, 246, 252, 264, 275, 277,279, 286, 287, 297, 303, 315, 317, 319, 347, 391, 395, 402: n = A,T,C or G
agtacttctagaattaattaaggcgggcanggctgnngggatggangacctgctgnaggnttggtcctgggtatcagaaagacctggatttttagggctnatactatcctccgntggtcatgctccaaaaaattaactgcattgtggcgcgacccttaagtattntncattttcnncnntggancccttaaanatnccatttgncttggcttccttgggaaagaagtcctgctgggngtcaggntngtccanggctaatttggnggctgcctttntngncccaaanngcagggctgnctaatntgctgtaaacanangnggactggacatatgttgggatactctangttgcccactgcattgcttaagggggtcctggccttgccgcttntggnctggccnaaagggtggggcttcaatcccttatggcaccgaccccactctggtgcgggccgtcttcttccccccaaa

SEQ ID NO: 19842 - DNA, 762 bp, Homo sapiens
  misc_feature 99, 101, 102, 103, 104, 105, 109, 110, 111, 113, 115, 116,117, 118, 126, 127, 128, 139, 146, 147, 157, 161, 166, 169,171, 178, 179, 181, 182, 183, 190, 200, 204, 205, 206, 207,209, 210, 211, 218, 220, 221, 232, 233, 236, 237, 245: n = A,T,C or G
  misc_feature 263, 265, 272, 273, 280, 281, 282, 284, 285, 289, 290, 292,295, 300, 302, 304, 309, 310, 311, 321, 322, 328, 329, 330,331, 340, 345, 361, 368, 370, 371, 372, 373, 383, 385, 420,421, 424, 426, 427, 433, 435, 440, 442, 454, 471, 482: n = A,T,C or G
  misc_feature 484, 488, 489, 515, 516, 523, 527, 529, 535, 551, 564, 566,584, 586, 593, 600, 607, 608, 622, 623, 625, 638, 639, 642,654, 667, 675, 677, 679, 685, 687, 694, 698, 699, 700, 702,703, 704, 710, 712, 714, 719, 722, 725, 729, 731, 738: n = A,T,C or G
  misc_feature 739, 741: n = A,T,C or G
agtacttctagaattaattaaggcggggggcaagcacccaggactgatgaggtcttaacaaaaaccagtgtggcaaaaaaaaaaaaaaaaaaaaaaaantnnnnnaaannnancnnnnaaaaaaannnttttttttttnaaaaaannttttttgggncccnttttnggnantttgggnnannnaaaaaantttggggggntttnnnntnnnttttttnannaaaaaaaaaannttnnccccaaanttttttttttttttgggnanctttttnnaaaaaannntnncccnnanggnatttnangnaattnnnggggcccccnncccttnnnngggggggcnctttnaaaaaaattttttttnccggggnannnnaatttttttncnccctggggggggggaaaaatttttttggccccccnnccncnntttttngnacccngnggaaaaaaaaanttttttttttccccctngttgtcccccntntaannttttttttttttaaaaaaaaaggggnnttttttnttcngnaaaaantttttaaaaaaatttnttttttttatatncngccccaaaaaaaaaaaananaaaaaanaggggcnccccccnnaaatttatatttgnnancccggggaaaaannaanaaaaaaaaaaanttttttttttttntttttccngnangatccncnattgccntgtnnncnnncgcggnantntaatnatngtntaananaataaannanaaaaaaagccccccccccccc

SEQ ID NO: 19843 - DNA, 364 bp, Homo sapiens
agtacttctagaattaattaaggcgggaggcaaacaggttcctgggtggaaagggattagtcccacgtgaagccccaccttcaaggtagagacggcctgaagcctggtggccgggctgtcagatccaggtggagtgggaactcatggtgctttttaccagcctgcccatggctgcccatggatgaatcagcacgtactttctcccttctgagaccgtaaaatccccgaaaccagccaaactcacatagacatcaggatgacttgcctgtggaaaggagctacccattctggttctccgctccactgagagctgcactcatcacgacaactcaaaatattaaacacaaactaccacctacctccc

SEQ ID NO: 19844 - DNA, 289 bp, Homo sapiens
agtacttctagaattaattaagacggggataataagcaaatatgtacaccaataggccaaggcagtaataaacaactacttgaaatctacaaagatacaaaagatgcaaatgacttttatgccaagtatggtttttttccttaatgaaaccatgtggttctaacttaccataggccagcagtcgcatagagggtgctgtctcacctgggtttatactcttcaaaccttcactggcttttctaaaataaaaccacacatgtaattaagaaaaaaaaaaaaaaaaaaaaaa

SEQ ID NO: 19845 - DNA, 297 bp, Homo sapiens
  misc_feature 273, 274, 275: n = A,T,C or G
agtacttctagaattaattaaggcgggacaaaagaaggtttgttaacaagtagtgctcactttgtgaacagatttcagacaggaaacaaaggttttacaaaataaaatagaaataatttttttaaaaacaaaatcaaaacatttaacggatctcttgcacccatcccaacatcagaggaagtgtagctgaaaactgatagagtgttaaacacacagcttgtttcaaggggaattctagttccctaattcagaacagttcaagttaaacatctnnnaaaaaaaaaaaaaaaaaaaaaa

SEQ ID NO: 19846 - DNA, 438 bp, Homo sapiens
agtacttctagaattaattaaggcggggaagaacacactgttttcctactgttgagatcattagtttccatgaaaagttcaggggaaataaatactgaactctgaatgaaatagcaagttatataaatcttgaaaaataaatattacctaggttaacactagacttaaccacaagagatttcaatcatgaaacctgacataacctagttgacaagtatagcttaagcaagtaagacctcattgctgatggagaagaccccttttcctttgcttgtctgttttgcaaaattcatttttccttcatgagagtaaaaacaatttaggggttattgcagatgtccaaatgcagccagcaattttaaagtcattgatgataccgtcagttatcacactcctacaccagcaatgaaaatactgtatacatagtattacatatat

SEQ ID NO: 19847 - DNA, 489 bp, Homo sapiens
agtacttctagaattaattaaaaatttaagaaacccttaaactaaatttaaacttgataaagaattagcatctttacaacataattttctgaatcaggacactgctactccgatttaaaaagatgtatcctttggtaaaactttagtttttaaaattaaggccaagtcttttcacactgtatttttgtccttcttttttctgttcagtggatgcctggactttggccttttctcctgattcccagtatctggccacaggaactcatgtcgggaaagtgaacatttttggtgtggaaagtgggaaaaaggaatattctttggacacgagaggaaaattcattcttagtattgcatatagtcctgatgggaaatacctagccagtggagccatagatggaatcatcaatatttttgatattgcaactggaaaacttctgcataccctggaaggccatgccatgcccattcgctccttgaccttttccccgg

SEQ ID NO: 19848 - DNA, 394 bp, Homo sapiens
agtacttctagaattaattaaggcgggcacaattatggcaagaggggtgtagctgaaaaccatagagagtgagaaatacaggcagtaagattctcagagccatgtttgcgtatctacattgcctgtactttatggaattctggttcttggtgatatttggagttcagatagtggatttatagtgagaaagaggattttgaatatagagatagtagaactagggaatgattttttaaaaataaaaggtaaagaacagaataggccgggtgcagtggctcatgcctataatcccagtgctttgggaggcccaagagggggaattgcttgaggccaggagtttgagacagcctggccaacataaagagaccccatctctacaaaagttaaaatttaa

SEQ ID NO: 19849 - DNA, 326 bp, Homo sapiens
  misc_feature 21, 243, 244, 245, 246, 263, 269, 270, 271, 277, 279, 280,281, 285, 291, 292, 293, 304, 305, 308, 311, 312: n = A,T,C or G
gggtaccgggccccccctcgngagtacttctagaaattaattaaggcgggaggactaagcagcatccctaaatctagtagaagaggaacataggtatctatatattagggagattatgaataaaattgtgacttgtgttttagaacaagaattttacatgaatagcatttgttgctgttgataattatgtttaaataaataatccttctaagtcaaaaaaaaaaaaaaaaaaaaaaaaaaggnnnncccccccccgggggggncccccnnncccccntnnngggngttttnnnccccccccccnnggnccnntttttaaaaaaaaa

SEQ ID NO: 19850 - DNA, 470 bp, Homo sapiens
agtacttctagaattaattaaggcgggggaaacctggatacatgtattaacagatataaatatgtgacaaacctatcctttgctgcttctttattggtgtaggaatgtcttcctttaagtaaacctttaatacatgattttaaacttatagaagaaaaagatactaatccacttcagataatttaaagaattaaattatgaaaaaaagaaattcagattggaattgcctagtggtagaattttatagcttatctctactagacaaataagaaaagaaaggaagagagaagaagaaatgaaagaaggaatgtgatgttctaggagtagatttatattgtagaatccagaaggacataacagtaaaagtaactcctggaaaggaatgtgattctctatatcttagccctttaaaatctatcataccaaacatgagttgacatcagaactttttcacaaaaaaataaaaataa

SEQ ID NO: 19851 - DNA, 255 bp, Homo sapiens
  misc_feature 4, 20, 28, 71, 99, 136, 140, 161, 172, 181, 194, 205, 208,243: n = A,T,C or G
cccnccctcgagagtacttntgagaatnaattgcgggtggggagctcttctctagatgttaacaaaattancaagtttagatgctagagcactcctgcngagcccaagtgttctatgctcctttcctgtggctaangatntcggccctcccatatcaaaanactgggttttntcttttgtnaccatgcacttantataatgactntanaactagactctgaatataaatctaacaagtgtaanccattgctttac

SEQ ID NO: 19852 - DNA, 384 bp, Homo sapiens
  misc_feature 364, 366, 368, 369, 371, 383: n = A,T,C or G
agtacttctagaattaattaaggcgggggtgatgaaaaaggaacatttatacactgctggtgggaatgtaaattagtacagcatttatggaaaacattttgttatgggataaatatttttgtctcctcaaaattgttattttgaagccctaaacctctgtgaggctgaatttggaggtggagactttaaggaagtaattaaggttaaataaagtcataagggtgggtcctgatcacataggatttttgtccttttaagaagagacacccccagcactttgggaggctgaggtgggagaatcatgaggtcaggagatcgagaccatcctggctaacacggtgaaaccctgtctctactaaaaatncnannanaaaaaaaaaaana

SEQ ID NO: 19853 - DNA, 623 bp, Homo sapiens
  misc_feature 21, 496, 535, 536, 541, 547, 566, 569, 576, 581, 609: n = A,T,C or G
ggtgaccgggccccccctcgngtgtacttctagaaattaattaaggcggggtagaccaaaatgtgaatgtcatatgaaagagtttaaacattgcccttgaaatatgacagaaagtatcagaaataattataccattccatgctcacaggccagtgggaattctcacagtaagcattttgtccagagaatattcttcttagggaactataacattccaatgataatggtagtcagccatgtggctggatcatcgttcctgtatcctggtctctatgacttagtgtggtgatggtgtcattgtgtccaagtgtgacagaattgttagtgtgtagtgtctgtctcctatctcaggctcacagtcccttttataaacatgcctggattgatgatggcttcagtatcttttggaaatctggactgagcaatagaattgcttctctcaaattgatttcaagtcatataaaaggccatgttacacatatattgttaatctganggaggctgtgatcatttaagttgtattttataaacactnngaccnccagtnagaaaacaattcaaaaatnttnaagaacnacccnaaaaaaaaaaaaaaaaaaaaaaaagcgnccccccccgggggg

SEQ ID NO: 19854 - DNA, 234 bp, Homo sapiens
agtacttctagaattaattaaggcgggggagtaaaggtaagatagaaaactaaaatataaaatataaaccacataaccataagtgttttattttaggttcaactactgttttctgtttggtgaggaaacaaaagtcagggcaagagggtgccaataaggagaaagcagaagggacaagaaattggaggcttctgtaacaaagaacaaaaaaaaaaaaaaaaaaaaaaaaaaaaa

SEQ ID NO: 19855 - DNA, 437 bp, Homo sapiens
agtacttctagaattaattaaggcgggtgcctgtagtcccagctactggggaggctgaggcaggagaacggtgtgaacctgggaggcggcatttgcggtgagctgagattgcgccactgcactacagcctgggtgacagagcgagactccatctcagaaaagaaaaaaagaaagaaagaaaaagaagggaaattcccaatcagtgaaagaaaaaccccactgaaacagcagcaaaaaggacaaaatacctcagacgaaacattacaaaaaatgtacaagacttttaagaggaaaacttaaaaacactactaaaggttataaacaaaaagagatgctatgttctcggataggaagatttaatatcataaagacataaatttgttaatttaaaactaggccaatttaaacagaaagttttgtttttaacccagccaact

SEQ ID NO: 19856 - DNA, 267 bp, Homo sapiens
  misc_feature 169: n = A,T,C or G
tgggtgccgggccccccctcgagagtacttctagaattaattaaggcggggggtaaaaatgaagcagaagccccaaagttcacattaactcaggcatttcatttattttttccttttcttcttggttggttctttgttctgtcccccatgctctgatgcagtgccctanaaggggaaagaattaatgctctaacgtgataaacctgctccaaggcagtggaaataaaaagaaggaaaaaaaagaaaaaaaaaaaaaaaaaaaaaaaa

SEQ ID NO: 19857 - DNA, 282 bp, Homo sapiens
  misc_feature 265, 273, 274, 276, 277, 278: n = A,T,C or G
agtacttctagaattaattaaggcgggaacagctaaataggttgttgttgatttggttaaaaaatagtagagggatgatgctaataattaggctggaagtggcagtgaaaaatatgttgggtgttcattttagtgactgtaattaatatcttgctggattaatgttttgtacaattactaaattgtatacattttgttatagaatacttttttctagtttcagtaaataatgaaaaggaagttaataccaaaaaaaaaaaaaaangaaaacgnnannnaaag

SEQ ID NO: 19858 - DNA, 663 bp, Homo sapiens
  misc_feature 580, 595, 604, 622, 644, 648, 652, 658: n = A,T,C or G
agtacttctagaattaattaaggcgggcttgacgacaggctatttgaaatatccactcagagataataaaagaaaaagcatgaagcatgcctacaagatctagaaaatagcctcaaaagggcaaatctaagagttattggccagtagagagagagatagcagagtagaaagtttattcaaagggataatcacagagaacttcccaaacctagagaaagacatcaatattcaagaacaagaaagttatataaaaacaagcagatttaaaccttattaaataagactacctcaagacatttagtaatcaaacttcaaaaggttgagaatacagaaaggatcctaaaagaagcaagagaataaaaacaaataacatgccaagaaccttctatatgactggcagcaaatttctcagtgaaaaccttaagggccaggagagagtggcatgacatagctaaagcactgaaggaaaaagtattttatcctagaatagtatatccagtgaaaatatcctttaaaaatggtgggagaaataaagacttcttccgacaaacttaaaataaggggatttcatcaatacccnatctgtcctattaanaaatgctgnaagaaagtttcttcagtntgaaataaaagggatgtttaangaanttanaaatcnttttg

SEQ ID NO: 19859 - DNA, 299 bp, Homo sapiens
  misc_feature 181, 182, 184, 185, 186, 194, 201, 202, 203, 205, 206, 207,208, 209, 216, 217, 218, 219, 220, 221, 224, 225, 226, 231,232, 241, 242, 243, 244, 247, 248, 249, 251, 255, 256, 262,264, 265, 267, 268, 269, 270, 271, 273, 275, 276, 277: n = A,T,C or G
  misc_feature 278, 281, 291: n = A,T,C or G
agtacttctagaattaattaaggcgggccaggtgttccatttagagggcatacctcaagttttccagagacaccacctggccagcctcattcaagttacctgcttagggtttaacaaaccctcctcacaaggaaaaggaaataaatagcaaagcaaaaaaaaaaaaaaaaaaaaaaaaaanngnnncccccccnggggggnnncnnnnntcccccnnnnnnggnnnttttnnccccccccnnnnggnnngntttnnaaaaanannannnnnancnnnngtntcactttaanaaagtggg

SEQ ID NO: 19860 - DNA, 426 bp, Homo sapiens
  misc_feature 96, 321, 344, 415: n = A,T,C or G
agtacttctagaattaattaaggcgggagaattgcttgaacccagcaggcagaggttgcagtgagctgagatcatgccattgcactccaacctgancgacaaagattccatctcaaaaaaaaaagacaatgtgattccattttccactggattaaaagtaaaaattttataaaactaatgttcataaaattaatataaaataaaatgttatattcagcaatggtaagaatatggagaaaccagtatcttcatacttcatagaagtataaatcagttcagtcttgggcaaattatttaagtttattcaatccaagtttaagnttgctcaaactttgactcagtanttccatttctaggagttatggcactgttgcacatgtgcacaaagacatatgtacatgaatgtttacagcantgtcttttgta

SEQ ID NO: 19861 - DNA, 413 bp, Homo sapiens
  misc_feature 33, 36, 45, 52, 61, 114, 135, 151, 176, 255, 261, 277, 294,300, 312, 336, 349, 376: n = A,T,C or G
agtacttctagaattaattaaggcgggagggtnccnttccaatantctattnggagggaancgacggctggcagtaaaagtaacatcctggacctgcctctagtcatccatgtngtaccacaagagcaaaactgnctccaatgcctacttntgtacaggaaacccatcaagcatancataggctttaaccacactcagtattttgcacttataatctatatatatgtgcagcttgatctatttttattcacgatntttttntctctttttatatttnaatatgacacaatcgtntttgcncagaaaaggatnggtaactggaaatcacactgcctnaaacatacactcntattccagaattccatatgcactcacnaaatgtttcccgaatttaaatgaattcaatcatttag

SEQ ID NO: 19862 - DNA, 239 bp, Homo sapiens
  misc_feature 38, 40, 54, 58, 64, 90, 108, 119, 125, 136, 148, 154, 184,193, 202, 209: n = A,T,C or G
agtacttctagaattaattaaaggcggggggaagatgnanacaggggaatctanctanccaatnacttgaaccaagaatccacttaaatnctaaagcatttaataganaatgctttttnattganggaggtattantcccagaagttnatgctntagaacaaatgcatcatttgcgtatcctanacttaacantgcatcagnttctgcngccaccagaatcagggttttcccgttagta

SEQ ID NO: 19863 - DNA, 380 bp, Homo sapiens
agtacttctagaattaattaaattagaaataaaaaaagaaaacaataaaatatctagaaaagaccagttggaaactacacaacaaacttaatacctcatggttgaaagtcatgaaattttaaaataattaaattaagttatgcagtatattgaaatttatgaaactgattaaatgaaaatacaatatattgacatttataatatgagccagagagaagcttagcagaaattttgagcttttaatcctaaattagaaggaagaagaaaggtttaagatcaatagcgtaggtttccactttaagaaagtgggaaagtataatcattttaaacccaaaagcagtaaaaaaagaaaacaaataacaaaggcagaaaactgtgaa

SEQ ID NO: 19864 - DNA, 306 bp, Homo sapiens
  misc_feature 4, 14, 39, 40, 41, 202, 218, 235, 266, 276, 305: n = A,T,C or G
aaanggaaacaaanactgggtaccggggccccccctcgnnngtacttctagaattaattaaggcgggtgcttactatcatccctttctcactgctattttataatattaattttatatattactaattaaaaactatataattatatacataattaatttttttctggttcttcaaaatatttgactaaataatttagaggnctcaaataaaaatggnaattttaagaccactgngatcaagttctggaaatttttaaagatctangaaccttttnaagccttaatattttttgaatatttttana

SEQ ID NO: 19865 - DNA, 498 bp, Homo sapiens
  misc_feature 4, 22, 54, 86, 91, 93, 130, 134, 136, 138, 156, 163, 173,175, 182, 184, 193, 226, 231, 232, 233, 242, 256, 258, 259,261, 262, 263, 268, 271, 277, 289, 291, 292, 295, 296, 297,305, 306, 313, 471, 472, 488: n = A,T,C or G
aatnaaggcggggagaagatanggaacactcattcctggtcgtctatcccaggngtgtgtttaacattcacagcccacaaccacanatgtntntgggagagcctggcaaggcattcctcatcaccatcgngttngnanaggttaaaacaaaaacanaaaaccncatatatatnanacaaaananaacattatncccaagaaaataaaaatcaattgaaaaataatnaatcnnnccccccccngggggggggtcccntnntnnnttttnaanggcgtnttctcccccctncnntgnnncacatttnncttccanaatgtgttcaaaagaaagacaagaaggagtgtatggcttataaagtgaatctaatacagtatttgttgcgtttaaacaagctagacattttcttacggaaaaattatgaaatacagcatattttatgttctcccattgactcaatcatgacaatattnnttgctttaacaccatntttcatgatt

SEQ ID NO: 19866 - DNA, 563 bp, Homo sapiens
  misc_feature 19, 32, 49: n = A,T,C or G
gtgccgggccccccctcgngggtacttctagnaattaattaaggcgggnagctggtcatttgaaaagatcattgaaattaatctctggcaagacaagaaaaaaagaaaagccataaattaccaatattataaatgaaatgagatgttactacagaccctgcagatataaaaatattaatataggaatactatgaacaactctacacatgcatacatttgattgtttagatgacgtgaagaaattctcgaaagacacaaactaccacaactcacccagtatgaaatagattatttgaatagccctataaatattaaggaaattgaattattgatttatagaacattccccttctcccaaatatgtaagcccagatgattttactagagagaattctaccacacatttaaggaacaattaacagcgattctatacaatctctttcagaaaataagaggagggaagacttctcaattcattttttgaagctagtaataccctagtatctaaactagacaaagacagtaaaaaaaacgaaaaaaaaaaaaaaaaaaaaaaaaaaaaa

SEQ ID NO: 19867 - DNA, 388 bp, Homo sapiens
  misc_feature 7, 137, 145, 154, 160, 163, 167, 170, 172, 185, 187, 200,207, 219, 221, 223, 234, 236, 244, 250, 252, 254, 271, 283,284, 289, 300, 309, 321, 329, 333, 340, 349, 353, 362, 366,377, 379: n = A,T,C or G
gggtacncgggccccccctcgagagtacttctagaattaattaaggcgggaaggaaggataaactgtctattaacagataaatatttggtcatgtccataatgatcatttacatgttttctttttttttttcttttncttttttnaaaaaatanaaacanggncccnctntnttgcccaggctantnttgaactcctganctcaagngatcctcccatntnancctcccaaagngntaggattntaggcntnanccaccaaacctggccantacaaatttttnntcctntacaagggctntatggtcantttaaaaatatnacaaatgnggcntatcgcncactactgngatnccccaaaangctngattaacactntntccaaaaaa

SEQ ID NO: 19868 - DNA, 198 bp, Homo sapiens
  misc_feature 196, 198: n = A,T,C or G
agtacttctagaattaattaaggcgggaaggaccctgggcctttgctgacataccagccccagactacttaaattcagcttttttttttaatgtgagaaaataaatgcacccctctctggtttaaaaaaaaaaaaaaaaaaaaaaaaaaaaaaaaaaaaaaaaaaaaaaaaaaaaaaaaaaaaaaaaaaaaaaaangn

SEQ ID NO: 19869 - DNA, 407 bp, Homo sapiens
  misc_feature 41, 48, 68, 73, 88, 112, 135, 164, 204, 207, 210, 213, 223,224, 230, 244, 245, 256, 258, 261, 262, 266, 271, 286, 310,329, 334, 335, 339, 342, 343, 366, 378, 380, 399, 407: n = A,T,C or G
ccccctcgagagtacttctagaattaattaaggcggggatnctgatgnacaaatcctgtaccgtgtantaaangaagaggaaatggcntggaatcactgcctcctgtgattngaaggccattgtgaaggaaaacnatgcagtgaaagaaagttcttcatattangacagatatcattgcatcacatatatttatctttctgggnatntgnatngcccttaatnnaaaatnttgaaataaaggcnngggcaaacctncnaannaaangaaancaagccaagatgganatttacgacactcaaaccttgggnggttgtggctttggagganccccnnccgnggnngccattggcatcttcctggtgtngactttctcccncncccgacacgtcctatgaanaaccctan

SEQ ID NO: 19870 - DNA, 284 bp, Homo sapiens
  misc_feature 263, 277: n = A,T,C or G
agtacttctagaattaattaatacattagtgcagaaactggtgaaatctaaactaaactaactggagattagttaataaagctggagtggctatctgaataacagagaaagtatactttagaacaaaaaatattatcacagataaagagggtaatttcataaggggatcaattcacaaagaagacataatattaactgtgtgtgcactggtaacaacagagctttagaacacaaaatgatgtaactaaaaacttttgccaccnaaaaaaaaaaaaanaaaaaaa

SEQ ID NO: 19871 - DNA, 542 bp, Homo sapiens
  misc_feature 179, 186, 205, 206, 214, 216, 220, 227, 229, 231, 235, 243,245, 248, 250, 267, 269, 272, 279, 285, 294, 307, 311, 330,336, 340, 343, 356, 363, 374, 382, 404, 408, 410, 415, 419,421, 423, 428, 448, 450, 452, 461, 476, 480, 492, 496: n = A,T,C or G
  misc_feature 519, 521, 529: n = A,T,C or G
agtacttctagaattaattaaggcgggcgtggtggcgggtgcctgtagtcccagctactcgggaggctgaggcaggagaatggtgtgaacctgggaggcggaacttggagtgagccgagatcgcgccactgcactctggcctaggcaacagagcaagactctgtctcaaaaaaaaaaancaaaaancaaaaccaaaacccttaannctcctacntnctantaagtancntntttntaaaaaananttntncacccaggcaagggggntnatncctgtantcccanctttttggnaggccaaggcggncggntcacaaggtcaggaaatcnaaaccntccnggntaacacggggaanccccgtntttcctaaaantcaaaaanttacccaggcttggcggttttncccntntattntaancntntcggnaggcttaggcaggaggatgntntnaacccgggnggggggaccttgcantgancctgaaaattgnaccnaccggattttcaaccttgggggnanaaaacaanaattttgcctcaa

SEQ ID NO: 19872 - DNA, 779 bp, Homo sapiens
  misc_feature 354, 383, 398, 529, 541, 555, 589, 605, 617, 629, 642, 643,650, 654, 660, 667, 672, 682, 683, 687, 697, 700, 705, 712,713, 714, 715, 719, 720, 722, 724, 731, 749, 753, 756: n = A,T,C or G
agtacttctagaattaattaacaaataataatcatacatattcatggggtagataatgttctgatacatataatgtacagaaatcaaatcaaggtaattaacatatccattatctaaatatttatcatttctttgcgttaggaatgttcagtatcttccttccagctatttgaaactatatagtattgttaactacagtcatcctacagtggtatagaacactagaacttatttcttctatctagctgaaattttgtatccttcaacaaatttctccctatcccttccttcctcctacccttcccagcctctattatctatccccgccttaattaaggcggggcaaaacgtganggctgggccggagggcttaagggatgaanaaacatgttccgganggcccggggcaggacttaatcagaactaaatcactggccggcacaagtggctaacgcctgtaatcccacactttgggaagcccaaggcaggcgggtcacctgaaaatcaaggagttccagaacagcctggnccaacatggggnaaacccccattttnttcttaaaaattccaaaaaaatttaccctgggcntttgggggggggcccncttaaaatcccnttcctttttggngggggcccgcggnnaaaaaanaaantttttnccccccnagggngggggggttnntttnaaaccccaanaantttanccccccnnnncccnncncncgggggnaaaaaaaaaaaaaaaaanttcnctntaaaaaaaaaaaaaaaaaaaaaa

SEQ ID NO: 19873 - DNA, 393 bp, Homo sapiens
  misc_feature 53, 284, 365: n = A,T,C or G
agtacttctagaattaattaaggcgggtctagaaatacaggccgcggcgcttncctctcacactcgcgaaacaccccaataggtcaatctgtctgtcctgccttggcctcccaaagtgcgaggattacaggtgtgagccactgtgtctggccagttttaacttttatgtttaggtctttgatccatttcaaattaattttgaatattgtataagttagggggttgagtttaactttttcccatatgggtatcagttatttctgtaccttttgttgaaaagactntttaaaaaaaataatgtgggtctattctatttcattgatccgttgattctaatattagtgtcacactgtcttgattactgngactttagaatagatctttttttttctt

SEQ ID NO: 19874 - DNA, 464 bp, Homo sapiens
  misc_feature 22, 24, 27, 30, 32, 35, 38, 40, 41, 46, 48, 49, 63, 69, 70,71, 73, 74, 76, 79, 88, 97, 103, 107, 108, 110, 111, 113,115, 118, 119, 124, 147, 157, 220, 221, 236, 237, 244, 274,279, 283, 313, 419, 453: n = A,T,C or G
agtacttctagaattaattaangnggnctncnctnacngnntgacnanncataccatcacccncactgnnnanntnccnaacactttntataatatntggatnaaannanncntnttnntaganacttatgacacttagaatgaagnagaaatgcanatttctcaaatatgctatgaagtagctcagaaggaattgtatagcttaagatgcttatattanngcaaatgcttacaannttggttnaggattataaacttaggaaatgtaaaaaanaaatncctntaaggttttaaatgccaagtttttaccatntaccaaactgcccagtaacagaagatgaaactcttgtataaaaacttttctagagattttacatatatataaaattatttactctccagcttattttaagaggctngtaaaacctttaaaccaaaatcagaaaagcctanttaaaaaaaga

SEQ ID NO: 19875 - DNA, 320 bp, Homo sapiens
  misc_feature 21, 22, 221: n = A,T,C or G
ctgggtccgggccccccctcnngagtacttctagaattaattaaggcggggtatgtgtgtgcatgtggtttgcagtcaccgcatgtttagttttgttaggtttaattcactagctttcctactgcacaaatggcttccaggatttcttctacttcccattgtgccgattcgctcagtgctctgtactcactaatgaactgtaaattataaatgtgccatgngctctccccctactgtgagaagaacatatttgagaaatctcagctacatcatttgaactgcaattttgaaaggatgtttttggaaatgtgtcaacaaaa

SEQ ID NO: 19876 - DNA, 406 bp, Homo sapiens
  misc_feature 215, 217, 218, 222, 226, 227, 229, 234, 246, 247, 249, 250,266, 273, 276, 278, 280, 282, 292, 293, 296, 302, 304, 305,314, 316, 320, 324, 330, 343, 348, 351, 359, 363, 369: n = A,T,C or G
agtacttctagaattaattaaggcggggtaccctagggattcatctgttttcttcacttccctttgcatctgagatcctgctggaaaccacagcaacctgtatccactattaggaggtaaaaatcaataaaatggcccattcatttgtgttgtaaaaaaaaaaaaaaaaaaaaaaaaaaaaaaaaaaaaaaaaaaaaaaaaaaaaatctccaaanannaaangaanngntacanaaaaaaaaaganngnntgctcaaaaaacttgnaaaaaantananantncctttctccnnccngagatnannccacattanantgtntaanagactnctgagaattcccnccccngtnaacaaaantaangtaatntaccatttctacactatttgagcatggaaatcatagt

SEQ ID NO: 19877 - DNA, 282 bp, Homo sapiens
aagtacttctagaattaattaaggcggggggactgttgggaaggtacagaaacccctgaaaacccatcagatctcgtgagacttattcactatcatgagaatagcacgggaaagacccgcccctatgattgcagttacctccccctgagtccctcccacaacacgtgggtattctgggagatacaattcaagttgacatttcagtggggacacagtcaaaccgtataattccaccccggcccctccaaatctcatgtcctcacatttcaaaactaactgtac

SEQ ID NO: 19878 - DNA, 286 bp, Homo sapiens
  misc_feature 23: n = A,T,C or G
agtacttctagaattaattaagngagttttatacatctcatttcccctacctcacaataatctcatgtagatagtagtaatctccttttacagaaaagaaaactgaggctcaaagttgttggataacccgcctaggtaatcaagccagtaaatggcaaggccaagcttccaagccagctgtgacatagagtgcggcccttcagtagtagatcctggaggatcagatccttgctagtcacagttcctgattggcctcagtactatttgtaggaaaaaaaaaaaaaaa

SEQ ID NO: 19879 - DNA, 882 bp, Homo sapiens
  misc_feature 5, 54, 110, 113, 160, 163, 201, 211, 284, 294, 302, 344,347, 376, 396, 407, 434, 457, 472, 474, 686, 701, 746, 769,777, 797, 807, 824: n = A,T,C or G
aaagncgcgcaaattaaaccctcactaaaagggggaaacaaaaagctgggggtnacccgggggcccccccctcggaagaagttactttcttagaaattaaattaaaggcnggngccgcccacccggcgggtgggaaacttccaaatttcgccccctattngtngaggtcgggtatttaacgccggccgcctcacttgggcncggtcggttnttaacaaaccgtccgtggaacttggggggaaaaaaaccccttgggccgtttaccccaaactttaaatccgccnttggcaggcnacaattcnccctttttctgcccaagcctttgggccgttaaattatgccgnaangaaggggcccctgcaacccggattcggcnccctttccccaaaccaagtntggccgccaanccctggaaattggggccgaaattgggnaaaatttggttaaagcccgtttnaaattaattttttgntntaaaaaaattttcggcggttttaaaaattttttttggtttaaaaattcaagccttcaatttttttttaaaaccccaaattaaggggccccggaaaaattccggggccaaaaaaaattccccttttattaaaaattcaaaaaaaaggaaaattaagtaaccccggaggaattaggggggttttggaaggtggtttggttttcccaagtttttnggggaaaccaaaggnaagtttccccaccttaatttaaaaaaggaaaaccgttggggaacnttcccaaaaccggttcaaaaaanggggccgnaaaaaaaaaaccccggttcntaattcaaanggggccggaattggggncccccaccttaccggttggaaaaccccaattcaacccccttaaaattcaaaggttttt

SEQ ID NO: 19880 - DNA, 445 bp, Homo sapiens
agtacttctagaattaattaaggcggggggctgtgtggcaatgttcagctctagaggcagtgaaaagatgggaacttagggtcaccaggctgaggaacccgatgaccatcttcctgtgtaacgttcagtctttcattgtagtgaggaggcatttctccactctttaatgactcttttaaatcattcaacagtcacttctacccagaagcagatgaaaggatgaaggggcacttttccctgggtcagcagaacagcaccttatcagcaccattatgtgatctgaagggactaggattaaaacccttaagcatcctgccctccagggaaatgtggaaacctgaagcagccccttataacagaaagactctagaaaagtaaagctggtttcagtgggatttctgtggttttctccattgatttttcatttccacctccaagagccttt

SEQ ID NO: 19881 - DNA, 285 bp, Homo sapiens
  misc_feature 1, 37, 46, 231, 232, 233, 244, 258, 265, 266, 267, 271, 273,276, 280: n = A,T,C or G
nagagtacttctagaaattaattaaggcggggctggnagcgcaagnacgtgctgacacagtgagttttctctgatgtatttaaggtgatgtatttgcttgagttactcctgtatcattgctcataatattggaaactaaaataaaacctagttggaaaaaaaaaaaaaaaaaaaaaaaaaaaaaaaaaaaaaaaaaaaaaaaaaaaaaaaaaaaaaaaaaaaaaaaaaaannnccccccccccnggggggaccccccnccccccnnnaaananggntttnccccc

SEQ ID NO: 19882 - DNA, 586 bp, Homo sapiens
  misc_feature 1, 13, 21, 23, 24, 27, 28, 285, 502, 571: n = A,T,C or G
ngagtacttctanaattaatnannggnnggcgcctgtaatcccagctactagggaggctgaggcaggagaatcacttgaacatgggaggtggagtgagccaagatcatgccattgcactccggcctgggcaacaagagcgaaactcggtcttaaaaataaaaaaataaaacagcctcacaggtgtgctgaatcttgacctgagagtcaccaatccatctgtggaccagattcacctataagagtcaattttgcaattttccactgcctccaggtgtgacattcanagcttcagaagtaggttatgtttatgttaagggatgacaatatttactgttggctggttgcgcatatgagtataacaatgtcacctgtgtgctgggccatgtaagggcactcagtgtattacccgagggctttatacaatatacaggagagtcaaatccactctgagatctttgtgattgtataaaaccatgatcgtacctgcggccctaggcccanactggggcaggtggatcatgaagtcagtagttcaagaccagcctgaccaacatggtaaaaccttatctntactaaaaaatacaa

SEQ ID NO: 19883 - DNA, 437 bp, Homo sapiens
agtacttctagaattaattaaggcaggattatgcattttttattcaaacatacctataaaaatattatttttacatttgaaaaaatattaaatttttaaataattacctttttgtctcgactcccagtgaagaaatacttgctgtcaggactccaatcacaagaccaaataattctactgtgcacagaagtaattttgttggtgaaggcaaaaagactaaaaactggctctgaaagaaatatgtatacactattcacaaagcagagaaagctgggtttttacctgttaggaagtgatgtttaagtgccatatacaccatatgacttaatattcaatttatatgcactgacttttgaaatagactgaagccaggcaaccaacccctcaccagaaggctgtggacacagctatttttctagtagggaatgcttttgtac

SEQ ID NO: 19884 - DNA, 411 bp, Homo sapiens
  misc_feature 15, 69, 72, 76, 93, 97, 101, 103, 105, 106, 116, 131, 138,144, 150, 156, 158, 168, 170, 176, 188, 198, 205, 208, 209,210, 211, 215, 216, 217, 218, 219, 223, 227, 232, 233, 234,237, 239, 247, 249, 253, 259, 260, 261, 274, 277, 278: n = A,T,C or G
  misc_feature 279, 284, 287, 326, 341, 348: n = A,T,C or G
ggtaccgggcccccnctctagagtacttctagaattaattaaggcgggcatggtggcgcacaccttgtnttntcanctactcatgggggtgangcangatngntnnaacctgagangtggaggttgcattnagcctanatcttnccactncactcnancctgggcaananagcganactccaactccngttaaaatanaaaattnatnnnntgannnnncccncccnggggnnnccntnaaaccccntnttgnttgttnnntatcccccccccncannnatganttnatccttgaaggaaatgacattgacttgtttcaaattcanccggctttgattcancaagccncaacagttaaaaacaatggatatcaggaaatttttggatggtatctatgtctctgaaaaagga

SEQ ID NO: 19885 - DNA, 413 bp, Homo sapiens
agtacttctagaattaattaaggcgggggattccaagctatagaaaaaacatgagtctagaatgacagagtgtgtcatcttcaaatgtgtattaatatatttcttgatgatgagaccaatatttctaagttaatggaactattttattacacctgataatcacagttcaattcttgtctgttgcagaattatctacctctttcaaactgtaaatgaaaataactgtgaaaaaaaggatgcagtactgataaaaacactgctttgtttttatctcacctcttttttaaggatatgattttataagaggcagttctcttttgcttttcaagacttctgtagagtttgtgttttttgtttttgtttttgtttttgtttttgtttttttacctaatgtgaatcttattttatctact

SEQ ID NO: 19886 - DNA, 456 bp, Homo sapiens
agtacttctagaattaattaaccctaacacccaaaccaatgtttagaatagtgggcacttgatgcatacttgtttgaatgaatgagtgaatgaatgaatctgccaaatgaagggtgcagatgtaaatagatatttttttatagcatagatttttatttaacctttattgaaaaataaattttaagcttttcttcctactcgtttttgtttccacaaagagccattttacctctgtttggcagctagagtagggctggattgtctgctcaaggggaggggtgtttaaaaaaaaaaaacacacacagagcagtcttttgcagcaaagaaagttcaggtgattgctgggcatggtggctcccgccttaattaaggcgggggaccgatggcgagaggggagggggagccgagttcgcatctctccttttcctggttagactctgttcaaccacattctta

SEQ ID NO: 19887 - DNA, 308 bp, Homo sapiens
  misc_feature 31, 36, 50, 51, 52, 53, 58, 60, 61, 72, 75, 80, 85, 90, 91,122, 129, 133, 147, 208, 222, 261, 264, 265, 273, 285, 287,288, 290, 292: n = A,T,C or G
ggccccccctcgagagtacttctagaattanttaangcgggcggggaaannnnaggcncnngggaaccactnttnttttnttttntgacnncctggaaggcatcctggaggtgcaggccaanaataaancctncctacaatactacncctagggcacacaggccagccccagtctcacggctgaagtgcgcaataaaagatggtttanggtccctacaaaanaaaaaaaaaaaaaaaaaaaaaaaaccccccccccccccnggnncccccccnccccccccttanannantntttccccccccccccc

SEQ ID NO: 19888 - DNA, 903 bp, Homo sapiens
  misc_feature 75, 122, 194, 195, 196, 204, 206, 208, 211, 212, 214, 215,217, 218, 220, 222, 223, 227, 228, 230, 233, 234, 235, 316,334, 378, 522, 526, 531, 532, 548, 658, 678, 711, 817, 840,848, 885: n = A,T,C or G
agagtaccttcttagaattaattaaaggcggggtgggcttcaaccccctggtaaatcccaacactttttgggganggcttaaagggccagggaagggaatcaagttagaagtcccaagggangttttgaggaacccaggccctgggggccaaccaataagttggaggaacccccctattcttcttcccaaaaannnaaaaaaanananttnntnnanngnannatannantannnaaagccggggccccgccccacccggcgggtggggaagccttcccaaaatttccgcccccttaataagttggaagttccggntattttaacgccggccgncctccaccttgggccccggtccgtttttttaacaaaaccggttncggttggaccttggggggaaaaaaacccccttgggccggttttaccccccaaaccttttaaatttccgccccttttggcaaggccaaccaatttcccccccccttttttcggccccaaggccttggggccggttaaaattaagnccgnaaaannaaggggccccccggcnaccccggaattcgggccccccttttcccccaaaacaaagttttggccgccaagcccccttgaaaattggggcggaaaatggggaaaaaattttggtaaaaggccggtttnaaattaatttttttggtttnaaaaaaatttccgcggttttaaaattttttttngttttaaaaattccaagccttcaattttttttttaaaccccaaaattaagggcccccggaaaaattcggggcaaaaaattcccctttattaaaaattcaaaaaagnaaattaggaccccgaaaaataanggggtttngaattgtttgtttcccaagtttttgggaaaccaaagnaaattcccacttttttaa

SEQ ID NO: 19889 - DNA, 407 bp, Homo sapiens
agtacttctagaattaattaagggggaaaaatgactctaaaagggctgggaaggaggatgactaaaaagattgagaaacactaatctagcttattcttcctcctatctgtcaaactcggcttcactatcactttctttgttcccgtcaacactctttgctcaccttagactcctatgcttatttatcattcatatagtttaaatatttatttgtataattatttaatgcctacccttcttgtattctactatatccctagtgcctagcaatgccaggcacctataaaataataaatatttgctaaacaaataaataaatgagagttgaccagtcacggcagctcacacctgtaatcccagcactctgggaggccgaggcaggtagatttcttgagttcaggagttct

SEQ ID NO: 19890 - DNA, 220 bp, Homo sapiens
  misc_feature 23, 24, 57: n = A,T,C or G
ctgggtaccgggccccccctcgnnggtacttctagaaattaattaaggcgggcaggnaggaagtagcgcttttgagtaggaatataccatttactgagtggcacatgaacagaatcttgtgaaaaattaaagtaagaaattaacctggaaaaaaaaaaaaaaaaaaaaaaaaaaaaaaaaaaaaaaaaaaaaaaaaaaaaaaaaaaaaaaaaaaaaaaaa

SEQ ID NO: 19891 - DNA, 430 bp, Homo sapiens
agtacttctagaattaattaaggcggggagcttgttgtctctggggtaagcattagctgaacaaaaagagggccagtgggaacgtgctgacccttgtcagaaatgaaagtcacctcctatccgcataaacacctgccctgggaaagtgtgctgtgcagaaactccaagtcctgtcccagtctctggagaccaaggtctgtccatcatctgttccctgtagaactgtgacacctgcggggcactgcaagggctgaaaggctggcctcctcccctttgctggccactcactgggtaggaatttttaaaaatcttccttgggaccgggcgtggtggcaggtacctgtaagtcccagctacttgggaggctgagacacaataattacttgagcctgggagatggaggttgcagtgagcccgagatggcaccact

SEQ ID NO: 19892 - DNA, 406 bp, Homo sapiens
agtacttctagaattaattaaggcgggaggcagaaggattagaatcagagaggacaaggcaacgtgtagattggagtgatgtggccacaagctaaggaatgctggaagtctttagaagctggaaaaggtgaggaacagattctccctaagtgcctccagaggaaccagccctgttgacaccttgattttagccccttaacactcactttggacttctgaccttcagaactgtaagataatatatttgtgttgttttaagccacaaatttgtaatagtttgttacagcagcaaatggaaattaatatatttgtttatttaatttttattactttaaaagaaatacatgggttattggccaggaattcaaatagaatcaaatggtagaaagtaaaatcccctattttt

SEQ ID NO: 19893 - DNA, 308 bp, Homo sapiens
agtacttctagaattaattaaggcgggcatacacaaaacacaatttcagtctaagttctcactaacagcgttgatagcagtttcttggaaaccacgattttaaacgaaataactataaagaaaccaattttaccataagctaatggatagaaacaggagttaagattctaccgcatatttctggtcataaaaatactaccaaaccttactacataaagtagtaaacatcagagccaaaacacttctaatattaaacattgaaataaatgtgagctctacatacacttaagaaaaaaaaaaaaaaaaaa

SEQ ID NO: 19894 - DNA, 285 bp, Homo sapiens
  misc_feature 32, 124, 151, 152, 178, 179, 185, 186, 188, 190, 191, 192,193, 194, 195, 196, 200, 201, 212, 213, 214, 217, 218, 219,220, 224, 225, 246, 247, 248, 249, 250, 251, 252, 253, 254,255, 256, 257, 258, 259, 260, 261, 262, 263, 264, 265: n = A,T,C or G
  misc_feature 266, 267, 268, 269, 270, 271, 272, 273, 274, 280: n = A,T,C or G
cttactagaaattaattaaggcggggggcggnaggtatgggaactggctagtgagcactgaaatataaattctgaatcctctcctaaaaaaaaaaaaaaaaaaaaaaaaaaaaaaaaacccccnaaaaaaaaaaaaaaaaaaaaaaaaagnnccccccccccccgggggggccccccnncccccnntnannnnnnntttnnccccccccccnnnggnnnntttnnaaaaaaaaaaaaaaaaaaaannnnnnnnnnnnnnnnnnnnnnnnnnnnnaaaaanaaaaa

SEQ ID NO: 19895 - DNA, 787 bp, Homo sapiens
  misc_feature 13, 135, 261, 264, 265, 278, 279, 280, 282, 283, 287, 288,289, 290, 291, 292, 293, 294, 295, 296, 297, 298, 299, 300,301, 302, 303, 304, 305, 306, 307, 308, 309, 310, 311, 312,313, 314, 315, 316, 317, 318, 319, 320, 321, 322, 323: n = A,T,C or G
  misc_feature 324, 325, 326, 327, 328, 329, 330, 331, 332, 333, 334, 335,336, 337, 338, 339, 340, 341, 342, 343, 344, 345, 346, 347,348, 349, 350, 351, 352, 353, 354, 355, 356, 357, 358, 359,360, 361, 362, 363, 364, 365, 366, 367, 368, 369, 370: n = A,T,C or G
  misc_feature 371, 372, 373, 374, 375, 376, 377, 378, 379, 380, 381, 382,383, 384, 385, 386, 387, 388, 409, 417, 419, 455, 471, 475,496, 506, 510, 521, 526, 529, 537, 542, 543, 552, 575, 592,598, 601, 602, 621, 623, 629, 636, 637, 671, 672, 685: n = A,T,C or G
  misc_feature 692, 696, 703, 704, 707, 711, 712, 713, 714, 715, 717, 721,722, 728, 741, 743, 748, 752, 757, 761, 767: n = A,T,C or G
agtacttctaganttaattaaggcgggaggatcgtttgagctcagcagttcaagaccagcctgggcatcataagtgagaccctgtctctatttataaaaaaaaaatgaaaaaaaaaaaaaaaaaaaggaaaacantcaggccaggtgcggtggttcctacctataatcccagcacttcaggaggtcaaggtgggtggatcacttgagcccaggagtttgagaccagcctgggcaacatggtaagaccctgcctttactttnaannaaaaaaaaaaaannnannaaannnnnnnnnnnnnnnnnnnnnnnnnnnnnnnnnnnnnnnnnnnnnnnnnnnnnnnnnnnnnnnnnnnnnnnnnnnnnnnnnnnnnnnnnnnnnnnnnnnnnntggcttttacccaacttaatngctttgcngnaaaattcccctttttccccagtttggggttaattanccaaaaagggccccgncccntttggcccttttcccaaaaantttgcccaancccntaaattgggcnaaatnggnaaattttnaaagnncttaaatantttttttttaaaaaattcccggnttaaaaatttttttttnaaaaanaanntttttttttttaacccaanangggccnaaaaatnngggaaaaaattcctttttttattttaaaaaaaannttccccccaaaanggggttngggnttttttnnccntttnnnnnanaaanncccccnttttttaaaaaangnggggncccnccccnaaangggggnaaaaaaccctttttttgggg

SEQ ID NO: 19896 - DNA, 413 bp, Homo sapiens
agtacttctagaattaattaaggcgggcagaactaggagaggaggggaaggagagcagagaggaagaaacattccacttgggaaacgaaggtgtgacagcagagagagaaaatcccgaatatttaaggaacagtgggaagaccagtttgaccgaagtggcggttccaaaagagataaacaagttttgaaccatttagaactgtgtgctttgttattgagccatttatacaattgtggtgagtgattaacaggcatcctcacttggaatctatgaggttgattactgttattatccctagtaataattaagaaactagttgaaagagttgataagaaaaccaaggcttacagaagtaacttgcccaagatcacagccagcaagctgagcacagcagtgaacctctttgcccctg

SEQ ID NO: 19897 - DNA, 434 bp, Homo sapiens
  misc_feature 278: n = A,T,C or G
gggtaccgggccccccctcgagagtacttctagaattaattaaggcgggggtgaaaagaaggtatggttttttggtttttttaaaatctctcttactgaatcacacacttttcggaccgcatttgtttctcagatttgtctcattaaaaatatgcttgctcaaatgtaatgtggtcttctgaatttcaaaaaagtattcatgtcttgtccaaatacagatatttgataaataaataataaaaaataccatggaaaaataaacttagtatttctaatanaattcctttggttataaggaaagggattttcatgggtgtccaaaaaatgtatttcattgaggaatcatacgttttacttttgggcttagattacccagattcagtttaattttttaaacatttgtataattgagtgctgcatataaacgccaaagc

SEQ ID NO: 19898 - DNA, 176 bp, Homo sapiens
  misc_feature 176: n = A,T,C or G
agtacttctagaattaaaagcatgtacggtatcaacgcagaatgaacccatagggagctgatcgtaatgtttatcatgttacttccccacccctacattttttgaaataaaataaggaattttattctcaaaaaaaaaaaaaaaaaaaaaaaaaaaaaaaaaaaaaaaaaaaaaan

SEQ ID NO: 19899 - DNA, 479 bp, Homo sapiens
  misc_feature 1, 5, 12, 267, 409, 410, 411, 412, 413, 416, 417, 418, 419,420, 421, 422, 423, 424, 425, 426, 427, 428, 429, 430, 431,432, 433, 434, 435, 436, 437, 439, 440, 441, 442, 443, 444,445, 446, 447, 448, 449, 450, 451, 452, 453, 454, 455: n = A,T,C or G
  misc_feature 457, 458, 459, 460, 461, 463, 465, 466, 467, 476: n = A,T,C or G
nagtncttctanaattaattaaggcggggaaacgccatatcgggggcaccgattattaggggaactagtcagttgccaaagcctccgattatgatgggtattactatgaagaagattattacaaatgcatgggctgtgacgataaccgttgtagatgtggtcgttacctagaaggttgcctggctggcccagctcggctcgaataaggaggcttagagctgtgcctaggccacctactcatgcacctaattggaagcgccaccctancaatatcaaccattaaccttccctctacacttatcatcttcacaattctaattctactgactatcctagaaatcgctgtcgccttaatccaagcctacgttttcacacttctagtaagcctctacctgcacgacaacacatnnnnnaannnnnnnnnnnnnnnnnnnnnnannnnnnnnnnnnnnnnnannnnncncnnnccccccccnggg

SEQ ID NO: 19900 - DNA, 283 bp, Homo sapiens
  misc_feature 22, 24: n = A,T,C or G
gggctaccgggccccccctcgngngtacttctagaaattaattaaggcggggagatgcaatatttagcatttcctcaaactttttttggccatgaaatccaccacccccctcctttttcagagcatttcatgaagttcacatttcaaataatacattttgaaaaacatttatcttgtctaattgaagctcaaagagatagagtcaatgacttttcaaagtcaggtagcagatagttttaaagctgcaagtactgataagtgtgagccattagttaattcgcat

SEQ ID NO: 19901 - DNA, 432 bp, Homo sapiens
  misc_feature 142: n = A,T,C or G
agtacttctagaattaattaaggcgggacacctgtacagagcacttacggtgaatggagcaggtaggcctgagttgcactgggtgagtcagggagagaatgtgaaggcctgggccctcactggacaccactgtcacctttanaaacaccgtccacttaacactacactcaatttttaaattttcctttcttcaataataaaccctagcctactatggcttttttactttacaaactacttttttaaaagctttaaggtttttgactcttttgtaaacacaaatatatcatatagctgtcaaaaattttttttgttatatccttattccataagcttttttctattaaattttttttaactttttgaacttttttgttataaatgaagacacggccaggcacagtggctcatgcctataatcccagccctttg

SEQ ID NO: 19902 - DNA, 434 bp, Homo sapiens
  misc_feature 291, 317, 336, 338, 344, 416: n = A,T,C or G
agtacttctagaattaattaaggcgggtgcctgtaatcccagctactcgggaggctgaggcaggagaattgcttgaacccaggagacagaggctgcactgagctgaaatcaccccactgcattccagccaatcacgaggtcaagagatcgagactatcctggccaatatggtgaaaccccgtctctactaaaaatacaaaaattagctgggtatggtggcgcgtgcctgtagtcccagctacttgggcgacagagcaggactctgtctcaaaaaactaaaaaaaaaaatanaaatgggtgaccagttacagtttcanaccactaaaaacacctccntntacagntgtcagccatcatgacactccatgcaactacttactcattaatatttagtaactatctaatggatgctgcanggctctataaaaacaaaa

SEQ ID NO: 19903 - DNA, 441 bp, Homo sapiens
  misc_feature 143, 144, 148, 156, 157, 158, 159, 161, 167, 170, 172, 175,187, 189, 192, 197, 203, 215, 217, 225, 226, 228, 230, 233,237, 240, 253, 255, 256, 257, 270, 274, 276, 277, 279, 281,282, 288, 292, 294, 295, 297, 299, 310, 312, 313, 327: n = A,T,C or G
  misc_feature 330, 331, 335, 336, 342, 365, 380, 383, 385, 386, 387, 388,389, 394, 395, 400, 414, 428: n = A,T,C or G
agtacttctagaattaattaaggcgggggaattgcttgaacctgagaggcagaggttgcagtgagccaagatcgcaccactgcactccagcctggtgatagagtaagactgtctcaaaaaaaaaaaaaaaaaatttaaaaaanncccnccttaaannnncnccttcnttngnaanccaaaaccccantnttnaaaantttttnaaaggggaaaantncccccttnnantnaanattnaanccaaagggttttngnnnaaaaagggggggnaaancnnangnntttttngggngnncngnccccaattttnannccccggggaaaaangannaaannatcttncaaaaaaattaaattaagggggngggggttaaccgggnttnannnnncctanncgganaaccttggggaagnttttctttttaaanccaattgaaaaaa

SEQ ID NO: 19904 - DNA, 681 bp, Homo sapiens
  misc_feature 45: n = A,T,C or G
agtacttctagaattaattaaggcggggatcatgtatatatcatntacaagaatctcactttaaataaaaacaaataggttgaaagtaaagaaatggagaattatatactatgttaatactaatcaaaggaaagcctggatagctatattaatttcacataaagcagacatgagaacaaggatgataaacaggaatacaaagtgccattttacaatgaaaaaggggccaattatccaaaaagtctaaacaatgctatgtgtatgcatgtgaaaacagtgtcaaaatatgtgatgccaaaaaactgttagaaatgcaagaagaaataaataaatatactattatagttgcttggaaacatcaacatcctctctcagtaatcgatacatcaaacagaaagaaaacagtaattgacctaaacagaagtatcaaacgatttgatataatagacacaaagacataccccatccaaccacagtagaatgcacattcttctcaggtttgcttagaactttcactaaaaaacaatattcttgataataaaacacccctttacaaatttgttaaaaataaaaatcataaaattatgttctcagacaatggaattaagctagaaataaataccataaagagagctgaaaaatctgcaagttctggagatttaacaactatttcttaattac

SEQ ID NO: 19905 - DNA, 468 bp, Homo sapiens
  misc_feature 25, 27, 30, 33, 39, 40, 42, 47, 48, 53, 55, 57, 59, 60, 61,65, 67, 68, 69, 71, 79, 80, 96, 106, 113, 116, 118, 120,125, 302, 378, 380, 388, 397, 399, 400, 408, 409, 410, 411,412, 414, 415, 416, 417, 419, 420, 421, 424, 426, 428: n = A,T,C or G
  misc_feature 430, 433, 437: n = A,T,C or G
aatgagactggccgtcgttttacancnggnaanaagtannanccttnnttctngncngnnntttncnnnanagaaaaannaaaaacctttttgtcnggggcggagnactgcanganananagcanaggagggccacattcggagcctccgtccactccagttttatcagcttttgccttttgcacggagtgctaaacaaattctagctctgtgttttttttccattcccagatttactatcagttctccttaaaaagtatctaagctgttacagtagctttcccttcacttgattctattgngtgttttctatgtttggaataattacacccaaatatctagatatttttctcttcaccgcattttgtaaaataaaananattgtgtntgcctcccncnnaaaaaaannnnngnnnnannntgntntntnttnttanaaaaaaaaaaaaaaaagccccccccccccgg

SEQ ID NO: 19906 - DNA, 771 bp, Homo sapiens
  misc_feature 1, 21, 22, 32, 33, 34, 35, 37, 39, 43, 46, 50, 59, 62, 63,94, 121, 128, 197, 219, 222, 226, 231, 241, 278, 281, 287,291, 293, 296, 299, 312, 316, 338, 341, 346, 348, 355, 357,361, 396, 409, 419, 424, 430, 431, 435, 437, 447, 454: n = A,T,C or G
  misc_feature 459, 474, 476, 486, 487, 493, 495, 500, 506, 517, 528, 531,549, 558, 594, 616, 630, 647, 651, 653, 664, 688, 694, 699,702, 705, 712, 721: n = A,T,C or G
nactggccgtcgttttacatnnggaaacaagnnnnancnttantgntggncggcctttnctnnagagaaattagtagaattaattaatgcttgngggacataataataacaatagaatgtntgcacanccgctttccacacagacatcataacaaaaaatttccaccaaacccccccccccttaattaaggcgggancgtgggtgccctggaggagctnganaacnccttnaccctggtcnaggagtcctgccccggcatttaaaacaagctgatggngcncctggnggancnagngcnaaggttttcacanaacngaaaccacctgacatccacccnctnaagcncnctgctgntnaaanaggggacggaaggtcgtttgtttttgttctgagcnccataaaaactgngctgacttgnaaggngccctnngctntntcgtgcctgnagggacnctttngatcccgtgggcctnanatgccaggtnnccaggncnccgtntccttncacccctgcantgtgctgttgngcncgtcagggacccttgttntttatgccnactgccctcctccctttcctggcccaacaatattgntccgggggctccaaccgccggngtggccctcatganctacccctggggttttntggnanactttatgcangcccttttggcccggttcaaaacnaagggngcaanagnaanttttaangggcaggtntgcctcctcctcccaatgaaggggggggagagggcaaacaaggggcaccc

SEQ ID NO: 19907 - DNA, 393 bp, Homo sapiens
  misc_feature 264, 270, 274, 275, 278, 287, 289, 291, 293, 294, 295, 301,302, 308, 329, 331, 332, 333, 336, 339, 343, 350, 351, 354,364, 373, 378, 384: n = A,T,C or G
cttctagaattaattaatgcgggggatcacctgaggtcaggagttcgagaccagcctggccaacatggtgaaaccctgtctctactaaaaattcaaaaattagccaagtgtggcgcatgcttgtagtgccggctgctcaggaggctgaggcaggagaatcgcttgaacccgggaggcagaggttgcagtgagctgagatcacgccactgtactccagcccgggtgacagagtgagaccctgtctcaaaaaaaaaaaaaaaaaanggaggntggnnaanctttttttncngncnnngggggnnaatttnggggttttttgggaacttttncnnnggnccngggnaaaaaannccntggggttccnttttttttntaaancccctnaaaaccccc

SEQ ID NO: 19908 - DNA, 357 bp, Homo sapiens
  misc_feature 2, 23, 31, 34, 42, 60, 62, 63, 64, 66, 71, 74, 77, 80, 81,122: n = A,T,C or G
anactggccgtcgttttacatcnggaaacangtntgaccctnattgctggccggcctttncnnnanagaanaantanaannctttaatgcggggccagtgggttgcttcatattaactattnatgttgtaagtaatatataatctttaattttttgtcttcataggttgtcagatttttttgacatgattatgactttttagtttacaaatgagtgaaattatttcagattaaactggtcattgaaaaattttgaggctaggcatggtggctcacacatgtaatcccagcactttgggagggtgtcaggaggattgcttgagcccagtagtttgagaccagcctgggcaacatagtg

SEQ ID NO: 19909 - DNA, 436 bp, Homo sapiens
  misc_feature 269, 271, 276, 278, 279, 281, 283, 292, 299, 305, 314, 315,316, 318, 320, 324, 327, 328, 329, 338, 339, 341, 342, 343,345, 349, 355, 357, 359, 365, 376, 408, 417, 418, 420, 421: n = A,T,C or G
ccccctcgagagtacttctagaattaattaaggcgggtcggttgaggtcaggagttcaagaccagcatggccaacacggtgaaaccctgtctctattaaaaatacaaaattagccggacatggtagtgcgtgcctgtggtctcggctactcaggtggctgagacaggagaatcgcttgaaccagggaggtggaggttgcggtgggctgagattgcgccactgcactccagcctgggtgacagagactctgtctcagaaaaaaaaaaaananaaagnanngngnccccccccnggggggncccccnattcccccnnntngngggnggnnnacccccccnncnnngncccntttttncntntgctangaaaaccaaanacctttgttcacttgtttatctgctgaccttncctcactgnngnnccatgaccctgccaa

SEQ ID NO: 19910 - DNA, 272 bp, Homo sapiens
  misc_feature 234, 245, 246, 255: n = A,T,C or G
agtcttctagaattaattaaggcggggtgacagtgagaccctgtttcaaaataataataataataataataataataataataataaactgatagaactgtacacaagaaaagtcaattttactgtaggctaacttaaaattaaaatatataaaataatgtttacatgaatacaataaaaatgttaacataaataacagttatgcaaaaaataacttcacaaaagaatttccanaaaaaaaaaannaaaaaaaanaataaaaagcggccgcc

SEQ ID NO: 19911 - DNA, 426 bp, Homo sapiens
  misc_feature 111, 116, 126, 134, 135, 173, 177, 180, 189, 190, 198, 207,215, 219, 223, 230, 238, 253, 272, 280, 281, 286, 297, 305,319, 320, 321, 322, 323, 327, 330, 331, 337, 351, 354, 357,361, 363, 366, 369, 399, 402, 419: n = A,T,C or G
agtacttctagaattaattaaggcggggttgttaatcatttagccgttgcaataaatgtagaggaaatgcaaaaaaaaaaaaaaaaaaaaaaaaaaaaaaaaaaaaaaaanaaaanaaaaaaaaanaaaaaatnnaaaaaaaaaaaaaaaaaaaaatcccccccccccccggngggnaanacccccctnnccaacatnggaaaaacntccccccncctnaaantagcaantaatttantgggcatgggtgccnatgtgcctataatcccaanctacttgnnaaagntttattgcaangaaaaatnactttgaaaccttnnnnnggcncanntttgcncttgaaacccaacnttnatngttnanttngcncttccaaaaccttgggccaaaaaaaagaanccnaaaaccttccccacttnaaaaaaa

SEQ ID NO: 19912 - DNA, 415 bp, Homo sapiens
agtacttctagaattaattaaggcgggtgagtgaaaaggtggaaatccctggtaccttgcctggtggttacacagtttaaccataggccaattttaggggcctctgaagtatctttctacaaacgcagacaagctccactacccctaacctgccaggatgctcaagtccactgtcacaatccctttcagaaaacattagtggccgctgccccagctacagagacggccgaaatgctttcactccttagctttgccaactccatcctccaaaacttcccagaatacctccctttccagttctaccaaatctgtacttgggagcagcctgctggatccagaacatgacaacagagagctgcgtccacagggaacaaagccctgacctctctctccacattaccctcacaaaaacagg

SEQ ID NO: 19913 - DNA, 491 bp, Homo sapiens
  misc_feature 45, 200, 201, 203, 204, 205, 221, 222, 227, 228, 229, 230,231, 236, 238, 239, 241, 242, 243, 245, 246, 248, 249, 253,261, 263, 265, 267, 269, 277, 280, 282, 303, 400, 403, 406,428, 430, 436: n = A,T,C or G
agtacttctagaattaattaaggcggggagtaggccatcccccangagaatgacagaagcaaaggacttgttactaagcagatttaagggtcagtgggggaaggctatcaacccattgtcagatcagcatcaggctgttatcaagtctgttggtgctaaaaagtaaaagataaaaaaaaaaaaaaaaaaaaaaaaaaaanngnnncccccccccggggggnnccccnnnnnccccntnntnnnannannttancccccccncntngncngttttttnaanangtactggaaattgaagagcanttggcttctggaaggtggctccccattattataaggccaaggagctagaaagatccccatgctaaaaaaaatgctcaaaaaaaataagcaaaacacnaanaanaactagggtaaagaaaaggacntnaaacangaacctgcaccagctccttttccttctatacattatttaatacctattaaataaa

SEQ ID NO: 19914 - DNA, 250 bp, Homo sapiens
  misc_feature 81: n = A,T,C or G
aattaaggcgggcctcctgggcagcatcgatgaaggcctgcgtctgctcgtcgtagggcggcattttgtcttcctcagcanagcggcggcggcggcggcggcggtggcggaggcggacacattggcgtgagacctgggagtacgttgtgccaaatcattgccacttgccacatgagtgtaaatgatggcggatgccaagtatgtcctctgccgatgggaaaagcgattatggcctgcgaaggttttggcc

SEQ ID NO: 19915 - DNA, 399 bp, Homo sapiens
  misc_feature 30, 31, 35, 57, 62, 72, 78, 80, 81, 86, 91, 92, 109, 115,123, 133, 153, 156, 159, 161, 190, 193, 200, 211, 224, 270,303, 314, 316, 334, 399: n = A,T,C or G
agtacttctagaattaattaagggcggggnncggnggctcacccctgtaatcccagnacttngggaggctgnggtggncnnatcantaggnnaagaaatctagaccatnctggcnaacagggngggattaaanaactgttttttttccactanagngancnaaaaaggacggatctcccggttgactggnttnggagcanatgggacacancagcttctgaccncctcctggttctcctgcaaataaatttctcagatgcatatatttanggaaccaattcatcaatgaaaataacaaaaccntctggctctananacttaaaaaaaattttanaggttgtaaacatttacattctgatgaaaaagtgtgtgtctaggttttatttcaaggatttgatn

SEQ ID NO: 19916 - DNA, 109 bp, Homo sapiens
  misc_feature 66, 67, 90: n = A,T,C or G
gtaccgggccccccctcgagagtacttctagaattaattaaggcgggggggggaggtgtattgaanncctccaaacaaccctcaaatttnatgatttcctactataact

SEQ ID NO: 19917 - DNA, 394 bp, Homo sapiens
  misc_feature 73, 102, 113, 178, 221, 239, 247, 249, 250, 251, 265, 267,276, 282, 283, 289, 293, 300, 304, 308, 309, 313, 315, 317,318, 320, 321, 322, 324, 325, 326, 329, 333, 346: n = A,T,C or G
tacttctagaattaattaaggcgggcggattgcctgaggtcaggagttcgagactagcctgggcaacatggcnaaactccgtctctgctaaaaatacaaaanattggccggtngtagtggtacgcgcctgtaatcccggctaaactggaggctgaggcgcaagaattacttgaacccngaaggtggaggttgtagtgagcccagatcgtgcacctggactntttggactgtgtctcacnctataaanannnttgaaaataaaacngnccccccccnggggannacctcntttnccccttntganaaanntttntncnncnnntnnnggntttnttttccatagtangcctaaaagcagccaccaattaagaaagcgttcaagctcaacacccac

SEQ ID NO: 19918 - DNA, 404 bp, Homo sapiens
  misc_feature 19, 21, 24, 29, 38, 40, 41, 42, 62, 65, 66, 67, 71, 73, 74,81, 83, 84, 85, 88, 89, 90, 93, 94, 107, 110, 125, 127,128, 129, 133, 142, 143, 155, 159, 163, 167, 207, 216, 246,247, 252, 255, 346, 381, 390, 392: n = A,T,C or G
gactggccgtcgttttacncnggnaacangtatgaccntnnnttctggccggcgttttacantannnaaanannaaaaccntnnnttnnnggnnggggttttccttnaanaaaaaaaaaaaatgntnnncttntggggtgtnnctcccgtgtganaaanaaantggncaggctcaaaaatgatgggtcgcgttctgcctactgtttnaggaccacnctggccagggtgtcccccaaggtgcctttnngcctntgnaatccctgttacgggcccacggaaagcctgtggatgcccaccagctgctgaggggtccctgtgatggtttagatctgaaatcatactcagntctttggccatgttctggaaggctagaattgtttngtcactgtnantatggaaatccc

SEQ ID NO: 19919 - DNA, 137 bp, Homo sapiens
  misc_feature 19: n = A,T,C or G
gtaccgggccccccctcgngagtacttctagaattaattaaggcggggagcggctatttttcctaaatgagaattgttacattgcaaattgttgaataaaatattttgcgctccttcaaaaaaaaaaaaaaaaaaaa

SEQ ID NO: 19920 - DNA, 102 bp, Homo sapiens
  misc_feature 53, 67: n = A,T,C or G
agtacttctagaattaattaaggcgggatttttgaatacctcactacaattgntttccccttctaanttatcttcccttaataatatttatgataccaggac

SEQ ID NO: 19921 - DNA, 727 bp, Homo sapiens
  misc_feature 15, 23, 26, 35, 96, 103, 111, 120, 134, 161, 231, 265, 273,280, 288, 290, 297, 303, 309, 312, 313, 315, 318, 320, 324,331, 349, 350, 351, 355, 359, 375, 376, 377, 378, 380, 381,393, 400, 404, 418, 575, 591, 657, 666, 684: n = A,T,C or G
gccgtcgttttacancccgaaanaangggaacctntgctgggtgccgggccccccctcgagagtacttctagaattaattaaggcgggtggatctnctgaggncaggagtntgagaccancctggccaacatantgaaaccccgtctctactaaaaatacnaaaatcaaccgcggtgtggtgggacgtgcctgtaaccccagctactttggaggctgaggcaggaaaatancttgaacccagggggaggaggttgcagtgagccnagatggcnccgatgnactccagntngggtganagaacnagactncgnntnatngnaaancaaaaanaaggcaaaggaaacaccnnncccncccnggggggaaaactgctnnnngnnttggtgaaccanaaccccncccntgggccatcttttncttaaggacaagttcctgctgcagataactagccagagcccttccctttgtttcccgtaaggaaggcttttagttagtctataatctatagaaacaacgcttatcactggcttactgtcaataaatatgtgggtaaaactctgtttgtggctctcanctctgaaggctgtcanccccctgatttcccactccacactctaaatttctgtgtgtgtgtgtctttaattcctctaatgccnctgggttanggcttctccacaactganctggtcttggcacccaaagggggtaaaattgctttaaaaggcc

SEQ ID NO: 19922 - DNA, 144 bp, Homo sapiens
agtacttctagaattaattaaggcggggctttcggagggtggtgagctagtctgcggacgctgtataccctcctccacttcccgctgcagccaataaaggccgttcctaccatcaaaaaaaaaaaaaaaaaaaaaaaaaaaaaa

SEQ ID NO: 19923 - DNA, 415 bp, Homo sapiens
  misc_feature 241, 244, 263, 266, 267, 269, 277, 278, 279, 280, 281, 282,283, 285, 286, 299, 300, 301, 318, 323, 325, 337, 343, 345,351, 353, 356, 364, 377, 382, 392, 398, 399, 411: n = A,T,C or G
agtacttctagaattaattaaggcgggcagatcgcttggcccaggagttcgagaccaacctagggcaacatagcgagaccctgtctacaaaaaaattaaccgggcacgatggcgcctatagtcctagctactcaggaggctgaggtggaggcttcagtgagccatcattgtgctactgtactcaaccctgggtcacagagtgagaccctgtctcaaaaaaaaaaaaaaaaaaaaaaaaagnggnccccccccgggggggaccnccnntncccccttnnnnnnncnnttaaccccccccnnnggggattttttttaaanagaantnacattaccctangaacancnagagcntnatnagccccangaaaatctacctntgatntggagaccangcttannaaaatcccctanaacc

SEQ ID NO: 19924 - DNA, 312 bp, Homo sapiens
  misc_feature 1, 24, 49, 55, 56, 73, 74, 79, 81, 85, 88, 93, 106, 111,112, 124: n = A,T,C or G
nctgggtaccgggccccccctcgnaagtacttctagaattaattaaggnggcgcnncacggagtggacctccnntatgncntatnaanagtgngtatatacccgcnctcanngtgctcgaactngttacggctcacttccagttagtttgaatgaaaataataattttctacttggagttgaagagggcagaatccgcagctctcatcattgtgatgtgtagcatgtctgccctctgactggacatcattgccattaactttcttctgggcatcacggcaatgtcacgatgcccagacttggagcaaggcaa

SEQ ID NO: 19925 - DNA, 723 bp, Homo sapiens
  misc_feature 620: n = A,T,C or G
gtgccgggccccccctcgagagtacttctagaattaattaaggcggggataaagacaggttggttaataggtacaaacatacagttagatagaatcagtaagttctagtgtttgagagcagattagagtgactatagttaacaatatattgtgtatttcaaaatagctagaatagaagattttaaatgttcccaatacaaagaaatggtaaatgttcaaggtgatggatatcctaaatagcttgacttgattctatgcatgtatcaagtatcacatgtacttcataaatatttacagtattatgtgtcaaaaaaactttgaaaagaataaatggagaaacatactgtacttattaattggaagattcaatatagtaaagataattacatagtcttaatgcagttcctgtcaaagtccagcaagattttttgaggacatatacaagcttattccaaaatgtatatggaagcctaagaaactagaatagctaagagttttcaaaaataaaaataaagtggaagttaccagtctacatgatttggaatggaatactacttagccaaaaagacttattatatggctatagtaatcaagactatgtgatattggtagaggggtangcaaatagatccctggagtagaatagaaaaccccagaaatagatccacacaaatatgcctaattattggcctgagacacaaaaagcaagtcatggaggaaaaa

SEQ ID NO: 19926 - DNA, 246 bp, Homo sapiens
  misc_feature 246: n = A,T,C or G
agtacttctagaattaattaaggcgggaaaaaagaatacagaatagttgggataagcagaaaataaataggaagatggtacacagccaggttaataattatacaaaatgtaaatggtcatacattcaaaggcagagattgtcagagtggattaaaaagcaagactcaactgtatgctgtctagagtaaacccattttaaatataaagacacagcttaaaaaaaaaaaaaaaaaaaaaaaaaaaaan

SEQ ID NO: 19927 - DNA, 272 bp, Homo sapiens
  misc_feature 100, 109, 117, 124, 125, 126, 127, 128, 129, 130, 144, 145,146, 149, 150, 152, 155, 157, 158, 159, 162, 165, 168, 169,171, 173, 174, 175, 178, 179, 182, 185, 186, 189, 192, 202,214: n = A,T,C or G
agtacttctagaattaattaaggcgggaaccatcctgctgttcctttagtgcaatacaataaaactctgaaattaaaaaaaaaaaaataaaaaaattttnaaaaaaaanaaaaaaanaaaaaannnnnnncccccccccggggnnnaanncntangnnnaanaanggnntnannnatnnccnccnnatnggngtgttttaanaaaacccatcangtttttaaacggctcactgctcttttcttgttaaagcttaaaaaactcacttttgcaa

SEQ ID NO: 19928 - DNA, 372 bp, Homo sapiens
  misc_feature 194, 235, 289, 343: n = A,T,C or G
agtacttctagaattaattaaggcgggaggatcgcttgagcccaggagttcaatgtttatagtgagctatgatcatgtcactctgcactccagcctgggtgacagtgcaagactgtttcaaaatttttaaaaaaaaatgtaatattaaaattgacttaacctgtttctttttacctttatagtgtggttccaanaaaattcaaaagtacacatatgcctcacatatttccatcanacaattctgatataggttttaagaacaaaagcattattaagaaaaaagatggtngctacataatgattaaaagttcaattcaccaagaagttatagaaatactaaatncatagctgcacaaaaaaaaaaaaaaaaaa

SEQ ID NO: 19929 - DNA, 353 bp, Homo sapiens
  misc_feature 1, 3, 14, 32, 107: n = A,T,C or G
ngngtacttctagnaattaattaaggcggggnaagaactgttaggcaagaatactatacccatcaaagttattgttcaaaaatgatggagaaatagtctttcccagnacaaacaaaggctgaggaaatacatcaccatgagaccagtcctacatgaactgcttaagagatttttacatctggcagccaaaagacaatatccaccatcataaaaaatacactaaaatataaaacttactgaaacaacagacacacaaaggagaaggtgaaaggaatcaaatggtatcattatagaaagctgccaaattttattatcaaagataagcaataagaaagaaaaaaaggaaaaaaaaa

SEQ ID NO: 19930 - DNA, 512 bp, Homo sapiens
  misc_feature 29, 33, 37, 38, 47, 59, 60, 62, 63, 66, 91, 118, 131, 133,136, 149, 162, 167, 169, 175, 179, 188, 203, 205, 215, 224,236, 246, 270, 271, 273, 275, 278: n = A,T,C or G
agtacttctagaattaattaaggcgggancaanattnntggcaggangctagaacacannannctnattggatttatctttgcatatgccntatgtttattacaaatgaatctggctngccggctctgaananaanacctgtcaaaaangaaaattaccctncaggntncaaatncctnaaaattaanagccaaaccaccttntnattactacanctgcgcccnactcggccaccngggacatcantgagggtggggagtcccccgttgnncncnccnatgaggaggaaattcaggtggacactgccctggccacatcacacactgacagagaggccactccggatggtggtgaggacagcgactcttaaattgggacatgggcgttgtctggccacactggaatccagttttggctgtatgcggaattccacctggaaagccaggttgttttatagaggttcttgatttttacataattgccaataatgtgtgagaaacttaaagaacagc

SEQ ID NO: 19931 - DNA, 428 bp, Homo sapiens
  misc_feature 1, 3, 22, 27, 37, 41, 42, 45, 49, 50, 60, 71, 75, 76: n = A,T,C or G
nanactggccgtcgttttacanccggnaataaggggnaccnntgntggnngccgggcccnccctcgagagnactnntagaattaattaaggcgggggtttcaccatattataagtattactaagcatgtgttgatttatggtaataatttacatttattaaagcacttactatagcatactataatgtgacaagcactgttctaagccctttgattttctacctcagttaaccctcacagtaaccctgtaaggtagatacttttattgtctccattttacagatgaggaatcagaggcccagaaaggacataacttgccccaaatcacacagtttaagtggcagaactggaattcaaaacctgcagggtctagctccggggtctgttctttaaagatgcccattaggaaaaaaaaaaaaaaaaaaaaa

SEQ ID NO: 19932 - DNA, 225 bp, Homo sapiens
  misc_feature 23, 65, 76, 77, 84, 91, 131, 133: n = A,T,C or G
taaagggaacaaaaagctgggtncccgggccccccctcgagagtacttctagaattaattaaggngggagggcagnncacaaanaaacttnctaaatttggagataattatctttctgtaagttcgttctncnccaaaaatccccatgttctcccaataatgattttatagttacttatcactttactcatgggagaattaaaacgtaatgtgtttcaactgtat

SEQ ID NO: 19933 - DNA, 603 bp, Homo sapiens
  misc_feature 17, 18, 69, 535, 544: n = A,T,C or G
accgggccccccctcgnnagtacttctagaaattaattaaggcgaggtgctgtttgtgtggcacagggnaggaggtgctcataccaggcacttctctgtgcgcatgcacacatacacacacccctcattattccatctcacaaccacaactggctttagacatagatacagtgcgcctcctccatggtctaactccattccactgtctctgcttttaaagtggaaatgctcctagtgcaaataacgcgttaaactgttgtcatttatttatacctgacagtgagtgagctaatctttttctgagatgagcttttcttgtagaattgggaggaaaatagtttttaaaaattaggaaccatacctactcagtgcctggcactatgatccagttgctgcctcaggtcacccaggcccagcgtaaaggccggggtggtgggaaggtatcatcggaagagcaaaagtggctgagccacatccaagcctggtttgctgcactctattgccaaagactgacactggcctcagtcttactcanatatggctnctcaattgggatggggaagcatctgaccaaaaacccccaggaaaaaaaaaaaaaaaaaa

SEQ ID NO: 19934 - DNA, 322 bp, Homo sapiens
agtacttctagaattaattaaggcggggtaataatggcaaaaagatagaaatatagatcacaggaatggaatagaccattctgaaatagaaccacacacattgccaactaattttcagcagaatgccaggtcaattcgataaagaaataaaaatctttccaacaaatggtgctagaataaccagaaatccataagaaaaattaaaaaaacctcatgccatatgcaaaacttaattttaaataagttataagcctaaatgtataaaattgtaaggcttttagaacaagacattgcagaaaaattttacaaacttgaataagca

SEQ ID NO: 19935 - DNA, 449 bp, Homo sapiens
  misc_feature 28, 29, 32, 41, 45, 46, 47, 51, 52, 54, 56, 58, 61, 62, 63,66, 67, 68, 74, 75, 78, 81, 82, 85, 87, 89, 90, 91, 95,96, 99, 108, 110, 115, 117, 118, 119, 120, 121, 122, 123,124, 127, 136, 137, 140, 141, 142, 143, 149, 152, 159, 160: n = A,T,C or G
  misc_feature 167, 182, 183, 184, 189, 226, 263, 285, 427: n = A,T,C or G
agtacttctagaattaattaaggcgggnnccnatgaggccngatnnntatnntncntntannnttnnnttatgnnccngcnngcntncnnntgtnngtnaccttgttntnaagcntnnnnnnnntanaaagacttnnccnnnntacccnagnactagtnncagaagngatactctaacccannntactntcacatgtatcatgggctgtgccttcatcagatctantgcatctgtggcttcacagcatgcttgggctcatttncacattctgggaggccagccanctttacctgctgaacctgagccttacgctggccactgtcaacgcccgctggctggaaccccgcaccacagctgccatgtgggccctgcaaaccgtggagaaggagccgaggcctgggtggggaggtaccaggcagccaccanggtcccgatccctaccgccagc

SEQ ID NO: 19936 - DNA, 217 bp, Homo sapiens
  misc_feature 10, 20, 23, 30, 34, 36, 87, 98, 114, 121, 128, 129, 138,141, 154: n = A,T,C or G
gtccataatngtccatgcanaanacgctgnggantncacacgaagattctataactaggtaaatgagcttaccaggtacacaggatncaaagtctacntagaaaaatcaaaagngacattnctatatnntaacaacgnaanttagaaattaatngttattatatactttttgagatgtgtttgccacattacccatgctggtgttaaactcgggagc

SEQ ID NO: 19937 - DNA, 579 bp, Homo sapiens
  misc_feature 30, 31, 34, 35, 37, 40, 51, 52, 58, 64, 67, 71, 72, 78, 80,81, 82, 85, 86, 88, 89, 93, 100, 107, 115, 118, 122, 123,124, 129, 130, 134, 137, 144, 160, 170, 171, 177, 179, 183,186, 187, 191, 203, 204, 208, 222, 224, 225, 245, 267: n = A,T,C or G
  misc_feature 271, 282, 342, 343, 344, 348, 349, 356, 397, 503, 509, 514,528, 573, 574: n = A,T,C or G
agtacttctagaattaattaaggcggggcnnccnngntcncacgtgttgtnnttactncctatnacngctnngctggntnnnaanntnnggtncaatatntaaaacngacaaganctngatnnncaagnnctanccncacctantctgacattgttggcnggaaaaagcnnattgcnantggnaanncagntacatttgatgnngaanctgctgaataaaanannacctactacgcgaaatgtcncttttaagctatttatcttacnaccncatttgtacantgggcatctgtgagcaaaactactatcttctaaatgtatttcctgcttttgtaagcattnnngatnnatcaganaattattcaaactattttttataaaatgaaagttatgattnttaaacttattgattcctcttgcccctaccccctctttttggaagatattttgattccttataaacttttaccctaagcttatatatgtttctggccaagtgcttnctggcncacanacaggccaatggangggatcaaaattccagggtggatgtatggttatggcaacattttnnaaaat

SEQ ID NO: 19938 - DNA, 430 bp, Homo sapiens
agtacttctagaattaattaaggcgggggtagggaaaaagttaagtgctatttctttttggtttatgctatccatgtattatataggctttttcatttttaaaaataaactttattgtgcatatttaaggtttacaacatgatgttataggatttatatatatagtaaaatggttactatagtgaaacaaattaacatatccatcatctcacacagttactcatttcctcccactacccatccacatcccagtggcaagagcagctgtaagctactcatttagcaaaaatcctgaatacaatacactattaataactataatccccaagttgtacatttgatctttagacttattcaactacacatttgctactttgaatcccttaccacgctactcctacctatctccccttttatactaataatctta

SEQ ID NO: 19939 - DNA, 667 bp, Homo sapiens
  misc_feature 139, 152, 173, 255, 262, 294, 304, 361, 373, 388, 395, 399,421, 444, 454, 491, 498, 499, 500, 501, 502, 506, 507, 508,509, 510, 512, 514, 517, 518, 519, 520, 522, 523, 525, 526,527, 530, 531, 534, 540, 541, 542, 543, 544, 546, 547: n = A,T,C or G
  misc_feature 548, 549, 550, 551, 552, 553, 554, 555, 556, 559, 562, 563,564, 565, 567, 568, 569, 571, 572, 573, 576, 578, 581, 584,585, 587, 588, 602, 603, 604, 606, 623, 633, 634, 636, 637,638, 639, 640, 641, 642, 646, 654, 657, 658, 660: n = A,T,C or G
agtacttctagaattaattaaggcgggggagcaatttgtcttttgctatattctccaagattatctcttaagaccatatgccccctgttttaatgtttcttacatcttgtttttactcatttctgactggacaaagttnttccaaacaattntgagaaacaaaaacacacacncagaattaacaattcttttccctgtgcttcttatgtaagaatcctcctgtgacctctgcttgtacagaactgggaaacaacncttggtnagtctcttttaagttccaaaaagccaatggangttcctaatncttttaaaatttaaaatatttggttataaatcctcccaggataccttatttccctanctatcatctccngactaaaggtttttnaaacccnccantataaatttaattaagggcggnaaggggaggggaaaaaaagtctnaaactgtggnacacggactccgcaaaaataaacatatatgtggctgnggccccnnnnnaaannnnntnanacnnnnannannnganncancccccnnnnnannnnnnnnnnnatnaannnngnnncnnnatntnttnttnntnnaaaaaaaaaaaaannngnaaaccccccccccccgngggggggggnnannnnnnnttanaaaaaaangtnnanccccccc

SEQ ID NO: 19940 - DNA, 368 bp, Homo sapiens
  misc_feature 31, 36, 39, 44, 48, 51, 54, 64, 84, 95, 97, 107, 115, 139,155, 156, 169, 188, 189, 198, 217, 232, 234, 235, 237, 244,245, 250, 253, 259, 261, 266, 274, 275, 291, 297, 298, 299,305, 306, 307, 308, 317, 349: n = A,T,C or G
agtacttctagaattaattaaggcggggccnaactntangaganggcnganaanataccacatngtctgttttcactaggtgangccaaaatatncngctttatgtntattacanttctttttaaaacactggaagacncatgttaaactctaanngtgaaggcagaanctctgctaatttttcagannaaaattctntttgaaaaaaagctgcccnaaaaaaaaaaaatangnngnccccccnnggggnaancccccntnccccntggatctnntggggggaaacccccnatcctnnngcactnnnnaaaataaanatttgcaactagcaatgcaattttttctaaanatggggatatttaccttta

SEQ ID NO: 19941 - DNA, 410 bp, Homo sapiens
  misc_feature 84, 150, 256, 355, 372, 398: n = A,T,C or G
ctcgagagtacttctagaattaattaaggcgggtgtgctcttttagctgttcttaggtagctcgtctggtttcgggggtcttanctttggctctccttgcaaagttatttctagttaattcattatgcagaaggtataggggttacctanataatgccaaagtcagcatttgtcctgggttcccttgtgtgatctgtttggactatgttttcttttcttctcccacttgctcagcagcttgggcttccattctagntcttttaccaagatttttgtgtgaccatgttgacttcatttggattgccctctttcaatttccttgtgaaaacacccttaactttctctttacccttanctgaaatgtttacatancttctggtgatatcttttcatgattntatatctcttaa

SEQ ID NO: 19942 - DNA, 354 bp, Homo sapiens
  misc_feature 3, 22, 25, 27, 30, 33, 34, 37, 38, 45, 46, 48, 51, 52, 53,61, 62, 66, 67, 72, 76, 77, 97, 114, 134, 141, 143, 154,159, 185, 186, 187, 195, 198, 204, 220, 222, 226, 244, 252,261: n = A,T,C or G
ganactggccgtcgttttacanccngnaanaanngtnnacctttnntngtnnncgggcccnncctnnagagnactnntagaattaattaaggcgggnccgagcataaagttaantattttatggttcatatgtnaaaaagnanttatgtttatnaatanactaactgctggatgttaccaccaannnagaaagcnccnggtaanataggctttctctatncntatnccaagtaatttatacctncacagatngggcaattntagctaatgaaaatatacttaaaagtatttcttaggccgggcatggtggctcacacctgtaatcccagcactttgggaggccgaggcgggcgg

SEQ ID NO: 19943 - DNA, 425 bp, Homo sapiens
gtgccgggccccccctcgagagtacttctagaattaattaagggggggaagttgagctagcaatgggcatttctattatttaagttacatatcagtttccaggaatatttttcaaatgggacaaactaaaaagttgaggactagagcatcgtagtgtctaagtgcacctaataacttaatgcatgtgcacacaccctcagttaatttgtaagagagtgacttctcattgttatttgtggagaggctaattatagtagcttcattctttattttctgtgttcttaaatttttttttacatttgaaagtatgaaaatactatttttgacactttactgatactcagggattaaaagttaaattttactgactgtagcagcaggtaaatctcttaaatttactcaggtttcctatcctttgcctccat

SEQ ID NO: 19944 - DNA, 192 bp, Homo sapiens
  misc_feature 171, 172, 173, 174: n = A,T,C or G
agtacttctagaattaattaaggcgggggaatgttcaactgtaagtgattaattcaacgaatatttagtgagcgcctactatgtgccaggcattgtggatttataagtgcaagctgtgtctggttccttctcccctagaacatgctgtacagtggaagagacaaatttccnnnnaaaaaaaaaaaaaaaaaa

SEQ ID NO: 19945 - DNA, 738 bp, Homo sapiens
  misc_feature 61, 80, 107, 111, 139, 143, 146, 161, 196, 212, 232, 282,283, 285, 302, 304, 305, 318, 328, 345, 347, 352, 377, 382,385, 389, 391, 393, 394, 418, 423, 428, 436, 442, 445, 447,458, 459, 464, 465, 467, 475, 480, 497, 505, 510, 515: n = A,T,C or G
  misc_feature 621, 622, 625, 626, 628, 631, 634, 635, 636, 638, 641, 645,651, 652, 659, 661, 673, 676, 680, 682, 688, 693, 695, 698,700, 703, 706, 711, 716, 732: n = A,T,C or G
ctcgagagtacttctagaattaattaaggcgggtgaaagctccgtcttctgaattcatctntacaggctcaaaactcctntttgatatcagacctgatgttattttncttnttttggagggcatttgtttggttaaganggcntcntaggactttggaatntcaacccagattttaccttggaacccaggaggcanagcgaaaaagtgttgnggggaatcaaatactgcatntttcctctgggccaccaaacataaaggatagtggccgagtttacaagaanntngattgggcggggcatangnngtgcctttctggnacattgccancacttttgggaggcctngngcggngctgggaccacttggaggccagganttttnganaccntncnngtaccaacattggtgaaaaccccnttttnttttnttaaaaanaaaaanaananaattttaatgnntgganngngggggggnccccncccggctgggaaataanaaatgggncccgnggggnatttggttaattaccaccacctggaaaaattttcttggactttttctggaaattttaaaaatggtaagaaaataaaaattttttacccaaacctttgggaaaaaannaanngnccntannngnggnaaanaaaaannggataanancggggggaatgnggngggngnattttntgganangancnagnaanaaaanaaaanaaaaaaaaaaaaaccncccccc

SEQ ID NO: 19946 - DNA, 385 bp, Homo sapiens
  misc_feature 30, 31, 36, 40, 46, 55, 56, 76, 78, 88, 95, 120, 123, 129,131, 152, 156, 161, 165, 169, 179, 181, 194, 203, 221, 276,278, 279, 283, 284, 292, 296, 316, 323, 326, 327, 329, 337,338, 339, 340, 353, 354, 367, 368, 375: n = A,T,C or G
aagtacttctagaattaattaaggcggggnnagatntgcngagttncttttactnnttttaacctttccttatgancntgcctgtgtngggtgtncactgaggtgctggctgcggcgatnggncttgtnanctactacttggcctttagtgnaaanagccncatncagncctgagggcngnaccccagccctgnccttgcttncttcaataaacatcacangcacctgggactgcgcaggaaaaacaaaactccatctcaaaaaaaaaaaaaaaangnntttnnaaaaattngggncgggaaaaccccccccctcnggggggnccnncnaccccctnnnnaaatttcaaaaannccccccccggggnnccttttnaaaaaaaaag

SEQ ID NO: 19947 - DNA, 439 bp, Homo sapiens
  misc_feature 320, 321, 322, 323, 325, 326, 327, 328, 329, 330, 331, 332,333, 334, 335, 336, 337, 338, 339, 340, 341, 342, 343, 344,345, 346, 347, 348, 349, 352, 353, 354, 355, 356, 357, 358,359, 360, 361, 363, 364, 366, 367, 368, 369, 371, 372: n = A,T,C or G
  misc_feature 373, 374, 381, 382, 383, 384, 392, 400, 403, 404, 408, 411,413, 414, 416, 419, 420: n = A,T,C or G
agtacttctagaattaattaaggcgggatggctgtgaaggaaggctggggaggggcaaggccggctttctggaggtgtgcaggaagagcgaactggggacaggtgggggctggattcactggacaatacatgccaacacttggacctatgacacggaggcccgggggccacgccagcctcaattcagagccacaaacggcctggacgagttactgaaggcatcctcagcagagacatcgggggtggaggtcctgagaaatatccccacccaattccttctcttgagtaaagtgattttcattaatccttttccaccggannnntnnnnnnnnnnnnnnnnnnnnnnnnnaannnnnnnnnnanntnnnnannnnaaaaagnnnncccccccngggggggnccnnattntcntnntnagnntttttttcccccccccccc

SEQ ID NO: 19948 - DNA, 127 bp, Homo sapiens
  misc_feature 36, 81, 84, 86, 92, 94, 96, 112, 127: n = A,T,C or G
agtacttctagaattaattaaggcgggggaaaaggntatagctttgccttgagattgactcattaaaatcagagactgttnaananaaaaanananaaaaaacaaagaaaangaaaaaaaaaaaaan

SEQ ID NO: 19949 - DNA, 492 bp, Homo sapiens
agtacttctagaattaattaaggcggggtagctatattaatatctgatgaagtagggagtaaagaaatttactagggacagagtaagacattatgtactgataagatattcaactcaccaggaagacctaatgatcctaaatgttcatgcaccagacaacagagcctcaaaatacatgaagcaaaaactgatagagcagaaaaaagaaatggataaatttacaattgcagttggggacctactctcagcaactgataggattattaaacaaaataagcaagaatatagaggatctgaacaatataatcaactaaaaggatctaattaatttatatagacctctactcaataacagtataacactattttttccaagtgcctatacagctattcacaaaggtagaccatatattggaccataacacaaaccttaatgcgtttgaaggaactgtaatcatatacaatattttctctgaccataatgaaatcaag

SEQ ID NO: 19950 - DNA, 268 bp, Homo sapiens
  misc_feature 58, 65, 68, 74, 89, 95, 122, 125, 182, 188, 208, 213, 232,233, 252: n = A,T,C or G
aagtacttctagaattaattaaggcggggatacaatgagagagaaacaatattactantatgctncancctgtntaatcacaatagaanttatanatatgatgtcttcctaagtgtattggnagncctgacttttaataattatacattgatacccctagaccttttacatattttgaattnggaacnttcatctatcatccctcaancaaangtataaagttatcactcanngacactgtcagttaaacanaatagcttaatttcag

SEQ ID NO: 19951 - DNA, 403 bp, Homo sapiens
  misc_feature 37, 46, 55, 58, 69, 89, 116, 119, 181, 182, 201, 236: n = A,T,C or G
agtacttctagaattaattaaggcggggttatgaatnataaacagntttatgatnaantccaatcgttnaattgttattgaaagatagncttatatttttaagtcctattttgctnttnaacccttgtttatacttttgttcagtgctttgctctcctggtgtcaccttcataataataanncaactttgatcaataaaanaaacaatcttctggatgcagttggccagtgtgaanagtatgtgctcaaacatctgaaatcaatcactccaccgtcccatgttgtagatttattggactccattgaggatatggacctttgtcatgtagttccagctgagaaaaagattgatgaagctaaagatgaaagactctgtgaaaataatgctgagtttaacaaaaac

SEQ ID NO: 19952 - DNA, 697 bp, Homo sapiens
  misc_feature 360, 472, 513, 540, 544, 567, 569, 571, 601, 609, 624, 629,641, 652, 653, 661, 665, 682, 684, 686: n = A,T,C or G
gccgggccccccctcgagagtacttctagaattaattaaggcggggggggaataatatgtggtttttgtacaagcatgtttctcagtgtgttgttattttggaaaaaatgaggggagggagtttggcaagaatggagaaaatgaatgaagaaggcctaatctctctctttttcagtgaataaatggaacaccatttctggattctagtcccattctctgcattcatacaccagtttcttcatatatcctatgaagaacctaaacatttggccccacctggtcttggtttgatcagcagttaaaattctgtgactcgggcttccttcccgactgcccaccttcatgatgtgtaaggaacanacattttgagggtacctcacccactgttcatttgcgtggtcaaagtgaaaatgagtggaagttctccaaaaatgatggccaacatcctggcacctcaggtgtgagaaaatanctttgcttggtgaatgggataatgttttgtcaagatgccanttttaaaacaagtcccaaattgggaangcangccttgaaggccagaaaaattcntntnaaccctttgggggacaacttttttgggtanctcacaanatattaaaacccctntgccngaaaaaaaaaanaaaatgaattnntttttcanggangcctttattaaattccnantngaaaccaaaaa

SEQ ID NO: 19953 - DNA, 711 bp, Homo sapiens
  misc_feature 179, 181, 187, 191, 196, 207, 213, 218, 221, 223, 225, 232,240, 241, 243, 247, 251, 254, 259, 265, 269, 272, 275, 278,280, 283, 289, 291, 292, 294, 295, 301, 307, 310, 314, 316,319, 323, 324, 329, 330, 331, 335, 340, 348, 351, 355: n = A,T,C or G
  misc_feature 358, 361, 365, 382, 386, 389, 394, 397, 400, 402, 405, 411,417, 420, 430, 431, 440, 443, 447, 456, 462, 468, 488, 489,490, 516, 518, 530, 532, 533, 549, 550, 551, 563, 565, 566,574, 582, 583, 593, 596, 608, 609, 624, 625, 636, 640: n = A,T,C or G
  misc_feature 660, 674, 683, 685, 689, 694, 695: n = A,T,C or G
ctcgagagtacttctagaattaattaaggcgggcgcctgcaatccccactactagggaggctgaggcaggagaatcacttgaactgggaatgcagagattttagtaagctgagatcgcgccattgcactccagtctggacaacaagagcaaaactccatttcaaaaaaaaaaaaaaatntnttaaantttnatttnttgggccctgncaaaanaggtnaantncnggactgntttttaanntngcantttnttnaaatncaaatnctanttnaanggncntantttttncnnanntccaancctggnttngggntnaantttnnttttnnncaanaaaanggttaatnganggtnaancanggtntaaattatccttccctntccnaangacanggnctnanatnggcatnccttcnatnctttacccgnntaaaggggncantttntttttaaanaaactnttggtnggaccctaaggcctgctttnnncttggggcttttcccaaaactttttncnttttttttcctntnncccatttttctttctnnnaaaaaaaaccantnntaaacccnggtttttnnttttttcccnaanggggaaaaggtnnaaccccggggaattnncccccctttanttcnttccccaaaaaggctttccntttttcctttttanaaaaaaacncncccnccccnnaaattttttttttttt

SEQ ID NO: 19954 - DNA, 593 bp, Homo sapiens
  misc_feature 133, 161, 164, 199, 214, 217, 238, 250, 254, 258, 260, 262,279, 291, 292, 298, 301, 315, 350, 353, 355, 359, 366, 370,375, 376, 382, 390, 393, 398, 403, 404, 414, 416, 423, 436,438, 439, 454, 458, 490, 499, 504, 513, 515, 537, 550: n = A,T,C or G
  misc_feature 554, 556, 558, 559, 562, 563, 565, 571, 572, 574, 575, 576,577: n = A,T,C or G
tatactgaacaggtgatgggtgcaccataatctcacaagtaaccacttaattacttacgcatgtaaccagataccacctgttccccaaacacctatggaaataattttgttttttttttaaaaaaggaatganatcatgtccttttgcagggacatggatnaanctggaagccattatcctcagcaaaactaaccaganggaaccaggaaaccnaanccccacatttttcttcacttngtaaaccggaancctnaacnantngaaaccccccgggcccngggggttgaaannaacccnacncttgggccctggantccaggggcccttaaccggggggaaaaacctttanggnantacntagcctnaagnctttnngggggnttaaatanccnagggngaaanngggttgaaangngggcccnccaaacccccccntnngggacacactttttncccntttttttacaaaaaccccccaaaaattctttngcctttttnttttncccaaaacntnaaaaatattttttttaaaaaantctcccccgaganaaanantnntgnnanataaanntnnnncccgcgcccccccccc

SEQ ID NO: 19955 - DNA, 224 bp, Homo sapiens
  misc_feature 7: n = A,T,C or G
gaataangaaataacaccaggcaataacttaaatctttagggaacaaaatgaacagatttcgaaattgtaaataagattattataagctaaatgtttatgtccccctcccccccaaattaatatgttaaagcctccagagtaatgatatttgaaggtgaggtcttcaggagttaatcaggtcataatttggagccctctttaatgggattagtgcctttttaaa

SEQ ID NO: 19956 - DNA, 265 bp, Homo sapiens
  misc_feature 68, 177, 201: n = A,T,C or G
agtacttctagaattaattaaggcaggagagtggcgtgaacccgggaggcggagcttgcagtgagccnagatcgcaccactgcactcccccctgggcaacagagcgagactccatcttttaaaaaaaaaaaaaaagaattagtaaagattcaccaggggttgagctcagggattgcngtgggggacctgacaattctctangcaaagggaatgacctggataaagatacagaggcaagcaaacattgctaaaaatagtatccttt

SEQ ID NO: 19957 - DNA, 476 bp, Homo sapiens
  misc_feature 53, 114, 115, 121, 122, 128, 129, 130, 136, 141, 144, 165,166, 179, 195, 201, 207, 213, 254, 406, 410, 417, 428: n = A,T,C or G
agtacttctagaattaattaaggcgggttaagaaagctaaatcttccatcatnttccacagatagaattgaacatatatcaatctggaagttctaaaattagcaaaataagcannttattnntttttnnnatggantctcnctntgtcccaaggctcaagtgcannggcgcgatctcanctcactgcaaagccgntagganacaganattacnggttttctgactcaagtctgcattcttgactccaactacanaacctgcactatctgccaggccaggcacaccttcccctgaaaccccgtaaggtatttgaaaatgaccaggggtggttcttggctgccacaatgactgagtcctatgcctggccacgacagaagtcttgacactgtactacactaaactgcanaatnaaaaacnattgccatganagggtatctagtccaaccatcctctggcagacaaggacccccagactc

SEQ ID NO: 19958 - DNA, 421 bp, Homo sapiens
  misc_feature 84, 143, 144, 150, 151, 153, 154, 157, 158, 159, 160, 162,170, 172, 178, 179, 191, 203, 205, 206, 207, 208, 211, 213,218, 226, 227, 230, 234, 235, 236, 238, 242, 243, 245, 246,248, 253, 268, 274, 277, 278, 280, 291, 295, 301, 311: n = A,T,C or G
  misc_feature 315, 316, 320, 321, 322, 323, 326, 329, 339, 341, 361, 370,375, 381, 391, 395, 396, 407, 412, 416: n = A,T,C or G
agtacttctagaattaattaaggcgggagaatcacttgaacccgggaggcggaggttgcagtgagctgagattgtgccactgcnctccagcctgacagagagagactccgcctcaaaaaaaaaaaaaaaaaaaaaaaaaaggnntttttnncnnggnnnncncaaaaaantntttaannccaagggttttnaattcccccttnannnnccnanttttnaaaaaaannttnaatnnnantttnngnngnaaaanacccccaaaaaaaanaaaaancanngnatttttggggncccncccttnaaaaacattngggnnttannnnggnaancaaatttttnangtggggggggaaaaaccggnaaaaaaaanctttnccaaanaaatttttancccnnccccttttttnccccncccnaaaaa

SEQ ID NO: 19959 - DNA, 251 bp, Homo sapiens
  misc_feature 29, 33, 40, 57, 68, 70, 77, 85, 94, 127, 141, 149, 170, 210: n = A,T,C or G
agtacttctagaattaattaaggcgggantatnatgagcnatttatgtcaactaatntgacaattganangaagaanttctatcnaagacacanactgcaaaagctcattcaggaagaaacagatanccttatgactattnagtaaatnggatttacagctaaaaacctntccacaaagaaaacccagatagcttcactgctgaattctnttaaacttaagaggaagaaatactacaaattctacacaaac

SEQ ID NO: 19960 - DNA, 633 bp, Homo sapiens
  misc_feature 77, 291, 333, 335, 337, 354, 357, 360, 362, 369, 371, 372,374, 375, 378, 379, 382, 384, 393, 395, 396, 398, 400, 407,408, 416, 419, 420, 428, 438, 455, 483, 487, 491, 494, 495,502, 511, 512, 527, 535, 543, 547, 554, 557, 558, 559: n = A,T,C or G
  misc_feature 560, 563, 592, 611, 618, 621, 631: n = A,T,C or G
agtacttctagaattaattaagggggagggtcagggaagaacgaaccttgacgttgcagtgcagtttcacagatcgntgttagatctttatttttagccatgcactgttgtgaggaaaaattacctgtcttgactgccatgtgttcatcatcttaagtattgtaagctgctatgtatggatttaaaccgtaatcatatctttttcctatctatctgaggcactggtggaataaaaaacctgtatattttactttgttgcagatagtcttgccgcatcttggcaagttgcanagatggtggagcgaaaaaaaaaaaaaaaaaaaaaaaaaaggngngnccccccccggggggganccncantnccccttntnngnngannttnanccccccctnanngncngtttttnnaaacaccnttnngtataaangaatggcagntcaacccacggatgaanagaaaaggggacaacctaaaatggggtnaacnaatnggnntcttttntaaaatagnnttttttcctttgaanagccttanggatcccntttncctatgnggnnnnctnatgtaatgtatctcccaatactagggggnattttattttagaaagccnaaatttnttngatggggccnaa

SEQ ID NO: 19961 - DNA, 763 bp, Homo sapiens
  misc_feature 226, 227, 228, 229, 230, 231, 232, 233, 234, 235, 236, 237,238, 239, 240, 241, 242, 243, 244, 245, 246, 247, 248, 249,250, 251, 252, 253, 254, 255, 256, 257, 258, 259, 260, 261,262, 263, 264, 265, 266, 267, 268, 269, 270, 271, 272: n = A,T,C or G
  misc_feature 273, 274, 275, 276, 277, 278, 279, 280, 281, 282, 283, 284,285, 286, 287, 288, 289, 290, 291, 292, 293, 294, 295, 296,297, 298, 299, 300, 301, 302, 303, 304, 305, 306, 307, 308,309, 310, 311, 312, 313, 314, 315, 316, 317, 318, 319: n = A,T,C or G
  misc_feature 320, 321, 322, 323, 324, 325, 326, 327, 328, 329, 330, 331,332, 333, 334, 335, 336, 337, 338, 339, 340, 341, 342, 343,344, 345, 346, 347, 348, 349, 350, 351, 352, 353, 354, 355,356, 357, 358, 359, 360, 361, 362, 363, 364, 365, 366: n = A,T,C or G
  misc_feature 367, 368, 369, 370, 371, 372, 373, 374, 375, 376, 377, 378,379, 380, 381, 382, 383, 384, 385, 386, 387, 388, 389, 390,391, 392, 393, 394, 395, 396, 397, 398, 399, 400, 401, 402,403, 404, 405, 406, 407, 408, 409, 410, 411, 412, 413: n = A,T,C or G
  misc_feature 414, 415, 416, 417, 418, 419, 420, 421, 422, 424, 426, 431,480, 489, 542, 547, 580, 586, 587, 592, 598, 604, 613, 631,638, 641, 644, 665, 690, 708, 715, 728, 745, 754: n = A,T,C or G
agtacttctagaattaattaaggcgggagaatcgcttgaacctgggaggtggaggttgcagtgagctgagatcgcaccactgcactttagcctgggcaacagagctagactcttgtctcagtaaataaattaaccgagtgcggtggtgtgcagttactaattccagttactacagaactagactccatctcaataaattaaaaaaaaaaaaaaaaaaaaaaaaaannnnnnnnnnnnnnnnnnnnnnnnnnnnnnnnnnnnnnnnnnnnnnnnnnnnnnnnnnnnnnnnnnnnnnnnnnnnnnnnnnnnnnnnnnnnnnnnnnnnnnnnnnnnnnnnnnnnnnnnnnnnnnnnnnnnnnnnnnnnnnnnnnnnnnnnnnnnnnnnnnnnnnnnnnnnnnnnnnnnnnnnnnnnnnnnnnnnntngngcaancctgaatgggcgaatggaaattgtaagccgttaatattttgttaaaaanttcgcgttnaaattttttggttaaaaccagcttcatttttttaaccaataaggcccgaaatncggcnaaaatccccttttttaattcaaaaaagaatttnacccgnngatangggttngaggtngtttgtttncaatttttgggaaccaangaagttnccnttntttaaaaggaaccgttgggancttccaaccgttcaaaagggggcgnaaaaaaacccgttttttnaaagggncgaatgggcccanttccttggaacccattnaccccttantcaaaagtt

SEQ ID NO: 19962 - DNA, 415 bp, Homo sapiens
agtacttctagaattaattaaggcgggaggatcgcttgagcccggagggttgaggctgcagtgggctgtcattgtgccactgcattccagcctaggcaacaaagggagatgctgtctcaaaccaaaaaaataaataaataaataaaaaagaataattagtagtgatgggaaaaagaaaacttgaacaatcacacaggaggcaggataatagtctattactgcctaacaaattacctaaaaacttagtgggttaaaataacaaatacttatcgtgtctgttattgtaggtcaagaactgggaagaagctcacctgggtggccctgactcagggtctctcatgaggttgcaagtccacacgtaggccagggctgcagtcgtatgaaggcctgacaggggctgatggatctgcttata

SEQ ID NO: 19963 - DNA, 316 bp, Homo sapiens
  misc_feature 24, 25, 26, 217, 219, 227, 232, 246, 249, 257, 258, 260,261, 264, 266, 274, 277, 278, 284, 285, 286, 287, 288, 289,290, 291, 296, 300: n = A,T,C or G
tgggtaccgggccccccctccggnnntacttctagaaattaattaaggcgggggttgagctgagaagaggccagtgcactcaagcctgagcaataagaataaaaccgagtagaacaaaataaaaaattcaaaaaacaaaacaaaacccacactccaaaaactaacaaagaataaataaataatataaaaataaaaaaaaaaaaaaaaaaaaaaaaanangggggccnccccnggggggggcccccnttncccccttnntnnaantntttaaaanacnntttttnnnnnnnnttttnaaancccccccccggggggg

SEQ ID NO: 19964 - DNA, 496 bp, Homo sapiens
  misc_feature 36, 51, 56, 64, 65, 73, 74, 84, 85, 93, 94, 102, 104, 107,143, 145, 151, 152, 155, 163, 304, 320, 375, 383, 390, 395,407, 413, 431, 437, 443, 448, 449, 450, 451, 452, 453, 454,455, 456, 457, 458, 459, 460, 461, 462, 463, 464, 465: n = A,T,C or G
  misc_feature 466, 467, 468, 469, 470, 471, 472, 473, 474, 475, 476, 477,479, 481, 496: n = A,T,C or G
agtacttctagaattaattaaggcgggggaccatangggatataaaggctncactnaatactannagcctgannaactgcttgnntgatttgnntaatgaangntgntctgttatcacactgcatagaggtggcaaggctaancngagganntanttctgacnataacggaagaaatcgactgctgtggccttatcagaccctgtaggaaaggccttattcagtgaaagtgtctatttagactaagaggtattttagtttcctgactcacggcatattgagtaaagctaatttgccagtcctgngtggtggcaaatcctncacttgatgtgtagggaagggaagggggcctgaataaatccctgaggagtagtanaaatagcnggatggnaatancagatgggaacncctggnaaagttttttcccttggnggatanaatttnttccnnnnnnnnnnnnnnnnnnnnnnnnnnnnnntngnggggccccccccccn

SEQ ID NO: 19965 - DNA, 427 bp, Homo sapiens
  misc_feature 398, 401, 403, 406: n = A,T,C or G
agtacttctagaattaattaaggcggggcaggggggtatgaaaaaaatcttccatattaaaatggtttgcattgctccaaagctgagccctacttgacaaaaaccttactcctcagtatttaattcctctcattgtgttttcttgggtatcccacaagcaacattaatatggaagatacagtaaatgtgtgcaagaacactgctataaaactatggcagcagatggctgtgattggaagactctatccattgctagatctccaagtcacattgaatgggaggccatttgactgccttgtggctgatctttagagcttttgtgtgtagcttaggctctgataattaaacaaaaatagtttatattttactatttaattcaaaaggttatttaacacatnttnanttntggtaagtactcaaaagacta

SEQ ID NO: 19966 - DNA, 445 bp, Homo sapiens
  misc_feature 20, 22, 375, 388: n = A,T,C or G
gtgaccgggccccccctcgngngtacttctagaaattaattaaggcgggggctgaggaaagaggaatcagattaattctctgggttgcaaagaggctattctgcaagccccttacagtggccctgaaagctcaataagtgttttgtacctcttgtaaatgtgccattgtgtgaagcattaaacccaacatctagaattcaggattcatccagaataaaaggatgtaaaatctttcccaacagaagagtgttacttttggtcagacaacttcatgggttcttactgcacattaaattatgacttatggaacattgcaatatattctcggtccttaagttatgacttatgggaacattacaatatatttcttcgggnccagtgagtaagnttttttgcttttttgtgaattccattaaaaattccaaaaaaaaaaaaaaaaaaaaaa

SEQ ID NO: 19967 - DNA, 347 bp, Homo sapiens
  misc_feature 170, 180, 181, 186, 187, 195, 197, 199, 200, 201, 204, 205,208, 214, 217, 219, 229, 235, 240, 245, 247, 256, 257, 262,274, 278, 289, 291, 299, 300, 308, 310, 311, 314: n = A,T,C or G
ggccccccctcgagagtacttctagaattaattaaggcgggagtgggccctggttcaatgtttgctgatggggaagatggcaaaaacaagcctgcccaaccagaaaaaaaaaaaaaaaaaaaaaaaaaaaaaaaaaaaaaaaaaaaaaaaaaaaaaaaaaaaaaaaaggncccccccccnnggggnnccccttgnancnnntanncangatttnttncncccccccccnccccanttttntatananaaaaaaaannaaagntaaaaccaagtntttnggagaaatttngnaaatattnnaaaaaatntnnaangccaaaaaatttggataaaaattagccacttaa

SEQ ID NO: 19968 - DNA, 295 bp, Homo sapiens
  misc_feature 20, 200, 201, 202, 203, 204, 205, 206, 207, 209, 220, 227,235, 237, 239, 242, 243, 244, 247, 251, 252, 253, 254, 255,271, 273, 274, 275, 276, 277, 278, 281: n = A,T,C or G
taccgggccccccctcgtanagtacttctagaattaattaaggcgggggggcctgtgtcctggtggcttgaagccacatggagggagtttcattaaatgctaactacttttaaaaaaaaaaaaaaaaaaaaaaaaaaaaaaaaaaaaaaaaaaaaaaaaaaaaaaaaaaaaaaaaaaaaaaaaaaaaaaaaaaaaaaaannnnnnnncnccccccccccnggggggncccccccncncnccnnnaanaaannnnncccccccccccccccncnnnnnnttnaaaaaaaaaaaaaa

SEQ ID NO: 19969 - DNA, 183 bp, Homo sapiens
  misc_feature 30, 39, 45, 51, 59, 63, 68, 79, 92, 95, 98, 112, 115, 116,120, 121, 123, 132: n = A,T,C or G
acttctagaattaattaaggcgggagcaangtgactgangacacnagcagnggttctgngttncccanatgcccggaantggtggtggccgngtntgncaagcctggagacncgnnatcnnantgtcaaganatttgcgtgattgaagccctgataatgcagaatagtatgacagctgggaaa

SEQ ID NO: 19970 - DNA, 587 bp, Homo sapiens
  misc_feature 85, 265, 276, 284, 285, 288, 290, 291, 297, 299, 300, 304,306, 307, 310, 313, 315, 321, 325, 328, 330, 335, 342, 343,344, 345, 346, 347, 352, 365, 369, 370, 374, 377, 383, 386,390, 391, 421, 424, 425, 432, 435, 439, 441, 445, 453: n = A,T,C or G
  misc_feature 460, 463, 466, 472, 483, 489, 492, 503, 504, 507, 508, 520,523, 542, 546, 553, 554, 559: n = A,T,C or G
agtacttctagaattaattaaggcgggtggatcacgaggtcaggcgattgagaccatcctggctaacacggtgaaactccatctntactaaaaatacaaaaaattagccaggcgcggtgccaggcacctgtagtcccagccactggggaggctgaggcaggagaatggcgtgaacccgggaggcggagcttgcagtgagccgagatcgcaccgctgcactccagcctgggtgaaacagtgagactctgtctcaaaaaaaaaaaangggaaaaaaantccgggcnnggncnngggggntnncccntnnatnccnancctttnggtnggntnaaacnggggggnnnnnnggtcnggaaatcaaaacnttcnnggtnaanaggggnaancccnnttttttttaaaaccccaaaaaatttccccnggnntatgggnagncccntntatncccggttnttagggnggntgnggcagnaaaatggcttnaccccnggngggggaccttnnatnnacccaaaattgnccnattacctttacccgggganccanttgaggnnaaaantccttttccaaaatttaaaaaaaaaaaa

SEQ ID NO: 19971 - DNA, 421 bp, Homo sapiens
agtacttctagaattaattaaggcgggggaggcctcacaatcatggcagaaggcgaatgaggtgcaaagtcatgtcttacatggcaccaggcaagaataggagttgtgccggggaactcccatttataaaaccatcagatctcatgagacttattcagtaccatgagaacagtatgggagaaacttcccttatgattcagttatctccaccttatcctgcccttgacatgtggggattacaattcaaggtgagatttgggtggggacacagagccaaaccatatcaagttgtatgccaacaaattaggtaacctaaatggaatttatacaaattcatgtagatgcaaatggccataactgactaaagaatttgaaaatctgaataggccaataacaggtaaagagattgaaatagcaatca

SEQ ID NO: 19972 - DNA, 674 bp, Homo sapiens
  misc_feature 1, 583, 596, 611, 619, 629, 630, 631, 632, 633, 634, 635,636, 637, 638, 639, 640, 641, 642, 643, 644, 645, 646, 647,655, 656, 662: n = A,T,C or G
ngccgggccccccctcgagagtacttctagaattaattaaggcgggaataaaaaaagcggaaacagctgacttgaacaacacagtagattaaacactgacagatacacaactttccatccaacagcagcagaatatacattcttctcaagtgcacacagaatcttctctgagatagatcaaatcttaggtcacaaggcatactacaaatttaagaagtttgatataatgccaagtatcttctcattccacaatggaataaaattagaagtcaataacaaagaaaacagaaacatttacaaaaatgcagaaactaaataacacatgcttaaacaaccattgggtaaaagaagaaatcaaaagggaattttaaaaatatcttgagacaaacaaaaatgaacatacaactcaacaaaacttacaggattcaataaaagaagtgctaagagggaaatgttacagtgataaatacctacattaaaaaataagaaagatctaactcgaacaacctaactttacaaataaacaattagaaaaagagaaactaactaaacccaaagttagcataatgaagttaaattaatnaagatgagaattnttaattaaattactnttaaattngaaaacccgnnnnnnnnnnnnnnnnnnnaaaaaaanncggggnccccccccgggg

SEQ ID NO: 19973 - DNA, 359 bp, Homo sapiens
agtacttctagaattaattaaggcgggagctgggtcaccggcttgaggggctgcgtgaggcgcggaggcagatcaaagaaagtgcatcacagacaagggatgttctcaaacagcattttaatgatttaaagggaacccttggaaagctcctggatgagcgattggtgacccttttgcaagaggtggacaccattgaacaggagaccattaaaccactagatgactgccagaagctcatagaacacggagtcaacactgcagaggacttagtccgagaaggtgggggaccagggagcctgttgtattagtgcattcgtccattttcacactgctgataaagacatacctgaaactgggca

SEQ ID NO: 19974 - DNA, 301 bp, Homo sapiens
  misc_feature 63, 130, 136, 143, 144, 146, 152, 154, 158, 159, 160, 161,166, 170, 171, 172, 191, 196, 197, 205, 210, 211, 212, 214,217, 250, 266: n = A,T,C or G
tgctcgtctgtgtgttttattttcatcacctgttatctgtgtttgctgaggagagtggaacanaaggggtggagttttgtataaataaagtttctttgtctctgttaaaaaaaaaaaaaaaaaaaaaaanacgggnccccccnngngggggncnccannnnccccntttnnnaaaaggttttccccccccnataanncctatttnttacnnnanaantttttttcttcgcaggattttttcttgagcctnttccactccagcctancccctaccccccaattaggagggcactggccccca

SEQ ID NO: 19975 - DNA, 207 bp, Homo sapiens
  misc_feature 189: n = A,T,C or G
agtacttctagaattaattaaggcgggtctgaatatattaagtcttaaatttatgaatgtaaaagaattgaagtgacacacgtatgtgttctgatttgcaactgagttaaattagaaatcagtaaccatgaaaaatctctaaataaattaaaatgaaaaagcccactagtaaataactcattgatctanaaaaaaaaaaaaaaaaaa

SEQ ID NO: 19976 - DNA, 419 bp, Homo sapiens
  misc_feature 22, 26, 27, 30, 31, 42, 44, 48, 51, 71, 75, 96, 129, 156,193, 235, 237, 283, 284, 312, 326, 330, 338, 353, 357, 381,390, 392, 396, 415: n = A,T,C or G
gggggggggggggtttagtttnctannatnnaacaaaacctngnttcncgngccccccctcgagagtactnctanaattaattaaggcgggaatgnaatattatttggccataaaaaggaaggaaattntgacgcatgccacagcctgagtgaatnctacaaatattacgctaagtgaaagaagccaatcacnagtttatgtgaaatgtccagaataggcaaatctgtgtatcananacaaagcacattggtggttgccaggtacttggaggaaagagagaannaggcattgacagctaaccaggggtaccngggctttctttggnaagnatgaatgnaaatttgtcggaaantgantggatttgctaccaacttttgttnaaattattncnttangtaaacccaaattgaaaanttta

SEQ ID NO: 19977 - DNA, 425 bp, Homo sapiens
cttctagaattaattaaggcgggtggatcacttgaggtcaggagttcgagaccagcctgaccaacatggtgaaaccctgtctctactaaaaaatacaaaattagccgggtgtggtggcacatgcctgtaatcccagctacttgggaggctgaggcaggggaatcacttgaacctgggacgcggaggttgcagtgagccgagattgtgccattgcactccagcctgggcaacaagagcgaactctgtctcaaaaaaaaaagtattaatctgagatacactttaatttttttggtgttacatctttgacaatctaataaattcgcattcagtttcagtgggttcatgttaccttagtaattcttgagtgtcttaagagtaaagctggcccatttgtatctaaactgtttgctttgtttataggattt

SEQ ID NO: 19978 - DNA, 297 bp, Homo sapiens
  misc_feature 23, 28, 39, 43, 45, 56, 67, 69, 70, 73, 75, 76, 87, 90, 91,95, 102, 126, 130, 131, 133, 134, 140, 160, 171, 180, 187,198: n = A,T,C or G
agtacttctagaattaattaaanctgtnttctttgtaanttangnaaataacaaancaagggctaangnnaanannaaaagtgcaanaanncaangaaaaancatggggacaaaagaagatttttnctcnntnngggggntgttcatgtgtagccctacnacagaactatnagacctatncacattnatatgaatatntatttgaaaacgtataatatcaaacaatgtaaaaaccaatagaaatctcagataattgaatgtatagaaactagcagtttgaaagtgattagttcatta

SEQ ID NO: 19979 - DNA, 439 bp, Homo sapiens
  misc_feature 18, 25, 27, 33, 35, 36, 40, 48, 101, 106, 111, 157, 167,191, 196, 202, 205, 212, 222, 228, 238, 244, 247, 249, 251,252, 269, 272, 277, 289, 293, 301, 302, 309, 311, 313, 315,319, 322, 324, 331, 344, 348, 349, 350, 354, 356, 366: n = A,T,C or G
  misc_feature 368, 369, 370, 371, 375, 378, 386, 395, 401, 404, 413, 414,415, 417, 420, 422, 423, 424, 425, 435: n = A,T,C or G
cgtgcgtttttcaacccngaaaaangntaacantnngctnggttaccnggccccccctcgtacagtacttctagaaattaattaaggcgggggagaagatngggancactnatccctggtacgtctatcccagtgtgtgtttaacattcacagctcnaaaaccacanatgtgtctggggaggagcctggcnaggcnttcctnatnaccatcntgtttgcaanggttanaacaaaaacnaaaaanccncngnnatgcaaaacatgaaaancanaaaanccctgacactgnactnaaaccttnnggacagngngngnctcnccngnggggaancccaattcccctntaannngggngntttccccccncnnnngggnccnttttttanaaaaaaaanaaaaanatnccccccccnnntnggncnnnntttaaaaaanaaaa

SEQ ID NO: 19980 - DNA, 282 bp, Homo sapiens
  misc_feature 85, 104, 110, 113, 120, 122, 134, 138, 142, 153, 155, 163,168, 177, 195, 198, 201, 207, 215, 219, 228, 230, 232, 242,257, 259: n = A,T,C or G
agtacttctagaattaattaaggcgggcagaaaacccatgacgggaaagtgaggcaactggggaaaagaaaaaaaaaaaaccccncaaaaaaccaaaccctggntccccnagnaaaaacntnttttcccaccanccantgcncttggccccgngnaacctggnttccnttgttcaancccagggtgccccttggnccnttnggggtnccccaaancgtncaaaaggcncntnaggggaaggngaggcccctggggcngncaaaaaaaaaaaaaaaaaaaaaa

SEQ ID NO: 19981 - DNA, 422 bp, Homo sapiens
agtacttctagaattaattaaggcggggtgaaatcaaataacgcagttttggaaacctataaccgcattttgtgcttgaattacgtgccccacactgtggcttaggatacttattggggtataatgaaaatcttactgaaagttaatttcacattcttacaccccaaaatctgcattgccattgatgcatatgcaccacattattatatttccacatcagtttcttgtgtgccaaataagacccatgctatgcatcttggtttccatgaagtgaaaatacatagtaagaatgcgagaaatataaatcaggccaggcacggtggctcacacctgtaatcccagtactttgggaggccaaggcaagcagatcacctgaagtcaggctggattcagtgccgagtctcaaaggccaaggtaccagg

SEQ ID NO: 19982 - DNA, 163 bp, Homo sapiens
  misc_feature 127, 128, 131, 145: n = A,T,C or G
agtacttctagaattaattaaggcaggcggtgcctctaatactggtgatgctagaggtgatgtttttggaaacagcaattaaagtttttcttcctgaaaaaaaaaaaaaaaaaaaaaaaaaaaaaannatntttataaaaaaaanaaaaaaaaaaaaaaaaaa

SEQ ID NO: 19983 - DNA, 191 bp, Homo sapiens
  misc_feature 30, 41, 42, 49, 50, 67, 76, 77, 79, 89, 96, 100, 105, 111,127, 134, 137, 139, 186: n = A,T,C or G
agtacttctagaattaattaaggcgggcanttttgttgatnnaactgtnnaggtttacggctaagcntagtggggnntntaatcccaantggggtnttanctatngggtgntcacgatatgtaaaanccacttncgnantctattttgtgtcaactggagttttttacaactcaggtgagttttancttta

SEQ ID NO: 19984 - DNA, 563 bp, Homo sapiens
  misc_feature 28, 29, 41, 42, 45, 46, 48, 50, 52, 53, 58, 60, 64, 68, 72,74, 77, 78, 86, 106, 107, 118: n = A,T,C or G
agtacttctagaattaattaaggcgggnntggccacgggcnnttnnanananncactnanagantgtnaaanantanncatgaagnatgcctacaagatctagaannttgcctccctngggcaaatctaagagttattggccagtagagagagagatagcaagagtagaaagtttattcaaagggataatcacagagaacttcccaaacctagagaaagacatcaatattcaagaacaagaaagttatataaaaacaagcagatttaaaccttattaaataagactacctcaagacatttagtaatcaaacttcaaaaggttgagaatacagaaaggatcctaaaagaagcaagagaataaaaacaaataacatgccaagaaccttctatatgactggcagcaaatttctcagtgaaaaccttaagggccaggagagagtggcatgacatagctaaagcactgaaggaaaaagtattttatcctagaatagtatatccagtgaaaatatcctttaaaaatgtgggagaaataaagacttcttccagacaaactaaaataaggg

SEQ ID NO: 19985 - DNA, 407 bp, Homo sapiens
  misc_feature 41, 43, 51, 52, 54, 60, 68, 95, 106, 108, 127, 157, 161,173, 183, 187, 193, 196, 203, 205, 206, 207, 226, 235, 240,271, 287, 291, 294, 295, 296, 297, 299, 300, 301, 302, 303,305, 311, 316, 317, 318, 319, 322, 327, 338, 339, 340: n = A,T,C or G
  misc_feature 346, 347, 350, 352, 353, 360: n = A,T,C or G
agtacttctagaattaattaaggcgggaagatcacttgacntnaggagttnnanactggnccggccancatggtgaaaccgcatctccactaaanatacaaaaatnancctggtgtggtggtgggcncctgtaatcccaatgacttgggaggctaangcangaaaatttcttnaacccaggangcanaggttncantgaccancnnngttgtgccattgcaccccnacctgggcnataanagtgaaaactccatctctgaaaagtaagaancaaaaaaaaaaagacnggcnccnnnncnnnnngntaacgncaaannnnccnaactnagaagaaaatnnncccatnnaancnngatttanaatgaaaatattgtcaagagtttcagatagaaaatgaaaaacaagct

SEQ ID NO: 19986 - DNA, 326 bp, Homo sapiens
  misc_feature 122, 125, 127, 141, 143, 145, 150, 152, 155, 156, 157, 161,162, 165, 167, 168, 170, 179, 182, 183, 184, 187, 190, 197,199, 201, 204, 206, 210, 218, 220, 221, 226, 228, 236, 239,242, 244, 246, 247, 250, 251, 258, 259, 264, 308, 309: n = A,T,C or G
agtacttctagaattaattaaggcgggtggatcatggggtcaggagatcgagaccatcctggctaacaaggtgaaaccccgtctctactaaaaatacaaaaaaaaaaaaaaaaaatttcccnggncncggggggggccccntntntcccnanttnnngggnnggntnngncagaaaaanggnnnaanccnggaaagngnanttngnaggnacccaaantnnccccntngaatcccnaanccngncnnggnnaaaaaannaaaantccttttcaaaaaaaaaaaaaaaaaaaaaaaaaaaaaaaaaaanntttttaaaaaaaaaaaa

SEQ ID NO: 19987 - DNA, 453 bp, Homo sapiens
  misc_feature 188, 244, 246, 284, 313, 315, 321, 325, 327, 368, 374, 380,381, 382, 397, 411, 413, 419, 428, 436: n = A,T,C or G
acttctagaattaattaaggggggaatttgtatttagaatatgtaaagaactgttacaataataattaaaaggcatataattcaatttttaaaaatcaacaagagatctgaattaacagttctccaaaggaagatacacaaaaggccaataagcacatgaaaaggttctcaacatcactagccatcanggaaatgcaaatgagatctacaatgagatatcacttaacactcactggaatagatntntaatcaaagtgataatatcaagtgttggtgaggatgcngaaaaaattggaaccctcatgccctgttngngggatncccncntgatttaaaaaacaaatgtttccccaaaaccttgggccccnatgttnttttgnnnctttttttttaatanccccaaattgaaanancccttnttttttttnccttcccnaaaaaaaaaaaaaaaaa

SEQ ID NO: 19988 - DNA, 390 bp, Homo sapiens
  misc_feature 379, 380, 381: n = A,T,C or G
agtacttctagaattaattaaggcggggggtggagcctttaagaggtaggacacgataagagccatttcagtcaaaggggatcttcccttgtgtgtgtcttggtgctgttctctgagctctcaccttcacaatgctggattagttctcacaggaatcaattagctctttcaggaacaggttggcttcttcacacgtgtttgctttccctctgactttctaccctgttatggtgcagcagaaaacccctcaccagaagccagcaccatgcctttgaacttcccagcctgaagaaccataagccaaataaacttcttttctttataaattatccagcctcagatattttgttataataaaacaaaatggactaagaccaannnaaaaaaaaa

SEQ ID NO: 19989 - DNA, 519 bp, Homo sapiens
  misc_feature 78, 148, 324, 332, 355, 388, 422, 427, 440, 477, 480, 493,497: n = A,T,C or G
agtacttctagaattaattaaggcgggtacatgtgaaactctaaatgcatggcaactgttaatgtcataacagtttanttattttgttctgttctgtcatgtgccacaaaatatgtacttttttcacttttttccctttgtatatcangttacgggttacaactggttcattctgaaaacaacaacaacaaaaagtccattcatattttttaacaattgtataagtgcccaaggtaattcacttacagcctaaagccttgcctttgtaatttgacttcttgaccatggttgggccaatcaaaagcatgcacttgtaaccaatgnaaaaaagnaaaaaagccattttaatattacntactccaattaaaaatgtggcatggaaactttnacaggaaatttcttcaatccttcccacctggagntcccngttgaaagggganttttaatggtggccacaaaacccaacccaatggttgntcnttctttaaggggnggcntgggggccccaaaccaacccaa

SEQ ID NO: 19990 - DNA, 514 bp, Homo sapiens
  misc_feature 414: n = A,T,C or G
agtacttctagaattaattaaggcggggaagcgtaacaatttctgagaagtgtaataacacagtgaaagccgtgtttaaagatgataaaatggccagacgcggtggctcacgcctgtaatcccagcactttggaaggccgagacaggcggatcatttgaggtcaagagttcaagaccagcccgaccaacatggtgaaaccctgtctctactcaaaatacactgtactccagctgggagacagagcgcaattccatctcaaaaataaataaataaataaataaataaataaataaataaataaataaataaagataataaaatatggtaacaatttattacaatggcaagaaatcagtaatgttataagatactgcctataaagcctaacatgaaatactgaaggtccacatcanactggtggaggcggagaggtggacagacattggacactgacacattacttaaaataccaggagctgggccaggcacagtggctcacgcgtgtaatcccac

SEQ ID NO: 19991 - DNA, 359 bp, Homo sapiens
  misc_feature 2, 13, 30, 33, 42, 335: n = A,T,C or G
gngtacttctagnaattaattaaggcgggnagnagaacaagnaagcagaataacatccctacggacagtgaaagcttctcagaaagacatgcccatcaaacatgagcactataataagtggtaggactcagaagagttaaaattttaaaaagattaagataaacatctgagtcaacaaacataagaattaatgcctttacaaaatagaaaattagaaaacagggtatttgtaaaaaacaaaagaaacataggatataaggatttgagagaaaatgctatactgaaaataggcaaagaagatccaggagataggtgtccacaaaaagaaaaagcanggggtaaaaaaaaaaaaaaaaaaa

SEQ ID NO: 19992 - DNA, 383 bp, Homo sapiens
  misc_feature 35, 50, 51, 56, 59, 61, 62, 66, 70, 71, 80, 81, 82, 84, 85,87, 90, 91, 98, 99, 101, 103, 105, 110, 118, 120, 124, 128,173, 176, 178, 180, 183, 184, 187, 190, 223, 229, 230, 278,279, 310: n = A,T,C or G
ctcgagagtacttctagaattaattaaggcggggntaaaaccggaattgnnttatngtntnntagncctnngacccaatnnngnntnagnnggatcgnnancngntatanggactctntngggntctngaaaatactctaaaattgattgtggtgaaggttgcacaattctgnggntntnctnngcncanttctgtggatatactaaaagcaattgaattgtnccctcnntgtgggtgaattgtatgccctatgaattatatctcaacattgtattannaaaataaaattaatgaagcatagaagttacngagaactactggaaagaagaaatacaagaactcaaggaagagacagccagacaacagtagagtgtgaaatggg

SEQ ID NO: 19993 - DNA, 437 bp, Homo sapiens
agtacttctagaattaattaaggcgggaatcagctaaagcagtgcttagagaaatgtattgccttaagcaaatgtattttttaaaaatgaaagaaaaagataaacgatctagattcaatttaaataaattagaaagaggcaatgatataaaaactcaaatttttaaaaaggaaataaaaataatagcaaaaatgaataaaaatgaagacaagtatacagaagaaaaactcatcaaagggaattactggctatatatttgatcggctctgataatactattcatgaaaagaaaaagaaggagggagaaggcacaaattatccatcttaagaagaaaaagcaaggcatcataaaagatcttacaggtattaaacagataagaatatattttgacaggaattatggcaatgcatttaaaaattttgtaaagtagaaaaat

SEQ ID NO: 19994 - DNA, 775 bp, Homo sapiens
  misc_feature 94, 95, 96, 104, 109, 110, 111, 112, 117, 118, 120, 122,125, 126, 127, 130, 131, 132, 133, 135, 136, 138, 139, 140,141, 142, 143, 144, 145, 148, 151, 152, 155, 156, 157, 166,170, 171, 172, 173, 176, 177, 178, 179, 181, 182, 188: n = A,T,C or G
  misc_feature 194, 204, 207, 208, 213, 220, 222, 237, 239, 240, 241, 247,249, 257, 258, 259, 263, 264, 265, 271, 273, 275, 280, 281,282, 286, 290, 297, 306, 314, 322, 324, 327, 336, 339, 340,342, 345, 347, 352, 353, 359, 372, 373, 374, 375, 376: n = A,T,C or G
  misc_feature 377, 383, 394, 403, 411, 417, 435, 437, 440, 444, 449, 451,455, 465, 467, 505, 513, 533, 540, 550, 553, 557, 558, 566,577, 588, 589, 590, 592, 599, 600, 603, 609, 618, 621, 625,632, 639, 646, 647, 659, 660, 670, 674, 675, 677, 681: n = A,T,C or G
  misc_feature 682, 685, 686, 704, 715, 732, 736, 740, 753, 759: n = A,T,C or G
agtacttctagaattaattaaggcggggggggggagatttgtgcagggggaagtgtattacagaagtgagaaataaagacagttatttaaattnnnaaaaaaanaaaannnnaatannantnaannnaannnnannannnnnnnntanttnnccnnntttaaaaanaaannnnaannnntnntttttnaaaaanaaaaaaaaanaannaattnaaaaaangncccccccccgggggngnnncccaantncccctttnnngggnnntttttntncnccccnnntttngggngtttttnaaaaaactngggatttnggaaaaancnttnggttttccncanntnttntnttttnnaaaaanacccttttttccnnnnnngttttnaaacaaaaaanggccccccnaaaacccntttttnaaaaatttttcccccccntnatngggnaaaangnaaanttttttcccncnatttttttttttaaaaaaaacccttttaaaattttttnttgaaaanaccccccttttttttttaanaaaaaangggccaaaanttngggnnaaaaactnttttttttttntaaaaaaaaannncnccccccnnatngggggnggggggttnttntttnccctttntgaaaanaaaaaanncccctttttttnnaaaaaagggngctnncncccnnttnnaggggggggaaaaaaaanccttttttttngggggggtgggcccttnttgnggancaaccccccctantaaaantttttttttggggggg

SEQ ID NO: 19995 - DNA, 389 bp, Homo sapiens
  misc_feature 40, 42, 60, 68, 79, 83, 87, 92, 100, 124, 125, 127, 185,186, 199, 202, 229, 235, 239, 281, 298, 349, 355, 365, 366,370, 376, 377, 380: n = A,T,C or G
agtacttctagaattaattaaggcggggcatcattggctntnatgtttgaagaccaatcnttaacatntgattatattngatntatnatttnagtgttgntggaccatgtgtgatcagactgcnntntgaatcaaatacgatttgtcgagcaaaaaaaaactcgaggagctaaaaaaaaagccgnngggaaggggcccnagnccacaagtggaattaaaaaaatctggnaaaaantaanctgttccttgtgcctgaggagatggtgaccctttatttcatnctgtttttaaacctctntattccctgccataacatcttttgccacgtattagcctggaattaagtgtngtcttnggaagctgtnntacncctaannaanaaacttttg

SEQ ID NO: 19996 - DNA, 240 bp, Homo sapiens
  misc_feature 14, 182, 228, 229, 230, 239: n = A,T,C or G
ggggtacttctagnaattaattaaggcgggtgctccagagtcgggtctgctttccaaagtataggacatttgaagaactggtatgctactcactggtgaaggactgtaagcccacacaagctcttcttatctctactagaattaaaatgttaagtcaaaaaaaaaaaaaaaaaaaaaacccnaaaaaaaaaaaaaccccaaaaaaaaaaaaaaaaaaaaaaaaagggnnnccccccccng

SEQ ID NO: 19997 - DNA, 555 bp, Homo sapiens
  misc_feature 376, 380, 392, 421, 437, 462, 464, 470, 475, 477, 478, 480,483, 486, 487, 490, 500, 512, 513, 514, 515, 541, 544: n = A,T,C or G
acttctagaattaattaaggcggggtaagatttgccgagttccttttactttttgtaagctttccactcaataaaatgaacctgtatggcaaatacttgaaatggaactcactccttccactttccccctttcttctgtcccaggaaatagatcatcttttgaaaagactcttgtctaggaaaagttgtgtccttttcctaatttaacgtgttctttcttaatgaagttttaatttatttttgttgagattttgctagatggcttttgcatcccctgtagatggtgagtgttggcggtgatgtccgtctcggcgttcggaggccccacggccccgagctggccagggcccccagggggctgggctctgccttagangggncggttggctgcntccccggttggccccctttttaggacccngggaacttggggtttngaccttggggcttcagggggggggntnaccttntaagnanngnaanggnnggntttaaaaacncaacttttttgnnnnggttttaaaaaaaaattttcaacccnccnaaaaaaaaaaa

SEQ ID NO: 19998 - DNA, 775 bp, Homo sapiens
  misc_feature 350, 360, 361, 369, 373, 374, 383, 387, 393, 398, 407, 415,417, 435, 440, 445, 447, 468, 474, 490, 494, 496, 498, 503,505, 509, 512, 514, 520, 534, 539, 542, 544, 545, 546, 549,562, 563, 564, 565, 566, 567, 568, 574, 584, 585, 586: n = A,T,C or G
  misc_feature 595, 597, 611, 612, 613, 622, 624, 625, 626, 628, 631, 633,634, 635, 636, 637, 638, 639, 642, 643, 644, 645, 646, 647,648, 649, 650, 651, 652, 655, 656, 662, 663, 666, 667, 668,669, 671, 672, 673, 675, 678, 679, 680, 683, 684, 686: n = A,T,C or G
  misc_feature 687, 690, 693, 694, 695, 697, 698, 699, 702, 707, 708, 709,710, 713, 715, 717, 718, 719, 720, 721, 724, 726, 727, 728,729, 731, 732, 733, 737, 738, 739, 740, 741, 748, 752, 753,754, 756, 758, 759, 760, 768: n = A,T,C or G
agtacttctagaattaattaacacaaatggctgtgcctagtctttaaatctgtccaaagcaaatggagcgaaagcctgctaattcttcagtgcttcatctggcaatgacctcagaaaaaagagtctccctcctgtattatcaagctgacttcctttagttccttgttgttctgtgtagatctttgttcccagaattctctagacaggaaaaaacagaggaaaaaggacagctaaaatattgagtaccctagcacccactctgcaaatcccctaaaatattaaattagaatatatgttaagcaatgcattccaaaaatctatacccactatctattcaagcccttaaaacnattttttgtnngtttaaanaaannagttctcancacntggtgntcatntgggccatnaggaactntngtccataaatgtaatgcncatantcctngnggggaaacatcccgaaaatangagctncttttgagggaagganaccntnanttggnantaanctntnttttcncccccccccccggnggggnacntnnnatnccccctaaaaggnnnnnnntttttncccccccccnnnggggggggntngttttaaaaaaaannnaaaaaaagntnnnanaantnnnnnnnaannnnnnnnnnnganntggggnnatnnnntnnnantannnaanntnnganatnnngnnntanacccnnnnttnanannnnnaantnnnnannnggtnnnnnaaaattntttnnnangnnnaaaaaaanaaaaaaa

SEQ ID NO: 19999 - DNA, 665 bp, Homo sapiens
  misc_feature 23, 26, 29, 37, 44, 81, 90, 109, 112, 118, 120, 127, 128,130, 132, 134, 135, 136, 138, 142, 144, 145, 174, 183, 201,202, 207, 216, 218, 220, 230, 232, 238, 243, 250, 261, 266,267, 269, 275, 291, 297, 304, 310, 326, 342, 349, 364: n = A,T,C or G
  misc_feature 410, 624: n = A,T,C or G
agtacttctagaattaattaaanaangcnttctgganagtgtgnaaaaatttcccatttgagacaccctgctggtaatatnctgatgctntcatgtgaatgttagggtnttnacaaantncatatanngnantnnnanctgntnnaattgtgacattaggaagatgggaccttntaggagganagtaggtaatgagttgtnnggccncatgaacanancnagtgcccttntnaaatangcccnagggagnttatccattcnttctnncntttgangaagctgccagaaggngctgtnttatganccaaanaagaggctcttcccanagaccaaatatgctantgactcngtcttaacttctcanctctgatactatgagaaatacattttgttttttataaactactcantctatggtattttgttatagcagcctgaacaaactaagatgactgaaaaaacatgaggacttttttcttccttacatgagagatttgcatgaggatatgtattgtatacatgtacctcccaatggaactattcaagctttattattttgaactaaattctgacacacaccactacatttgattttaccattgaaaattattggtaaataaaganaacccgggtatatcaatttatttaataatcctatatattaa

SEQ ID NO: 20000 - DNA, 322 bp, Homo sapiens
  misc_feature 186, 195, 196, 197, 208, 214, 222, 223, 227, 229, 231, 233,244, 265, 268, 270, 279, 286, 292, 294, 306: n = A,T,C or G
agtacttctagaattaattaaggcgggcatggtggtgcgtgcctgcagtcccagctactcgggaggctgaggcaggggaatcgcttgaacctgggaggcggagattgcagtgagctgagattgcaccactgcactccaaacctggagacagagcgagactctatctcataaaaaaaaaaaaaaaanaaaaaaggnnnccccccccccngggggncccccaanncccncnantngggggtttttncccccccccctttgggactanttntnaaatggaanaatatantattgncnccaaatcctgtntgaaaaaaaaaatgtg

SEQ ID NO: 20001 - DNA, 449 bp, Homo sapiens
  misc_feature 34, 40, 46, 48, 51, 61, 74, 87, 94, 106, 108, 111, 119, 155,168, 170, 177, 179, 181, 186, 187, 199, 212, 215, 218, 222,225, 228, 233, 248, 254, 263, 272, 290, 334, 336, 342, 350,352, 354, 356, 375, 376, 386, 395, 398: n = A,T,C or G
ctcgagagtacttctagaattaattaaggcgggncatttnaaatananatncaatcagganggttgggggactngggactgtggctnaattganaccttgctgatntnttnatgtcaanacctgactcacagaccatgtgcccggaagcagcctnttcacataggcananatttgcnantnctttnnagctcacctttnttcttcccctctntgntcnctgntgncancctantgattgtgtaccttncctatnggatccatntgttttgtnaacaataaaggcgtcttnaggcatgaaaaatcactgaagagaatcaaagacgcgcccccccncntggggnggtctttncnanancataaagaccgttctaatnncccccaaaangagagatcnttnaaagaaaagtctccgaaagaaaaaaaacttgaactgtaaaaaaaaaaaaaa

SEQ ID NO: 20002 - DNA, 525 bp, Homo sapiens
  misc_feature 206, 254, 270, 310, 323, 379, 387, 403, 410, 434, 478, 479,490, 494: n = A,T,C or G
agtacttctagaattaattaaggcggggcttggcttatggagatgcctcgtgaaacacagctgggcaagtattaatgtatatggaacagcctggatttctgcatatggataagccaccttggaataggaagaggtgttgagcctggactgtgggaggaaagagctgcgtggatagattcaaaacttcctgtggtagtgctcccaantctggacctcttgtaagaccttcaggtactcactcttcttgcttaggnctctctgtgtggttgnaaaagcccatccccgtgtttgcatggtgttgtttaccaantttttctgtgganacctttggcaaaattttatggtttttggaccaaagaaaagttggaaaaaaagtttngccccttnttggaacccttcaatnttccctnttcctttggatttcaaggtggganaccaccttaaaccaatttttttgggggggaccaaaccttttaannttccaaatttngggnttttttcccttttaccaaccccagaaaaatt

SEQ ID NO: 20003 - DNA, 563 bp, Homo sapiens
  misc_feature 5, 8, 165, 171, 200, 201, 202, 203, 204, 205, 206, 207, 208,209, 210, 211, 212, 213, 214, 215, 216, 217, 218, 219, 220,221, 222, 223, 224, 225, 226, 227, 228, 229, 230, 231, 232,233, 234, 235, 236, 237, 238, 239, 240, 241, 242: n = A,T,C or G
  misc_feature 243, 244, 245, 246, 247, 248, 249, 250, 251, 252, 253, 254,255, 256, 257, 258, 259, 260, 261, 262, 263, 264, 265, 266,267, 274, 275, 276, 277, 278, 279, 280, 281, 282, 283, 284,285, 286, 287, 288, 289, 290, 291, 292, 293, 294, 295: n = A,T,C or G
  misc_feature 296, 297, 298, 299, 300, 301, 302, 303, 304, 305, 306, 307,308, 309, 310, 311, 312, 313, 314, 315, 316, 317, 318, 319,320, 321, 322, 323, 324, 325, 326, 327, 328, 329, 330, 331,332, 333, 334, 335, 336, 337, 338, 339, 340, 341, 342: n = A,T,C or G
  misc_feature 343, 344, 345, 346, 347, 348, 349, 350, 351, 352, 353, 354,355, 356, 357, 358, 359, 360, 361, 362, 363, 364, 365, 366,367, 368, 369, 370, 371, 372, 373, 374, 375, 376, 377, 378,379, 380, 381, 382, 392, 402, 406, 422, 437, 452, 463: n = A,T,C or G
  misc_feature 464, 489, 492, 510, 534, 540, 542, 551: n = A,T,C or G
agttnttntagaattaattaaggcggggttagcgaggcttgctagaagtcatcaaaaagctattagtgggagtccgagtggagagagcgagctgagtggttgtgtggtcgcgtctcggaaaccggtagcgcttgcagcatggctgaccaactgactgaagagcanattgcntaaaaaaaaaaaaaaaaaaaaaaaaaaannnnnnnnnnnnnnnnnnnnnnnnnnnnnnnnnnnnnnnnnnnnnnnnnnnnnnnnnnnnnnnnnnnncgtcgtnnnnnnnnnnnnnnnnnnnnnnnnnnnnnnnnnnnnnnnnnnnnnnnnnnnnnnnnnnnnnnnnnnnnnnnnnnnnnnnnnnnnnnnnnnnnnnnnnnnnnnnnnnnnncgccctttcnaacagttggngcancctgaatggcgaaatnggaaaattgtaagcngttaatattttttgntaaaaaattcnncgttaaaattttttgtttaaaatcnagncttcattttttttaaacncaaatatgggcccgaaaattgggnaaaaantncccttattnaaattcaaaaag

SEQ ID NO: 20004 - DNA, 462 bp, Homo sapiens
  misc_feature 31, 32, 34, 40, 42, 53, 62, 81, 83, 95, 97, 100, 122, 137,153, 161, 162, 166, 169, 170, 175, 180, 187, 192, 199, 203,215, 223, 231, 234, 238, 239, 245, 254, 264: n = A,T,C or G
agtacttctagaattaattaaggcgggcatnngnaatctnanctactcaggangctgtggcncaagaactgcttgaacccngnaaacaggctgcngnganccaagactgtgccactgcactncatcctgcacaaaanagtgagtgagactccntctcactnnatanaannataanataanaagaggnggggnccccccnacgnggggtcccactntttctctntagcagtngcnttannaaatcnccccccctnggttccgttntttcctgtggaccagaactgattcccacagctacagttcagcttgaggggagactgtatagccaagatattcagctagaattcaggggttcgcttggtaagggaagggaagagaatggatactgtcggtctgtgctccaggagacttaaactcaatgctgaaacactttgcacaatgcctggcgtgttattgcactca

SEQ ID NO: 20005 - DNA, 488 bp, Homo sapiens
  misc_feature 2, 23, 24, 34, 36, 37, 43, 45, 51, 56, 87, 97, 99, 139, 142,144, 150, 167, 179, 187, 188, 190, 203, 207, 215, 216, 221,228, 233, 251, 252, 253, 258, 260, 261, 267, 274, 275, 278,281, 386: n = A,T,C or G
tnatagaattaattaaggcgggnncgggtgcgtntnngcaatncntgacgnacatngacccacacgtcccctacacctagatcttgntatgttgctntnatcattaacatgggagtggtctatgtcccatgaaaagggntanancttccncctagggaggctattgncaaatggagatnaagtaatnnantcctattttaatntttnatctgaannactcngggcttnttatnactggatatatgggcatnnnacctncnngccatnttagttnntanaanattattttccttatgaaccctgttttgttttgcttcctttctgcttcaattctaatgtcacattgcatacctggatgtaaacagcagtcagtttctcagatcaantagagccctgtagcaacttgggaaagacacaggaagaccacgggacataaaaactggtatttattatccaggggaatgtcaactacgggattaaattatgtt

SEQ ID NO: 20006 - DNA, 343 bp, Homo sapiens
  misc_feature 32, 34, 45: n = A,T,C or G
aacaaaggctgggtgaccgggccccccctcgngngtacttctagnaattaattaaggagggaaaagataacatccaagtctgattagaactgcccatcagtttttcttgtaaatttttagaagacctcacagaactttacagtttatttttctcggccaacacattaaaaccattcttggatttcaagtagccaactttgccttttatgtattcttacatagtttcctcttgaagaaaaaaaaagcagagtttttgtttttcaaccctttatgtttgttttgttttattcttaaataagcaagcaaaacctgcacattggattcacgtgagatgataatgaaa

SEQ ID NO: 20007 - DNA, 265 bp, Homo sapiens
  misc_feature 41, 47, 50, 78, 97, 114, 117, 118, 119, 131, 135, 148, 150,154, 155, 162, 165, 166, 167, 175, 179, 180, 182, 185, 198,202, 203, 204, 205, 215, 222, 225, 226, 230: n = A,T,C or G
agtacttctagaattaattaaggcgggactgggctaatggnccaacngtncccgtacgcatccaccccaaccaggtgnttatcactaggctctaacnggacaaagacctccaanagnnncttctacgaaangccnaatactatcagangngaanngataacngcnnntgcaatgnatanncnatnataaccactctcnaatnnnntatttttatntaccatntannattnttcttgcttgttggttaatctaagttgaaaagaac

SEQ ID NO: 20008 - DNA, 561 bp, Homo sapiens
  misc_feature 29, 31, 35, 38, 45, 48, 53, 59, 61, 64, 73, 77, 82, 94, 95,96, 99, 106, 109, 124, 147, 155, 166, 168, 175, 177, 183,190, 198, 206, 207, 230, 243, 244, 275, 276, 279, 280, 283,286, 311, 362, 370, 403, 404, 412, 418, 503, 505, 512: n = A,T,C or G
  misc_feature 537: n = A,T,C or G
agtacttctagaattaattaaggcggggnangaanatngcttganctnaggantttgangncancccgggcancatngtganaccccatctgtnnnaanaatactnaanttacctaggcgtggnggcacacgcctgtaaactgaggnggcaggantgctttaaccnangaggttnangctgcngtgagtnatgatcgnaccactgnnctctatcctgggtgacaggctanccctgtctccatnnacaaagaaaaatgcaagatcaaaatcctgtnngtnntancgntattttaactgtgtaaaaaaatgtntagaacaggaaactttctgaggtaactgaaatgttctgtcttgattggagnggtgattncatggttacatttatcaaaattcattgaattgnncatttaanatctgngcatttcactgcatgtaaattttatcttaatttttaaagataaaatctgttcaactattttgattggctaaatattttggctaananaaaacanaaatttgttggagaaaaaatagganatatgccaaatgttataaaggttt

SEQ ID NO: 20009 - DNA, 154 bp, Homo sapiens
  misc_feature 1, 3, 13, 33, 57, 59, 61, 63, 86, 97, 101, 120, 124, 130: n = A,T,C or G
ngntacttctagnaattaattaaggcggggaangtagaaactgctgttacaaaaaantnantntcctgaaaggctgtgggaaactnccagcactacnaaangctagagacctgatcactnaatncatttnctgaccctacactggatcctgtgc

SEQ ID NO: 20010 - DNA, 610 bp, Homo sapiens
  misc_feature 21, 23, 56, 63, 69, 72, 75, 78, 81, 89, 91, 93, 117, 127,128, 131, 132, 144, 178, 179, 187, 196, 212, 233, 241, 242,260, 264, 266, 268, 273, 275, 277, 279, 285, 288, 292, 293,297, 302, 307, 321, 323, 327, 328, 330, 333, 338, 340: n = A,T,C or G
  misc_feature 341, 342, 347, 349, 350, 351, 353, 358, 370, 482: n = A,T,C or G
gggtaccgggccccccctcgngngtacttctagaattaattaaggcggggactggngattacnttgctntantantanccncagcgggnangnctgaaagaccctgacttctgttcngggcatatgnnaannattatgacaagncaggaaacttgtggagctctttcaaaaagaactnngcctgtgntggcactgngattgaacatcctgantacaccccaggtgattcaggnttcacggnngaccagcctaaaaaacgngtgncngntcctntngnangttggnatngtgnnggangaacngctcngggtacatggattntnacannanccnacatncnnngagantnnntngaatngtcatgttctcncaccccggtttggctgccttgtgaaatgattccctgcagtaaacggacttttcatttatttaatcattcaaacttccattcacatctgcatgattacagaaaacatggggtntgtagactagtaacacataagaaaattgcagtaagatggtaacaaaacctcatattgtctttacatgtttccaatggaaaatgttttgagtgtttattgttcagtttattacgtttcacttgattaaa

SEQ ID NO: 20011 - DNA, 358 bp, Homo sapiens
  misc_feature 29, 30, 50, 65, 83, 97, 99, 102, 106, 114, 121, 134, 139,148, 150, 151, 156, 157, 169, 171, 178, 184, 185, 205, 210,235, 245, 329, 332, 349: n = A,T,C or G
acttctagaattaattaaggcgggggagnnacctcaaggtcagggagttngtgaccacacttggnccacatggcgaaatcccntcctctactaaaantncanaaantggccggnatctgtnaaaagaaaatatntaatnaaattatgngnncattnnaaacacagcttncntgattcncaggcnnaatgcctcagtagtgcctanagcanattaaaggtttcccttttttcttcncaatggcccnccactgtcaagttggataaatatcatgctagtatactacatatgcaaatggtaagaaaaaaactgtaactatatagaaaggtcncanacaaaagtgtatttctncctttttgg

SEQ ID NO: 20012 - DNA, 562 bp, Homo sapiens
  misc_feature 72, 107, 118, 270, 280, 286, 287, 288, 289, 290, 291, 292,293, 294, 295, 296, 297, 298, 299, 300, 301, 302, 303, 304,305, 306, 307, 308, 309, 310, 311, 312, 313, 314, 315, 316,317, 318, 319, 320, 321, 322, 323, 324, 325, 326, 327: n = A,T,C or G
  misc_feature 328, 329, 330, 331, 332, 333, 334, 335, 336, 337, 338, 339,340, 341, 342, 343, 344, 345, 346, 347, 348, 349, 350, 351,352, 353, 354, 355, 356, 357, 358, 359, 360, 361, 362, 363,364, 365, 366, 367, 368, 369, 370, 371, 372, 373, 374: n = A,T,C or G
  misc_feature 375, 376, 377, 378, 379, 380, 381, 382, 383, 384, 385, 386,387, 388, 389, 390, 391, 392, 393, 394, 395, 396, 397, 398,399, 400, 401, 402, 403, 404, 405, 406, 407, 408, 409, 410,411, 412, 413, 414, 415, 416, 417, 418, 419, 420, 421: n = A,T,C or G
  misc_feature 422, 423, 424, 425, 426, 427, 428, 429, 430, 431, 432, 450,459, 468, 474, 481, 491, 537: n = A,T,C or G
agtacttctagaattaattaaggcgggtggatcacgaggtcaggagatcgagaccatcctggctaacacggngaaaccccatctctactgaaaatacaaaaaattanccgggcgtggnggcaggcgcctgtagtcccagctacttgggaggttgaggcaggagaatggcgtgaacccgggaggcggagcttgcagtgagctgagattgtgccactgcactccatcctgggtgacagagcgagactccgtcctaaaaaaaaacaaacaaanaaaaaaaaangcggcnnnnnnnnnnnnnnnnnnnnnnnnnnnnnnnnnnnnnnnnnnnnnnnnnnnnnnnnnnnnnnnnnnnnnnnnnnnnnnnnnnnnnnnnnnnnnnnnnnnnnnnnnnnnnnnnnnnnnnnnnnnnnnnnnnnnnnnnnnnnnnnnnnntggcgtaataaccgaaanagggcccgnaccgatcgncctttnccaacantttgctcaancctgaatggcgaaatggaaaattgtaagccgtttaaatatttttgntaaaaaattccgcggttaaaatttt

SEQ ID NO: 20013 - DNA, 727 bp, Homo sapiens
  misc_feature 2, 46, 80, 141, 158, 322, 327, 328, 329, 330, 344, 349, 352,353, 354, 355, 357, 360, 362, 365, 367, 370, 373, 378, 380,391, 394, 395, 397, 403, 404, 409, 410, 430, 434, 437, 438,440, 442, 444, 446, 448, 449, 450, 453, 464, 468: n = A,T,C or G
  misc_feature 470, 472, 474, 475, 481, 484, 493, 500, 520, 523, 526, 537,545, 552, 554, 555, 561, 562, 565, 569, 570, 572, 589, 591,593, 598, 605, 606, 608, 616, 619, 626, 628, 632, 638, 640,658, 659, 665, 667, 688, 695, 697, 700, 705, 711, 712: n = A,T,C or G
  misc_feature 718: n = A,T,C or G
anagccgccgcaatttaaaccctcactaaaaagggggtaaacaaanaaggctgggggttaccgggggccccccctccgangaagttacctttcttaagaaattaaattaaagggccggggtgggggggaccgccaccaatnccggccgcccaaaggangggaaagccgggggaaggggaagccttggaagccaaaccggtaaccttggggccccggcccattggaaggggaaaagccccggcccggttaccttggcaaaaatggaaccttttaaattcaatttaaaaataaagcctttcttattgcccaaaaaaagatatanaaatnnnnaagaactaataaanacaanaannnnanttnanatnanatnaanattantntaaatagaatnatnntnatatanntatannataatatagggggggacatnatanacnnananananannnaanatattatatanatanananannaaaaanggngggggcccnggcccancccggggggggggggggganccnccncaaatttcccncccccttnataaggngnnggaggnnccngtanntnaaacgccccccccttcnantnggggncccgttnntntttttttnaanaaacccntncggntgaacncngggggaaaaaaaaacccnntggggngnttttcccccccaaactttttnaaaatcncnctntttgnggaaannaaaaanattcccccc

SEQ ID NO: 20014 - DNA, 423 bp, Homo sapiens
gagtacttctagaattaattaaggcgggtgttaaagcaaactaaatatggcctgaagacttcgttctatatttgagtccttgtggacaaaccgtaacctagcttaataggcagacaaaattgaaaacctaactagtaatatgcacctgtaacaatagctgagtgttggccaatcccagcggccatacttcaatcactcatagactgctgagtgttcaaactgcattcaaataaggcaaacaccaagctgtaaccaatcgcactgtttctgaacctcacttccaattcctgtaaatcactttaccccttttgtccataaacttgttctgaccacgaggcaccccggagtctccaaatctgctgtgattctggacgctgcctgattcgtgaatcgtttctgttttttttgctcaattaaactcca

SEQ ID NO: 20015 - DNA, 273 bp, Homo sapiens
  misc_feature 1, 2, 26, 237, 238, 239, 240, 242, 243, 244, 245, 248, 251,252: n = A,T,C or G
nnctgggtaccgggccccccctcggngtacttctagaaattaattaaggcgggggcagaggctgcagtgacccaagattgtgccactgcactccaccctggacaacagagcaagaccccatctcaaaaataaataaatatatataaaaaataaaaagctatttctagtttatttcactataaagttttgctttattaaaaagctaataaacagctattaatcataaaaaaaaaaaannnnannnnaanaannaaaagggggcccccccccggg

SEQ ID NO: 20016 - DNA, 200 bp, Homo sapiens
agtacttctagaattaattaatatagaaaaccagttactagcctacaattagaattgacaacaaaacaggtaatgaagtggtatcgttgtctgtggtaaatcctcgaggttcatcatctcatgccaagaagattaagggcatggacacacacaaggagtgagtttaggagtagagtctccacaaaaaaaaaaaaaaaaaa

SEQ ID NO: 20017 - DNA, 464 bp, Homo sapiens
  misc_feature 1, 2, 30, 36, 38, 42, 48, 66, 88, 90, 105, 109, 115, 118,128, 138, 139, 143, 151, 167, 180, 206, 217, 224, 230, 232,245, 248, 254, 256, 263, 267, 273, 274, 278, 288, 302, 312,320, 340, 345, 354, 356, 358, 367, 375, 378, 386, 387: n = A,T,C or G
  misc_feature 388, 399, 400, 408, 410, 411, 412, 414, 415, 418, 420, 422,424, 427, 439, 441, 443, 448: n = A,T,C or G
nnagtacttctagaattaattaaggcgggnggatcntnaggncaaganatggtgaccatcctgccnaacatggctgaaatctctagtntntactacaaatatacntaanttaacnggncatggtggtncgtgcctgtnntctnatctactnacgaggctgaggcccnacaatccgcttgnacccacgaggtggaggttgcagtganctgagagtgtnccactgnactccntnctgttgacagagnganactctntntcgaacncaanaacccnnaaangattcagccngagatgccccgggngcccaccctnccagcttnccaaagggggttggccccgnaaaangcctacatngngnaaaaccctngatggggnaanactttttnnnttttttcccannaaagggtnannntnnccncntnantgnaaaaaaaccttntngnttccnaaaaaaaaaaaaaaaa

SEQ ID NO: 20018 - DNA, 699 bp, Homo sapiens
  misc_feature 2, 7, 20, 26, 63, 97, 104, 107, 114, 126, 163, 168, 177,181, 186, 187, 188, 202, 203, 205, 207, 209, 218, 220, 222,223, 225, 226, 234, 235, 242, 246, 248, 399, 414, 415, 419,420, 498, 512, 517, 518, 529, 542, 559, 565, 566, 574: n = A,T,C or G
  misc_feature 575, 587, 596, 609, 637, 645, 647, 650, 651, 656, 657, 658,671, 685: n = A,T,C or G
anatagncaagggaataaanaaaaanccatcacaaattcaggaaattttggacacgcttttanaaatgcaaaatgctccggaaagtctcagtaatanagctgancangtagaanaaggaaattcanagctcgaagataagttcttctaattaactcaaaaaanaaatnaaaaaaatnaaantgggnnncccccccccggggnnancncnggccccccntnanngnncccttttnnccccccntttngnccttttttttctggaacaacctgatcattcacaacttaggtccttacccatttaatatgtcaagataatatccagtgtgggcagaaaaaaataaattatgcagccgttagaagaaccaattggagggtcataccatgcaattcatttaagntagaaatattatacnngccnntgaaaaaatgggatggaactttttgcgaccgtgcccttattcatggacttcattttcccagaaaattcattgttttancccaacaaaagccnaggtnnccagaaacccncatttccggggtnaaatttacattctattnttaaanntttttttnnaaaacccgggtnaaaatttgngccaatttttttncttttaggggaccctttttttttccttnatgggganangannttccnnnatttttggattcnaatttttgtttaangtggataaaaattt

SEQ ID NO: 20019 - DNA, 119 bp, Homo sapiens
  misc_feature 43: n = A,T,C or G
agtacttctagaattaattaaggcggggggggaaaaaacaganaaaattgaagtatttatttataaaacatgcaaactattttaatacaacatcctgattttacaaataaagagaaaag

SEQ ID NO: 20020 - DNA, 478 bp, Homo sapiens
agtacttctagaattaattaaggcggggacaaaaataagttgtgttgtactcttttatcaagtataataaatttgccttttaacttgatatatttagaccctttacatataatgtaattattgagatgattagttaaaatctaccattttgctggttgttttctatttgttttttcttattttttctgccttattttagattgagcatttttttatgattcagtttttaaccactattgcctcattatttgttctttttcataaactattttagtggtttctctaacatttttagtattcatctttaaatagtcaaggagtatattatggcacttaacatgtactgtaagaactttataacaatatactctcaatcctttattctcattgtactgttgtcatacattttatttttacacatactataagtttttatacatacatacaatacatacaatacattgctactatttttggc

SEQ ID NO: 20021 - DNA, 243 bp, Homo sapiens
agtacttctagaattaattaaggcgggggattatctgtgatccaatgaagttggactagagatgtgaagccttagaaaacggtggattgaaaaaagaattttagtctcctccagagattatattttgtgtgttcattgctctcaaaaacatgaaaataaagagtattttatattgtgaaaaaaaaaaaaaaaaaaaaaaaaaaaaaaaaaaaaaaaaaaaaaaaaaaaaaaaaaaaaaaaaaa

SEQ ID NO: 20022 - DNA, 278 bp, Homo sapiens
  misc_feature 55, 63, 68, 88, 91, 99, 103, 104, 107, 149, 278: n = A,T,C or G
aacacaagctgggtacccgggccccccctcgagagtacttctagaattaattaantgcggggnagaanaagggaggacaggatgcaantcntttttttntttnngcnggggtggaccgccatgagcatgaaaagacccgaagcaagttnactcttgcaatgtgcaactgttatgttctgcaaaatgagcaacgatgtatcaaattgatgcaaatttagatgttgatacttacaataaagtttttaatgtgttttaaaaaaaaaaaaaaaaaaaaaaan

SEQ ID NO: 20023 - DNA, 730 bp, Homo sapiens
  misc_feature 45, 110, 138, 153, 182, 312, 435, 496, 501, 502, 517, 523,545, 557, 569, 571, 577, 588, 611, 649, 654, 680, 693, 694,701, 706, 707, 716, 719, 721: n = A,T,C or G
agtacttctagaattaattaaggcggggtgggatcacgaggtcangagatcgagaccatcctggctaacacagtgaaatgccgtctctactaaaaatacaaaaaaattanccgggtgtggtggtgtgtgcctgtggtnccagctgcttgggangctgaggcaggagaatagcatgaacccangaggcatagcttgcagtgagccgagattgtgccactgcactccagcctgggcgacagagcgaaactccgtctcaaaaaaaaaaataaataattgaattcaggccgggcacagtggctcacgcctgtaatnccagcattttgggagtctgaggcaggtctatcacctgaggtcaggagttcacgaccagccttggccaacatggagaaaccccatccttactaaaaatataaaaatttgctgggtgtggtggtngcacaactttaatcccagctattcgggagactgaagcaggagaatcgcttgaatccaggangcggnnacttttagtgcaccngagatnacgccattgcacttcagcctangcaacaaggagncaaaactccctntnattttnttaataaaatnaaatttcaaaaaatttgtttcantcaagtaaagggaaattgtctttttttcttgggaagtnttccntcttaataaatgaagaggggaattgnagaacaaggcccnnttggcanttaanncccttgtantcncnaacactttt

SEQ ID NO: 20024 - DNA, 591 bp, Homo sapiens
  misc_feature 16, 18, 49, 50, 54, 56, 62, 69, 81, 82, 87, 91, 98, 136,137, 142, 143, 145, 150, 155, 158, 165, 170, 171, 175, 179,184, 187, 196, 197, 200, 209, 215, 217, 219, 228, 230, 259,267, 272, 273, 281, 289, 290, 292, 293, 299, 302, 303: n = A,T,C or G
  misc_feature 304, 308, 309, 312, 314, 333, 339, 344, 345, 349, 355, 359,360, 366, 497, 574: n = A,T,C or G
gtaccggggccccccntngtgggtacttctagaattaattaaggcgggnncctntncacccnaatattncactagcaaggnnctttnatangcaaganttacatgcataagttatgtgttcatcacttttgcctannaaggnnanttggntgggnatncttgtgncaaanngtanaacnccagnccnttgagcttnnatnttataaganaatctnanangggtaagtncntacggcatcttgttcttgaggatgcaccncaggtctnggaannaaccctgntggccccnncnnaacagnctnnnatannctnanggcgacgagaaggaatccngtgaantttanncatnccagantttnngccttnaccacagttctcactctcttaaatggtacctcaaaaagctggagcctctctgccatgattatgcttctacaaatttcttttataaagagactcaaagctaatgatagcttaaaagaaaagttaatgccttnttcattggaaatgtataatcaaataagtagttaagggcttttggtattaaagatattctgaagctctgaaatgctanaaaaaaaaaaaaaaaaa

SEQ ID NO: 20025 - DNA, 422 bp, Homo sapiens
  misc_feature 17, 27, 29, 32, 36, 42, 43, 44, 45, 47, 61, 70, 71: n = A,T,C or G
actggccgtcgttttcncccggaaccngnggnaccnttgctnnnngncgggccctccctcnagagaactnntagaattaattaaggcgggctggggcgacaggctatttgaaatatccactcacagataataaaagaaaaagcatgaagcatgcctacaagatctagaaaatagcctcaaaagggcaaatctaagagttattggccagtagagagagagatagcagagtagaaagtttattcaaagggataatcacagagaacttcccaaacctagagaaagacatcaatattcaagaacaagaaagttatataaaaacaagcagatttaaaccttattaaataagactacctcaagacatttagtaatcaaacttcaaaaggttgagaatacagaaaggatcctaaaagaagcaagagaat

SEQ ID NO: 20026 - DNA, 238 bp, Homo sapiens
  misc_feature 11: n = A,T,C or G
gtacttctagnaattaattaaggtgggaggagaagaaagccagttacaaaagtacatcatcagttgttcagtcatctgtcagtttatgtgtgaatgcccctcatgagccaggtctgtaatccagtgggcagtccccatctcctgcattgtctctgtgacttatagtttcgttctttctgctgtcaaatgaatatataaagaaaatatccaaaaaaaaaaaaaaaaaaaaaaaaaaaaa

SEQ ID NO: 20027 - DNA, 291 bp, Homo sapiens
  misc_feature 1, 2, 4: n = A,T,C or G
nnantacttctagaaattaattaaggcgggcaggatagttcagacggtttctatttcctgagcgtctgagatgttagtattagttagttatcttttgagtaagaaaagctttcctaaagtcccatacatttggaccatggcagctaattttgtaacttaagcattcatatgaactacctatggacatctattaaagtgattgacaaaaaaaaaaaaaaaaaaaaaaaaaaaaaaaaaaaaaaaaaaaaaaaaaaaaaaaaaaaaaaaaaaaaaaaaaaaaaaaaaaaaaaa

SEQ ID NO: 20028 - DNA, 135 bp, Homo sapiens
  misc_feature 46, 47, 51, 56, 59, 71, 76, 78, 82, 101, 102, 103, 104, 110,111, 112, 113, 114, 115, 116, 117, 119, 125, 129, 132, 133,135: n = A,T,C or G
agtacttctagaattaattaagagcgggcagatcatgaggtcaggnnatcnagacnatnccggctaacacngtcangncccntgctctacggaaagcggcnnnngaaaannnnnnnnancggccnatancgnngn

SEQ ID NO: 20029 - DNA, 337 bp, Homo sapiens
  misc_feature 21, 22, 94, 123, 138, 141, 191, 236, 252, 253, 267, 271,272, 310, 315, 316: n = A,T,C or G
ggtggccgggccccccctcgnnggtacttctagaaattaattaaggcggggagtggtattctagaatgagagttagggatggtacagaattcanatatgggaggaatttattaaagtcagccnaagggatgtatcttnganaggtgtgatattcttgtagactctttaatatgtggctttagtcccatacnactaaaggcaaatctattatctttcgttgttagccatcaaagtcngcgttaaaactgttgnntcattcttaaattnatgnngaaatctgttagttgatgcctgtggcatgtgagatgcnaggtnngatggagagtgttcaatatgg

SEQ ID NO: 20030 - DNA, 166 bp, Homo sapiens
  misc_feature 8, 61, 106: n = A,T,C or G
gttattgngattattaaataagttaataagagtaaagcatttataatagaacctagcgcanactaagtgctatagtttgctattgttaaaactattattaatttgntctattccaggtcagatttaatttcccagcattaacaaaaatcaataaataatactgaaa

SEQ ID NO: 20031 - DNA, 195 bp, Homo sapiens
ggtgccgggccccccctcgagagtacttctagaattaattaaggcggggggaatgggtcttttctaaattgttaaaagcagttcatgccattattcttaataaacatttctaatatgctgtgaaaaaaaaaaaaaaaaaaaaaaaaaaaaaaaaaaaaaaaaaaaaaaaaaaaaaaaaaaaaaaaaaaaaaaaaa

SEQ ID NO: 20032 - DNA, 411 bp, Homo sapiens
agtacttctagaattaattaaggcggggggaaacactagatatattaagattagtttgaatttaatatatgaacttgaattttagtattacaagggattagttttaatttgggaaattgtatccaattttcagaaattctacatttgcattaaagcagcaccaaatttgttttttaaattaaaagcaggctataatgttcatagaaatgtgctatggccaggcacagtggcttatgcctttaattccagcattctgggagcccgaggaaagaggatcacttgagcccaggatttcaagaccagcctgagcaatatagacctggtctctacaaaaaaattttttaaaaattagccaagcacggtggcgcatgcctgtaggaggatcacttgcgccctggaaataagaggttg

SEQ ID NO: 20033 - DNA, 338 bp, Homo sapiens
  misc_feature 20, 33, 37, 39, 40, 47, 52, 291, 315: n = A,T,C or G
cgcgtgcgttttccaacccngcaatcaagggtnacancnngctgggntaccnggtccccccctcgtgaagtacttctagaaattaattaaggcgggtggatcacgaggtcaggagatcgagaccatcctgcctaacacggtgaaaccccgtctctactaaaaaatacaaaaaattagccaggcgtggtggcgggcgcctgtagtcccagctactcaggaaagctgaggtaggagaatggcgtgaacccgggaggtgggagctttgcagagagccaaggatggcaccactgncactccagccctgggcgacaggancgattcccatcttaaaaaaaaaa

SEQ ID NO: 20034 - DNA, 386 bp, Homo sapiens
  misc_feature 59, 63, 71, 74, 79, 86, 93, 94, 96, 99, 100, 101, 102, 104,118, 134, 157, 159, 183, 190, 197, 207, 216, 239, 272: n = A,T,C or G
ggtaccgggccccccctcgagagtacttctagaattaattaaggcgggggcgggaccangganaattaatnaanttctngactttngctaaannanaannnngngctaaattggaaanaagtaacaacaagganggaactgttttcacctgcaaggntnaaagaacacaagacaaaacggttnccggccnccccccnggggagaganagatacttnacaggagctgtgacctatggccnccgggacacagccagtccttgatgacccagcanagagagccagggaagaggccaggcgcggtgactcgtgccagtaatcccagcactttgagaggctgaggcggacagatcgccggagctcaggagttcgagaccaccctgggcaag

SEQ ID NO: 20035 - DNA, 322 bp, Homo sapiens
  misc_feature 215, 224, 228, 231, 232, 250, 268, 281, 300: n = A,T,C or G
agtacttctagaattaattaaggcggggcacagtggctcatacctgtaatcccagcactttgggaggcctaagcaggctggtcgcttgagcccaagagttcgagaccagcctgggcaatacagcgagaccccatctcaatttatattatttaaaaaataattaatgtaagagaaattaaaacagatttttaaaaaaaaaatgaaaataaaaatanaaaacacanaaanaannatggccttgaaaaaaaanaaccctgtttgcacaaangataacaaacttncattctggaacaaccttgntccttcacaacttaggtcctta

SEQ ID NO: 20036 - DNA, 375 bp, Homo sapiens
  misc_feature 30, 38, 52, 66, 80, 86, 88, 90, 96, 122, 137, 158, 167, 172,184, 189, 203, 204, 206, 208, 209, 211, 227, 232, 238, 247,248, 250, 257, 260, 263, 265, 266, 267, 269, 273, 278, 279,280, 284, 290, 300, 303, 306, 308, 313, 315, 318: n = A,T,C or G
  misc_feature 321, 322, 327, 328, 329, 330, 335, 338, 340, 341, 346: n = A,T,C or G
agtacttctagaattaattaaggcggggangctggttnaatttggcactgtncaaggaatgcttgnaacatatgcagatnttgtanantnaggtanttaaagtggaactgctatatttcgtntgtcgtccctctaanagctgatcatgacatctgtanacacagganaggancaccccattgcnaccanttactagcggaagnncnanngnatagggatagatcccncatancagctntggatggtnntntggaagnttngtntnnnanaatnctctnnnattnaccttncatgataggnagnttntnttggntngantgnntgtgnnnntgtgnacngnngttgnaaagagactagaccccactactgcactcc

SEQ ID NO: 20037 - DNA, 337 bp, Homo sapiens
  misc_feature 15, 18, 21, 22, 31, 33, 39, 43, 45, 47, 51, 58, 97, 122,256, 257, 258, 267, 276, 280, 281, 282, 284, 291, 292, 293,294, 298, 299, 302, 306, 307, 315, 316, 318, 322, 323, 324,326, 331: n = A,T,C or G
ctggccgtcgttttncanccnngaaaaaggntnaacttngctngntnaccnggccctncctcgtacagtacttactagaaattaattaaggcgggcncctgtggtcccagttttactcgggnaggctgagacaggagaatggcgtgaacccgggaggcacagcttgcagtgagctgagatcccgccactgcactccagcctgggcaacagagcgagtagtctgtctcaaaaaaaaaaaaaaaaaaaaaaaaaaggnnnccccccccngggggggancccnnntnccccttnnnngggnnttntttnncccccccnntngggnnntnttttnaaaaaa

SEQ ID NO: 20038 - DNA, 752 bp, Homo sapiens
  misc_feature 609, 643, 644, 684, 685, 686, 712, 716, 728, 732, 734, 735,738, 740, 742: n = A,T,C or G
agtacttctagaattaattaagggggagggtggagtatgggaggagggagaggatcaggaaaaataactaatgggtactaggcttaattacctcggttatgaaataatctgtacaacaaacccctatgacacaagttttcctcaataacaaacctgcacttgtaccctgaacttaaaagttcaaataacaataataataataataataggaagaatattaaagtaaaccatggctgaatcttctccagaatttctgaaaacaacaatctgcagattcaggcctaagaaattccagataaggtaaataaaaaagaaattaatatctccacacattataatcaaactacagaacaacaaagacaaagacgaaatcttaaactagaaagaaaaaaaatgatcatgaacaaaagaacaattagactgatagctgactcctcaataagcaatgatgtaagccagattcaatatgatgttgaaagtctcaaagaaaataatttcatcctaaaattattatattctttgggggaataaaaggcaaaataaaaccttttaatataaaaaaatattttaaagagttttaccatcaattactttcctcactaagttaanggaaaattattccaaaaaagccaagtttcttgannatacaaaaaaaaaaaaaaaaaaaaaaaaaaaaaaaaaaannncccccccccccggggggggaaccccnaatncccccctttttngggnannttnantncccccccccc

SEQ ID NO: 20039 - DNA, 264 bp, Homo sapiens
  misc_feature 7, 28: n = A,T,C or G
ttctagnaattaattaaggcgggcaggnatagttcagacggtttctatttcctgagcgtctgagatgttagtattagttagttttgttgtgagtgttaggaaaagggcatacaggactaggaagcagataaggaaaatgattatgagggattgaaccatgggagaaatatgaaaaccctggattctgagtatttgttgggcagggcgtttagtactgtctcccctttaccagccaacctgacttcaccatgtttattccctttg

SEQ ID NO: 20040 - DNA, 548 bp, Homo sapiens
agtacttctagaattaattaaggcgggagtaaagataaacagaaattaacaggattgagactaaaaaataaaaaagatcaatgaaatggaaagtggattttcttaaaagataagtaaaatcaacaaaccattggctagactaaggaaaaaaaggagaaaagaccaaaataaataaaatcagaaatgaaaaaggacacattacaactgatatcacagaaatacaaagaatcattagagactattatgaacaacagtatgcaaacaacttggaaaacctagaggaaatgggtaaatccctgagaatatagaatctatcaagactgaattaaaaagaaatagaaaacttcagcagaccaataatgatgtgattaaaatcataataaaaagtctcccaccaaagaaaattctaggaccagatggctttactgctgaattctaccaaacttgtaaagaagaaataatgccagttcttctcaaactattaaaaaaattgaagaggagaaaattcttcctgtttccgtgaggccagtattatcctgattcaaaac

SEQ ID NO: 20041 - DNA, 311 bp, Homo sapiens
  misc_feature 1, 32, 33, 36, 39, 45, 47, 52, 53, 65, 66, 71, 75, 82, 90,102, 104, 107, 122, 142, 151, 156, 164, 171, 176, 177, 178,191, 192, 195, 207, 208, 214, 215, 216, 217, 220, 222, 232,234, 244, 246, 266, 274, 278, 280, 288, 296, 308: n = A,T,C or G
nagtacttctagaaattaattaaggcgggtgnntgnagncccagntnctcgnngaggctgacgcnngaaanttgnttgaacnctggagcncaggttgcattnanccnatatcaccccattgnactccagcctggaacaagancgaaactcngtctngaaaaagncactggncacannngtcttaggccccnnccnaatgagagtttnnttcccnnnnccnanggaaaccatnancatccccccnangtgatagctgatgaaaaacngggatttngacnanagacacangatgagtncccggggggcanccc

SEQ ID NO: 20042 - DNA, 417 bp, Homo sapiens
  misc_feature 2, 20, 21, 53, 54, 59, 66, 79, 98, 114, 145, 146, 147, 152,153, 159, 161, 319, 322, 357, 367, 375, 390, 395, 412: n = A,T,C or G
gntaccgggccccccctcgnnaagtacttctagaaattaattaaggcggggtnngattngccgagntccttttactttntttaacctttgcttatgancatgcctgtgttgggntgacagtgagggtaataatgaaggaactggnnntgccnntggcantnatggttatgaagctgatgatgctgagggtggtgatgggactgatccaggtacagaaacagaagaaagtatgggtggaggtgaaggtaatcacagagctgctgattctcaaaacagtggtgaaggaaatacaggtgctgcagaatcttctttttctcangangtttttagagaacaaacagccattcattcagcatntgaaaaacanggcccctngagcacctcagtcanccganaccccccacccattccnctttc

SEQ ID NO: 20043 - DNA, 418 bp, Homo sapiens
agtacttctagaattaattaaggcgggaagaacagacagagaacaagggaggagaaatatttgaagagataattgctgagactttcccaaacgtagtgcaagacaaaacactatggattcaagaagcttagagcatcccaagcaggattagtacaaagaaaaacacatctaagtacatcatagttaagctgctgaaacttcaaaataaagagaaaatcatcactgtagccagacaaaaaacatatgcagaggaataaatataacaatgacagtaaaattctcagaaaacacgcaatccagaagataatggagtgacaactttaaatattgaaagaaaaaaaaacctctagtcctagtttactgaaattgaaaaattatacccagggaatacatctttaaaaataaattagatgataat

SEQ ID NO: 20044 - DNA, 190 bp, Homo sapiens
  misc_feature 1, 2, 148, 149, 150, 182: n = A,T,C or G
nngtacttctagaaattaattaaggcggggggagggagggatttcttatcccgtttgttacattttgaggataataaaggtgtgtgatctggtttggtaaaaaaaaaaaaaaaaaaaaaaaaaaaaaaaaaaaaaaaaaaaaaaaaannnaaaaaaaaaaaaaaaaaaaaaaaaaaaaaagncccccccc

SEQ ID NO: 20045 - DNA, 738 bp, Homo sapiens
  misc_feature 169, 171, 181, 185, 187, 189, 197, 200, 201, 202, 204, 205,207, 209, 215, 217, 221, 223, 224, 229, 230, 233, 234, 240,251, 252, 254, 262, 284, 286, 288, 290, 299, 300, 301, 309,310, 312, 316, 324, 332, 334, 335, 343, 344, 345, 346: n = A,T,C or G
  misc_feature 347, 348, 356, 360, 365, 366, 368, 371, 372, 373, 375, 376,379, 380, 383, 385, 388, 392, 408, 419, 424, 425, 429, 434,436, 445, 446, 456, 457, 472, 485, 505, 514, 515, 517, 521,527, 533, 534, 536, 538, 540, 545, 561, 562, 563, 564: n = A,T,C or G
  misc_feature 565, 566, 567, 568, 569, 570, 571, 572, 574, 576, 579, 580,581, 594, 595, 614, 616, 625, 627, 642, 646, 649, 650, 672,675, 676, 677, 683, 685, 692, 693, 694, 701, 710, 714, 715: n = A,T,C or G
agtacttctagaattaattaaggcgggcctgtagtcccagctaatcggcaggctgaggcaggacaatcgattgaacccgggaggcagaggttgcagggagatcgtaccattgccagcccgggcaacaagatcaagactccatctcaaaaaaaaaaaaagggaaaaattngnttaggggggnaaantngntaaacccnggnnntnnangncccccntnattngnnttttnnccnntgtttnccacccggggnnangggggggntttttaaaaaaaaaaaaaaaangncngncccgggggnnncccccttnnancccncccttttngggggccnanngggggggnnnnnnggggcccnaaantaaanncnttnnngnnaannaangnaancccntttttttttaaaaaancccaaaatttnccccnntttnggggntnccccctttnntccccccttnntggggggtttgggcnaaaaaattttttntccccaaaaggccccggttncctgaaaanntncccncccccntttttnntngngnaaaanggaaaaattttttttnnnnnnnnnnnnancnccnnnaaaaacccccccnncccgggggggggggggggncnaaaaaaacntnttttaaccttggggngggncanngggggcccttgggccccaaatnttnnncccttngnttttcannnttggggnaatgggggnaaannttttttttaaaaaaaaaaaaaaa

SEQ ID NO: 20046 - DNA, 326 bp, Homo sapiens
agtacttctagaattaattaaggctgggttcaaaagaaatgaatgtaaaggacctcgtcagtaccttttagcattgattacattgtggaaatgacaatattttgcatatattggattagataaaatactattaaaataaatggcactggtttctttcttacatttttcaatgtggctagtagcaaattgaaaattcccggccaggcaaagtggctcacacctgtaattctagcactttgggaggccgaggtcagtggatcacttcatctcaggagtttgagaccagcctgggcaacatggtaaaaccccattatctaccaaaaaaa

SEQ ID NO: 20047 - DNA, 531 bp, Homo sapiens
  misc_feature 1, 312, 327, 331, 373, 377, 381, 386, 391, 411, 415, 424,434, 435, 444, 445, 452, 460, 480: n = A,T,C or G
nagtacttctagaattaattaaggccgggcacggtggctcacgcctgtaattccagcactttgggaggctgaggcgggtggatcacctgaggtcaggagttcgagaccagcctggccaacatggtgaaaccctgtctctactaaaaatagaaaaattagccgggcatctgtaatcccagctactccggaggctcaggcaggagaatcacttgaacccgggaggcggaggttgcagtgagctgaggtcgtgccactgcactccagcctgggcaacaagagtgaaactccatctcaaaaaaaaaaaaaaaaaangttaattggggccangggnatggggggggctgggttcccaaggaaataaaaatgggggggnttangggnttaancccantttcacaccctttattttcncccntttggattntaaacaaggnngcccctttnncccaaanttttaaanccccggggcaaaaaaggggncccttttttttttaaaaaaaatttttttaaaaaaaaaaaaaaaaaaaaaaa

SEQ ID NO: 20048 - DNA, 433 bp, Homo sapiens
  misc_feature 86, 122: n = A,T,C or G
agtacttctagaattaattaaggcgggtggatcagaggcgggtacatcacgaggtcagagtatcaagaccatcctggccaacatantgaaaccccacctctactaaaaatacaaaaaaacanaaacaaaaacaaaaacaaaaaaactagctgggtgtggtggctcgtgtctgtaatcccagctactcgggaggctgaggcaggagaatcgcttgaacctgggaggcagaggttgcagtgagccgagatcgcaccactgcactccagcctgggcaacaagagtaaaactccatctcaaaaaaaaagctctttggaaccctcagtaatattttagaatataaagagtcctaaaagctaagaactgtttacataatttactactcttctctattgaaggctctttggattgcccaaatattcaattattacaatta

SEQ ID NO: 20049 - DNA, 595 bp, Homo sapiens
  misc_feature 88, 460, 532, 541, 551, 576, 582, 587: n = A,T,C or G
aagtacttctagaattaattaaggcgggctgcttgccgctatggctggcagtcaggacatattcgatgccatcgtgatggcggatganaggtttcatggggaagggtatcgggaaggctatgaagaaggcagtagtttgggtgtgatggagggaaggcagcatggcacgctgcatggagccaaaatcgggtctgagatcgggtgctaccaaggttttgcttttgcatggaaatgtctactgcacagttgcaccactgagaaggacaggtaaaggtggagatgtctttctttctcagcgtaggaaccaggagttctagttccatgggttaccagcatgcccttgagtaatcaatctgtctgttcctcatctgtaaaatggagaaaattatcagtgtcaagcttgagtgttgttaggagatttaacggaaatactaaatagaaagtgccaggcacattttangtgtttggtgaacactggctgttgttgcttctcaagagttctatgctcctgccttttacctggagtcattantgcaccacntggcttttanataccctaccaataaaataatgttnacattnattgnattttctc

SEQ ID NO: 20050 - DNA, 412 bp, Homo sapiens
  misc_feature 29, 34, 35, 36, 39, 56, 57, 58, 59, 60, 67, 70, 74, 75, 77,78, 80, 82, 84, 85, 92, 98, 99, 100, 102, 104, 105, 110,111, 114, 115, 119, 120, 123, 126, 128, 131, 133, 139, 140,141, 142, 147, 150, 154, 155, 156, 160, 161, 166, 168: n = A,T,C or G
  misc_feature 178, 181, 182, 183, 184, 185, 191, 193, 196, 197, 212, 250,262, 272, 274, 293, 311, 317, 332, 356, 357, 358: n = A,T,C or G
agtacttctagaattaattaaggcggggntaagnnnganaaatggcatgggggccnnnnntgagtcnaangaanntnncntngnngactttntattannntntnnactannaanngggnntgnggntnggnancctgtnnnnctgtnacnttannngctnncgtgngntatttgatanatnnnnngaggcnantgnnggttaaatggattangggcccatcgaagatgtgcttgggtaaacaagatgctngaaggcatctcngctcgttaanantcatcaccactccctaatntcaagtacccagggacanaaacantgcggaaggcctcanggtcctctgcctaggaaaaccagnnncctttgttcacttgttgatctgctgaccttccctccactattgtcctatgaccc

SEQ ID NO: 20051 - DNA, 133 bp, Homo sapiens
  misc_feature 17, 67, 97, 109, 113, 118, 119: n = A,T,C or G
gtgccgggccccccctngagagtacttctagaattaattaaggcggggaagagcaagggtttatttngtatcttcctctctttctggcttccctganattctactctcncatnaaatnnggcatacacatttt

SEQ ID NO: 20052 - DNA, 197 bp, Homo sapiens
  misc_feature 1, 3, 13, 33, 42, 50, 58, 66, 80, 82, 95, 99, 109, 121, 125,130, 139: n = A,T,C or G
ngntacttctagnaattaattaaggcggggatnactgaactnctcacacncaattggnccagatantatcacgccttatncnaagcaactagggntgantataatgtanagcatggaaatncatnctccnccgcataancctgcgtgtagattaaaacactggaactgacaattaacagcccaatatctacaatcaa

SEQ ID NO: 20053 - DNA, 189 bp, Homo sapiens
  misc_feature 21, 34: n = A,T,C or G
ggtggccgggccccccctcgngagtacttctagnaattaattaaggcgggggaagaataattagtgtttataagacatttaagaggccctttttcatatactgactcactgatgaatcagcatttgcattttatggaaaaatataaatccaaagaaataatttaaaaaaaaaagaaaaaaaaaaaaaaa

SEQ ID NO: 20054 - DNA, 700 bp, Homo sapiens
  misc_feature 5, 17, 22, 32, 44, 45, 50, 66, 69, 74, 80, 81, 93, 384, 441,450, 452, 472, 473, 494, 497, 498, 500, 502, 504, 508, 514,527, 528, 529, 543, 551, 557, 558, 561, 581, 582, 584, 607,614, 628, 637, 638, 639, 641, 647, 649, 656, 662: n = A,T,C or G
  misc_feature 665, 667, 668, 669, 674, 689: n = A,T,C or G
ctggnccgtcgttttcnacccnggaaaagagntttgaactttgnnttctnggccggcccttttctntanagtanttaaannaattaatttaangcggggccgcaggtacaggcaagaagcctcacaagtgggactctgggcctctgaccagctgtgcggcatgggctaagtcactctgcccttcggagcctctggaagcttagggcacattggttccagcctagccagtttctcaccctgggttggggtcccccagcatccagactggaaacctacccattttcccctgagcatcctctagatgctgccccaaggagttgctgcagttctggagcctcatctggctgggatctccaaggggccctcctggatttcagtccccanttggcccctgagcacgacagcccctttcttacccctcccaagaaatgccgtgaaaangaagaaaangntcttgcccccaacccatgtnnttttgcttttacccccaaggncannantntnaagnttcccnaaaccctgggctnnnttccctaaagcttnaattttanaaaaannttntgccctttttaaaggaagtnntnctttttaaaacgggccccccctnaaccctngtttggccgggganggggaaaannntntttttntnaaaacanaaaaanggntnnnttttnttttccttttttaanaaaaaaaaaaa

SEQ ID NO: 20055 - DNA, 789 bp, Homo sapiens
  misc_feature 437, 544, 558, 582, 583, 604, 605, 611, 612, 616, 619, 624,627, 629, 630, 636, 644, 645, 647, 649, 653, 655, 656, 657,658, 660, 661, 662, 673, 675, 683, 686, 689, 690, 696, 700,709, 710, 711, 715, 717, 723, 724, 736, 739, 741, 743: n = A,T,C or G
  misc_feature 744, 746, 749, 752, 763, 765, 773, 774: n = A,T,C or G
agtacttctagaattaattaaggcggggggggacagggactgcacattggaaagcacactcagaaggcttcatcaccaagattttgggagagtaaagctaagtatagttgatgtaacattgtagaagcagcataggaacaataagaacaataggtaaagctataattatggcttatatttagaaatgactgcatttgatattttaggatatttttctaggttttttcctttcattttattctcttctagttttgacattttatgatagatttgctctctagaaggaaacgtctttatttaggagggcaaaaattttggtcatagcattcacttttgctattccaatctacaactggaagatacataaaaagtgctttgcattgaatttgggataacttcaaaaaatcccatggttgttgttagggatagtactaaancattttcagttccaggagaataaaaagaaattcctatttgaaatgaattcctcattttggaggaaaaaaagcattgccattcttatcccaaccaagaatgaaatttntgggaatacaaaangtggcttcctttcccattgtgcanncccttgtcccccccccgccanntccttnnacanccnaaaangantnntgattngggatttnnancntttntnnnngnnnttttttttttncntttttaanccntgnntattangaanggctttttnnngggnantttttnnaaaaaaataaanctntnannanggnttnaaataaaaatntntttttccnnaaaaaaaaaaaaaaa

SEQ ID NO: 20056 - DNA, 432 bp, Homo sapiens
  misc_feature 142, 144, 181, 226, 240, 250, 251, 256, 260, 262, 263, 266,273, 275, 278, 279, 284, 287, 306, 307, 308, 312, 314, 317,319, 323, 342, 347, 349, 351, 354, 355, 362, 364, 371: n = A,T,C or G
agtacttctagaattaattaaggcggggactggcaggcttcacaatgtgtgaatttcaaaagtttttccttaatggtggctgctagagctttggcccctgcttaggattaggtggtcctcacaggggtggggccatcacagntncctcctgccagctgcatgctgccagttcctgttctgngttcaccacatccccacaccccattgccacttatttattcatctnaggaaataaagaanggtcttgganngctgngcanannaanaaaaaananaannagggnggnccccccccgggggggctcnnnactncnccnanatangaaccttttaccccccccnaaggncncngannaaacaangnggatganaactaatcgctgatcgtcagatcaaataaagttataaaattgcagaaaaaaaaaaaaaaaa

SEQ ID NO: 20057 - DNA, 203 bp, Homo sapiens
  misc_feature 80, 91, 96, 101, 117, 123, 127, 145, 149, 151, 155, 160,166, 174, 203: n = A,T,C or G
agtacttctagaattaattaaggcgggagaaagcacaaacatatacaatttgaaataagaaaaaaaaaacccgaaaaaangaaaccacctngtttnaaaanggtctaaaattctacnctaccncagngacggaaaatgtaaattnccancnttanctcantaaaanaaaacccnatcgtaatgaatttttttttttttttttn

SEQ ID NO: 20058 - DNA, 360 bp, Homo sapiens
agtacttctagaattaattaaggcggggggcaggtcagagataataaaattggaataaaactctataaagattctttgccaccttcaccattgctatttcctggcaaagtaacagtagaccaagttactgatagattggtaatagcagacactggacatcatagaattttggtcgtttggaagaatggacaaattcaatatagcattggaggtaaaacttgcttctgattacgatagataacgtgttttacagtaaaaaaatagttcaaggtaaatataaaagttgaaatgtctaaatgaaaactaattatagaaaagtgatatacattgacttaatttcctaataaaaattttttgtta

SEQ ID NO: 20059 - DNA, 807 bp, Homo sapiens
  misc_feature 1, 8, 25, 29, 34, 36, 37, 39, 46, 47, 49, 57, 58, 59, 60,64, 66, 67, 71, 78, 79, 84, 89, 98, 102, 354, 357, 422,519, 539, 562, 593, 679, 691, 749, 757, 762, 775, 785, 790,791, 794: n = A,T,C or G
ngactttnggccgtcgttttacatncggnaacangnntnacccttnntnctggccgnnnntttncnntagngaaaaannaaaanccttnattcggggntgantgatttccagaaaaaaagagtcaaaagtactttatagtgtgaatcctgtgagctaatacagtctatacttatttcttccctacctgtttcacatccgtaagatttaagatatacattttttgagaggtagtctgtctgatacaatgtaaatgacaaaacataattcctgagaggcccagaacaaactggagtctagcctggagttaaattgagacttctaaaatgattggaacaaagactaagttgtgccanatntaaatcaacccctcttttagtttactttagacttttgtattagctcatcttttttgtagtaaatntatagttttaaggtttctcaagatgtggctctacctactatggatgaaaaattgaagtgggtcaaaaagaattagatgttcagtgaagggaaaaaanaaaaaaaaaattgggcgaanaagaggggtgggaaaaaataaanagggattcttttttttcttccttttcctggnttctcggtatcccctggcttcccttttttttccctccccctttccctcaatttcttttggccctcctatccctttaagctggaagnacaaaacctagnaggggagcccagcctttccccagggtaggtttgggcttttttgacttaccaagggtanttttaaanaaaanggtggttagaatnattaattggnggttnnaangtttcaaaaggga

SEQ ID NO: 20060 - DNA, 472 bp, Homo sapiens
  misc_feature 1, 279, 280, 281, 283, 284, 286, 294, 299, 300, 302, 304,307, 309, 310, 311, 322, 327, 328, 329, 331, 335, 351, 352,364, 379, 380, 384, 386, 387, 397, 398, 399, 400, 410, 411,412, 413, 414, 415, 416, 417, 440, 441, 444, 454, 455: n = A,T,C or G
  misc_feature 458, 459, 465, 467, 468, 469: n = A,T,C or G
ntgagtacttctagaattaattaaggcgggcggatcacctgaagttaggagttcgagaccagcctggtcaacaagacgaaaccccgtctctactacaaatacaaaaaaattagcagggcgtggtggtgcgcatctaatcccaggtactcgggaggctgaagcagaagaatcgcttgaacccaggaggcggaggttgcagttaaccaggatcgcgccattgcactccagcatgggcaacaagagcgagactccgtctcaaaaaaaaaaaaaaaaaaaggnnngnnantttttttnggganngncnggncnnnaaaaaaaattnttttnnngngggnaaaaaaaaaaaaaaannaaaaaaaaaaanaaaaaaaaaaaaaannaaananntttttttttnnnnaaaaaaaaannnnnnnnaaaccccccccccccccgggggnnccncccccccccnnttnngggggntnnnccc

SEQ ID NO: 20061 - DNA, 197 bp, Homo sapiens
  misc_feature 3, 4, 27, 28: n = A,T,C or G
aannctgggtaccgggccccccctcgnnaagtacttctagaaattaattaaggcggggtaagatttgccgagttccttttactttttttaacctttcctgatactggcattttgtagatgtggtttgactatttctgtatgtctccatctattgatgagggtcttaaaaaaaaaaaaaaaaaaaaaaaaaaaaaaaa

SEQ ID NO: 20062 - DNA, 451 bp, Homo sapiens
  misc_feature 1, 2, 141, 197, 242, 257, 266, 271, 296, 297, 303, 305, 310,312, 322, 328, 349, 353, 356, 373, 376, 392, 405, 410, 411,413, 418, 419, 422, 424, 425, 428, 430, 431, 432, 433, 434,435, 439, 441: n = A,T,C or G
nntagaattaattaaggcgggcggatcacgaggtcaggagatcaagaccatcccggcgaacatggtgaaaccccggtctctactaaaaatacaaaaattagctgggcgtggcggcatgtgcctgtaatcccagctactcanaaggcttagcaggagaattgcttgaacctgggaggcggagattgcagtgagccganatcatgccactgtacttcagcttggcgacagagctagactccatntcaaaaaaaaaaaanttccaaaanttaancgggcttgggggggggcccctgtanncccagntnctcantnggctgaaacnggaaancccaggagggggaggttgcantganccnaaattgtgcccctgccntcnagcctgagcgacagancaagacttttgtnttttnnanaaaannttngnntgnannnnnngggncnccccccccgg

SEQ ID NO: 20063 - DNA, 269 bp, Homo sapiens
aagtacttctagaattaattaaggcgggaggggaccttgcttccacagtctgagtgctgccccgaatcactgggaacacttctcagcagggtgccgctgacatttcagactgggtgcgtttctgctggagggctgtctgcacattgcagaagctgagaggcattcctggcctccacccactagatgccagtagcagcccccctccagttgtgacaatcgaatcgaatatatcttctgacgttgccatgtgtcccgtaggggacaaaaat

SEQ ID NO: 20064 - DNA, 479 bp, Homo sapiens
  misc_feature 401, 432, 466, 468, 473, 479: n = A,T,C or G
aagtacttctagaattaattaaggcgggaaagggataaatttcaggagcattttattttattttattgagacagggtctcactctgtctctcaggctggagggcagtggcatggtgtcggctcactgcaacctctgcctcctgggttcaagcgattgtcatgcctcaccctcccgagtagctgggattacaggcatgtgccaccatgcctggctaatttttgtattttttgtggacatggtggtttgctggtgttggccaggctggttttgaacttctggcctcaagtgatccgtctgcctcggcctcccaaagtgctgggattacaggcatgagccaccgcacctggctttcttaagatctaacttaatgatgttttcattaagcctttctggatgctcnaatgaagtcactgctcattcacctgtgcctntgcttgtaccttatattacataatcacatactgnancccancactgn

SEQ ID NO: 20065 - DNA, 443 bp, Homo sapiens
gccccccctcgagagtacttctagaattaattaaggggggggtttacttcactagaaatgtactgtaagaagctggacagaaagaggtcttgttagaacccaacagtgagttttcttgctcaagagacaactcttagtctcctacgcttcttttctagtacatgaaacattaccatatgcagaaaaccattcgtcttacctagtcattaagatgttcacaaatcctttatctacatgaagtttgggagagatgttatctttaatccatttatatatggtttgaggggatggatccaactttatttgcttcaacagttccttctccaatttgaggagtgggaataagaaactcagtccctttccttccaaaatctccaacatgcggtccttattctgatcaatttctgaagagacaaagccacctgcatcatctaatagttcat

SEQ ID NO: 20066 - DNA, 377 bp, Homo sapiens
  misc_feature 21, 31, 33, 52, 234, 252, 261, 263, 279, 280, 281, 290, 294,309, 317, 318, 321, 322, 325, 338, 339, 340, 341, 342, 344,349, 359, 360, 361, 362: n = A,T,C or G
tgggttccgggccccccctcnagagtacttntngaattaattaaggcgggcngactgcttgagcccaggagtttgagaccaacctgggcaacatggcaaaaccccatttctacgaaaaattagctaggtgtggtagcatgtgcctgcagctacttgggaggctgaagaagaatcaagtaacctgggaagtcaaggctgcaatgagctgtgatcgcactccagcctgggtgacanagtaaaaccctgtctccnataaaatananatactttataaaaagnnncccccccgngggnggccccaaagactcnctttaagnngtnnatnccccccccccccnnnnncngtttntacaaaaaannnnaatgaaaaaaaactt

SEQ ID NO: 20067 - DNA, 327 bp, Homo sapiens
  misc_feature 1, 2, 35, 37, 38, 43, 45, 47, 49, 67, 71, 103, 104, 112,116, 128, 131, 174, 184, 190, 244, 268, 291, 305, 310: n = A,T,C or G
nnagtacttctagaattaattaaggcgggggcctntnnaaaananantnaatggggcccgaaactgnttcntccaacgtcaaaaatgtcaatggatgatttannagcctgantaancactgtaggatngtnttcacagtgactacacacagaacaaacctacagttttaactgnggatattgtnacgtancctaaggctcctgttttgcacagccaaatttaaaactgttggaatggatttttntttaactgccgtaatttaactttntgggttgcctttatttttggcgnggctgacttacatnatgtnttggggaagggcctgcc

SEQ ID NO: 20068 - DNA, 443 bp, Homo sapiens
  misc_feature 257, 289, 293, 363: n = A,T,C or G
agtacttctagaattaattaaggcgggttaaaagtagacatttcctggaacatatatttaatagtatttaagactgttaatactgtttaattataaaactttgggccgggtgtggtggctcacgcctataatcccaaaactttgggaggccgaggtgggcggaccatgaggtcaggagatcgggaccatcctggctaacatggtgaggccccatctctactaaaaatacaaaaaatgtagccgggcatggtggcacntgcctgtagtcccagctactcgggaggctgangcanggagaattgcttgaacctgggaggtggaggttgcagtgagccgagatcaagccactgcactccggcctgngagacagaatgagactccgtctctaaataaacaaacaaataaaaatgtattctctaaggacattttttttttggttactg

SEQ ID NO: 20069 - DNA, 392 bp, Homo sapiens
  misc_feature 25, 27, 30, 38, 41, 48, 66, 293, 302, 303, 315, 331, 337,339, 346, 347, 348, 349, 350, 351, 352, 365, 366, 367, 368,369, 370, 371, 372, 373, 374, 375: n = A,T,C or G
cgcgtgcgtctttccaaccctgcantnaanggtaacancangctgggntaccgggccccccctcgngagtacttctagtaattaattaaggggggaaggcaggggtagtatgtagggagcgctctacatactctactttttgatcagtttttctatatacctaaagctatctttaaaacattaagtctatgaggccaggggtttgagaccagcctgggcgtgatatggtgagaccttgactctacaaaaaaaaaaaaaaaaaaaaaaaaaaaaaaaaaaaaaaaaaaaaaaanaaaaaaaanncccccccccccngggggggccccccccncccccntnaaggggnnnnnnnccccccccccccnnnnnnnnnnntaaaaaaaaaaaaaaaa

SEQ ID NO: 20070 - DNA, 544 bp, Homo sapiens
  misc_feature 449, 520: n = A,T,C or G
agtacttctagaattaattaaggcgggggcgagcggatcacctggggtcaggagttcgagaccagcctggccaacatggcgaaaccccgtctcaattaaaaatacaaacattagccgggcatggtggcgggcgcctgtaatcccagctactcgcctgtaatcccagctgaggaaggaaaatcgctagaacccgggaggcggaggctgcagtgagccgagatcttgccattgcactccagcctgggcgacaagagcgaaactccgtctcaaaaaaaagaaagaaaataaaaagtgaaatgtggatgtaacaacgcacttttaaaaaaagtctaaacatctgaggaatgtgtctgtgcttgcagtgtccagccagcacagagactgcactcaagggatgtgggaacggctgattgaacgtgaactgcggtcattaaatcttttatgtctgngttaatatctacaaataagccttaatttctgtagtttctgcatatctcacacggttcctggcaaattgaanagtgttttcattgaatttcaggga

SEQ ID NO: 20071 - DNA, 229 bp, Homo sapiens
  misc_feature 149, 180: n = A,T,C or G
agtacttctagaattaattaaggcggggggaaaggagggaccagcaaacccttcttgggatggctgaggacacaggggactccagcagaaagggaggcccctgggtgtgcaagacgggacgctgaccagcctgggccctcaccggccantacccccgtatttaccctatagcaccccctntaccccctctcgaataaaaaaaaaaaaaaaaaaaaaaaaaaaaaaaaaa

SEQ ID NO: 20072 - DNA, 143 bp, Homo sapiens
  misc_feature 143: n = A,T,C or G
cgggccccccctcgagagtacttctagaattaattaaggcgggagatataagccaaggattttaaattgacccttagctatagagaatttgctataagctagtcttgtttgttaaaaaaaaaaaaaaaaaaaaaaaaaaaaan

SEQ ID NO: 20073 - DNA, 267 bp, Homo sapiens
agtacttctagaattaattaaggcgggtggatcaactgtggtcaggagtttgagatcagccaggccaacctggtgaaaccccgtctctactaaaaatacaaaaattagctgggcgtgatggtgggcgcctgtaatcccagctacttgggaggctgaggcaggagaatcacttgaacccgggaggcggaggttgcagtgagccgagatcgcaccattgcactccagtctgggcaacagagtgagattccgtcccaaaaaaaaaaaaaa

SEQ ID NO: 20074 - DNA, 377 bp, Homo sapiens
  misc_feature 38, 39, 47, 54, 55, 60, 61, 62, 77, 86, 138, 153, 158, 170,184, 185, 186, 190, 192, 193, 195, 199, 201, 209, 210, 225,230, 231, 232, 240, 244, 246, 249, 267, 268, 269, 270, 273,278, 281, 301, 310, 313, 314, 316, 321, 325, 326, 355: n = A,T,C or G
  misc_feature 360, 365: n = A,T,C or G
agtacttctagaattaattaaggcgggagggtgggctnnatattttnattccanntgaannnctctgtcttaaaatnagaaattantaacagagaattttggaaaattatgcaaacacatggatattaatcattatgntcttgaatgaccagngagtnctgaaaaaaagnaagaatgggggccnnnattntnntngatngnatgaaacnngaaacacaacatatnaaaannnacaggatncagnanatncacaactaagagcaaagnnnncanctatnaantgcctccaatttaaaaagtntataaactncanntnaacancctnncaatgcattttaaagaattagaaaagcangagcncacanaacccaaaatta

SEQ ID NO: 20075 - DNA, 431 bp, Homo sapiens
ggtgccgggccccccctcgagagtacttctagaattaattaactatttaaagtaaaagtaattaacaatgaacatttgggtttataatatatgtagaaataaaacaagtgactacaatagcacataggaggacaaacagaagtataaggtttcaggttcttatattatatgtaaaatgttatcctactatttgaaagtaggctgtgagaagttgaaattcattttataaaccccagaacagctactttttaattatatatataattaaattaatttaatttaatttatatatacataaaataagccaagaatagaataaattagaatactaaaaactacacaattaatccaaaagaaagaaaggtgggtggggaaagaaaacacaacagataggacaaaaaggaaacaaacagcaagacagatttaaaccc

SEQ ID NO: 20076 - DNA, 573 bp, Homo sapiens
  misc_feature 563, 564, 565, 566, 567, 568, 569, 570, 571, 572, 573: n = A,T,C or G
cagcctcctgagtagctgggagtacaggcacgtgccaccatgcctggctaatttttgtatttttttggtagagatggggtttcaccatgttggccaggctggtctcattaaactccgacctcaggtgatccacctgccttggcctcccaaagtcctgggattataggcgtgagccaccacatgcggcaaccccacagttttaacagattgtttatactttgatttggttttgcagatgatatgcatactaaggctttaaaaaattatctaaatgtttaataattttttgtttttgtgattgggaattatttacttctgggagtcatgatcctaaagaaacagtaaattggctgtttagagtgggaaaaaaaaacttcaggtaactttgttacttaaatcctgtctcttaattcataggttaagaccttaattttgcctctctcggtttatgacagtactcttgactttagccttttaactccctttatgtgcgtttttatccatcactcctgttagttgtaagaatgtaggcccacgttaattaattctagaagactttcgannnnnnnnnnn

SEQ ID NO: 20077 - DNA, 2070 bp, Homo sapiens
  misc_feature 2069, 2070: n = A,T,C or G
ccacgcgtccggcctctggcacctggggcagccgcgcccgcggagttttccggcccggcgctgacggctgctgcgcccgcggctccccagtgccccgagtgccccgcgggccccgcgagcgggagtgggacccagccctaggcagaacccaggcgccgcgcccgggacgcccgcggagagagccactcccgcccacgtcccatttcgcccctcgcgtccggagtccccgtggccagatctaaccatgagctaccctggctatcccccgcccccaggtggctacccaccagctgcaccaggtggtggtccctggggaggtgctgcctaccctcctccgcccagcatgccccccatcgggctggataacgtggccacctatgcggggcagttcaaccaggactatctctcgggaatggcggccaacatgtctgggacatttggaggagccaacatgcccaacctgtaccctggggcccctggggctggctacccaccagtgccccctggcggctttgggcagcccccctctgcccagcagcctgttcctccctatgggatgtatccacccccaggaggaaacccaccctccaggatgccctcatatccgccatacccaggggcccctgtgccgggccagcccatgccaccccccggacagcagcccccaggggcctaccctgggcagccaccagtgacctaccctggtcagcctccagtgccactccctgggcagcagcagccagtgccgagctacccaggatacccggggtctgggactgtcacccccgctgtgcccccaacccagtttggaagccgaggcaccatcactgatgctcccggctttgaccccctgcgagatgccgaggtcctgcggaaggccatgaaaggcttcgggacggatgagcaggccatcattgactgcctggggagttgctccaacaagcagcggcagcagatcctactttccttcaagacggcttacggcaaggatttgatcaaagatctgaaatctgaactgtcaggaaactttgagaagacaatcttggctctgatgaagaccccagtcctctttgacatttatgagataaaggaagccatcaagggggttggcactgatgaagcctgcctgattgagatcctcgcttcccgcagcaatgagcacatccgagaattaaacagagcctacaaagcagaattcaaaaagaccctggaagaggccattcgaagcgacacatcagggcacttccagcggctcctcatctctctctctcagggaaaccgtgatgaaagcacaaacgtggacatgtcactcgcccagagagatgcccaggagctgtatgcggccggggagaaccgcctgggaacagacgagtccaagttcaatgcggttctgtgctcccggagccgggcccacctggtagcagttttcaatgagtaccagagaatgacaggccgggacattgagaagagcatctgccgggagatgtccggggacctggaggagggcatgctggccgtggtgaaatgtctcaagaataccccagccttctttgcggagaggctcaacaaggccatgaggggggcaggaacaaaggaccggaccctgattcgcatcatggtgtctcgcagcgagaccgacctcctggacatcagatcagagtataagcggatgtacggcaagtcgctgtaccacgacatctcgggagatacttcaggggattaccggaagattctgctgaagatctgtggtggcaatgactgaacagtgactggtggctcacttctgcccacctgccggcaacaccagtgccaggaaaaggccaaaagaatgtctgtttctaacaaatccacaaatagccccgagattcaccgtcctagagcttaggcctgtcttccacccctcctgacccgtatagtgtgccacaggacctgggtcggtctagaactctctcaggatgccttttctaccccatccctcacagcctcttgctgctaaaatagatgtttcatttttctgactcatgcaaacaataaactttgcgtgtggctaagacttggcttcatttcgnn

SEQ ID NO: 20078 - DNA, 2189 bp, Homo sapiens
  misc_feature 1, 2: n = A,T,C or G
nnacgagaaatccacgaccaatcccgatcggctcttattagctccccgctccacaagacacctgtgctttggaaatccaccaccaatcccgatcggctcttattagctccccgctccacaagacacctgtgatctggaaatccaccaccaatcccgatcggctcttattagctccccgctccacaagacacctgtgacatcctccagggccacaggagcacgtgctgaccagttttcccttccagttcctgcacaaaaagtgtccagagggctgtttgcaaacactagtgcactttgtagcttttcaccctctgtcccagggaatctaggagagatgaggcccgtcagagtcaagagatgtcatccccccagggtctccaaggcatttccacactattggtggcacctggaggacatgcaccaaggcttgccagagccaacaggaagtgagcccagagcatggcacatgagcatcacccgctgatggtggcctgctgtgcctggtgccaacaggggcatcccggcccgtacccctccagacaggaagcatgggtttgcccacagacctgtcgggtgctcctgtgagtggcctccagatgtctttgtgcataggcacaagtgggccagggctggagggaggtgggaaacctcatcatccggtgggccctgccaatcttaacccagaacccttaggtattcctggcagtagccatgacattggagcaccttcctctccagccagaggctgacctgagggccactgtcctcagatgacaccacccaggagcaccctaggtgaggggtgagggcccccttatgtgaacctcttgcctcttcctttctcccatcagagtggttggatggagccattggcctccttttcttcagcgggcccttcaacctctctgcaccatgttgtctggctgaggagctactagaaaagctgagtggagtctcctttccaacaggatgatgcatttgctcaattctcagggctggaatgagccggctggtcccccagaaagctggagtggggtacagagttcagttttcctctctgtttacagctccttgacagtcccacgcccatctggagtgggagctgggagtcagtgttggagaagaaacaacaaaagccaattagaaccactatttttaaaaagtgcttactgtgcacagatactcttcaagcactggacgtggattctctctctagccctcagcacccctgcggtaggagtgccgcctctacccacttgtgatggggtacagaggcacttgctcttctgcatggtgttcaataggctgggagttttatttatctcttcaaactttgtacaagagctcatggcttgtcttgggctttcgtcattaaaccaaaggaaatggaagccattcccctgttgctctccttagtcttggtcatcagaacctcacttggtaccatatagatcaaaagctttgtaaccacaggaaaaaataaactcttccatcccttaaagaatagaatagtttgtccctctcatgggaattgggctgtatgtatattgttcttcctccttagaatttagagatacaagagttctacttagaacttttcatggacacaatttccacaacctttcagatgctgatgtagagctattgggaaagaacttccaaactcaggaagtttgcagagagcagacagctagagataactcgggacccagagttggtcgacagatgttagatgtatcctagcttttagctataaaccactcaaagattcagcccccagatcccacagtcagaactgaatctgcgttgttgggaagccagcagtggccttgggaaggaagccatggctgtggttcagagagggtgggctggcaagccacttccggggaaaactccttccgccccaggtttcttcttctcttaaggagagattgttctcaccaacccgctgccttcatgctgccttcaaagctagatcatgtttgccttgcttagagaattactgcaaatcagccccagtgcttggcgatgcatttacagatttctaggccctcagggttttgtagagtgtgagccctggtgggcagggttggggggtctgtcttctgctggatgctgcttgtaatccatttggtgtacagaatcaacaataaataatatacatgtataaaaaaaaaaaaaaaaaaaaa

SEQ ID NO: 20079 - DNA, 444 bp, Homo sapiens
  misc_feature 1, 444: n = A,T,C or G
nctggtacctcaacatatttgccttgatagcttaacttagcttttctaatataccttaatagagttaagttatgtaatactcaattctgatttggaaaagtctaacttttcttttagctctggttaggatgagtgtaaggtgggatgagtggggttttgtttctgcatgtgtccacactaattttaaacacacatctgaacaatagcttttcattatctaagttgaatatcttagatactgaatattactaaaatttactaacaatattaatactaaataataccatcttatacttatgcaaaatgttacatttgcagagctccttctcacacgtttgaccattacaactttctaagacaggctggacaaggaaaactggctctggctttcagaggagaagaggtgtctaagtaacctgcggcttttctgctgagcagctgtan

SEQ ID NO: 20080 - DNA, 584 bp, Homo sapiens
  misc_feature 584: n = A,T,C or G
actgtaaacttctccccctcctggatctttgctcactaaatcagccctaaccctttctcttcagtctctttctcttgactttcccctagatcttgcccctagaccatcactcagctggttcctcttcattgcctccatcttagttcaaatgtttcttctttggacagtttggagttttgctccccctcttccctgccattctatagtaggttttttttttcttaaaatagtgcatatcatctgggtgcggtggctcatgcctataatcccagcactttgggaggctgagggggtgtatcacgaggttaggagataaagaccatcctggccaacatggtaaacccctgtctctactaaaaatacaaaaaaattacctgggtacggtgatgcgtgcctgtaatcccagctactcgggaggctgaggcatgagaatcgcttggagccgggaggcagaggttgcagtgagcagagatcatgccactgcactccagtctggtgacagagtgagactccgtctcaaaaaaaaaaaaaaaaaagggcggccgctctagagtatccctagaggggcccaagcttacgcgtan

SEQ ID NO: 20081 - DNA, 721 bp, Homo sapiens
  misc_feature 709, 721: n = A,T,C or G
acgcggggggctctcaaaaaatggtggccattattattatttgctcatggaccagtatttcaatgatggaaatactttagtgcctctaaaaatcagctctagtgttaacacacttaaggaaacccagtcaggtcacctctgactctgtaaagcattataaagaaaataatgaactcataagtgagttcttgtgagtcattcaggttttaagaagccactgctttgattttgaaaacagacaaaaaaatctcagaatctacttggactagggttcatttattctgcctgtttcaagtcagagcaaatactcctggaatgaccctctcctgtttcctgagtttgagccgatcctatttggcactgcagacagtgagaagtggatgtttgaggacagatgggaggtgcaaagtggagacaagtattggtgccaccttccactatgagactagcagggcccagttctcttagctattgtctctattttgtagattaggaaatttcaagtttagagaagttgagttaactcaccgaaggtctcggggcttggtgggaagagggacggaaaattaaattcaggtctgtgtgtctccaccaccatgttccttctctttataccttgattgccacccttagaattctaagcaccacggccccaaatatataaactatgtcgagctctcagcttttgttaaaagcatcttattaggcncatggtgtatgn

SEQ ID NO: 20082 - DNA, 498 bp, Homo sapiens
  misc_feature 1, 2, 3, 4, 497, 498: n = A,T,C or G
nnnnaccgcggtggcggccggaggagagacggactgagttttggcgataggtcgcacaccttaccaacagcaggcggcgagggctccccacgctgctcgtttccagaggtgcctcgtattattgagaaggcgtgcagtgaatgaaaatgtgtccacacagctcctgctctgcctgtgacattgggttgctgtatattagctgggatagtatatttcaaattgctttctcaattgcaaagtatggtagaaataaatattcgctttaatttagtaactagaacttagaaaagttcctcctgtttcctgattgccaagtcgggatgagaaatagatttcataattatgatacaacttgatatcttgagataaatgtttaactttgaaagttaaacatgggtattttttaaactttatcattttgtgttcattttgcacatctctatacctccaattttgaaaagaatttcttccaaagttatctttatgttatctttacnn

SEQ ID NO: 20083 - DNA, 1056 bp, Homo sapiens
  misc_feature 1, 206: n = A,T,C or G
nagttacctccttccggtccaatgttggagttgcaggcccttttttgtttgtgtttttttcttgtctttgtaaaaacatgactggggccttaaaatagcctttccaccccgcaacttctagtcccactgcctagatactaccattgcttatgcactttccatagagatgtttatatacacacacatccacgtcatcacatacacanagacatgtaggtacaactgttctgtaaatacctctgcccatgcatctagggaggatatgtttgaggacatatagatctaagctcctttttttagtgcttgtataatgtcaatataccataatttacctatccgtaatttcatatccattagtgaataggaaggctgttgtctgctgtttgttttgttttgttttgctattagttacaataaacatcccagtacatgtctgttggtatactttttcaagtatctgtttgcaatttctagaagtggaacttctattcaaagggctgtatacctaattttgacatataatgcttaaatatccttcaaaaaggttgcatccagttactttctaactaccatcacctaagcagacctgtttccctcatgctctcaccaataccagtattaaagcttttatagtaaaataaagttcacctttaaacaccacctcaattgccaaacgcagctcaaattgtccagtgcttttttttctctcatgctgttcaccaatccaacagagccctggctaggtgacccatggggaaaagcatgcttttcacagggattcgctctactgttccttcttgcctctttaacacaacacgtgcatgtgctcaggattcacgaacaaaaacttactaagatatgaagcacctttcatcaactatctcaaagagaaggctaatcaattaaatctcacctaacgtgtgagacaggttaactccagaacctgatcagaaaaaaacaaaaacaaggacagagtttagtctgatacggcatcacttaatcaaacaacaaggagtagtattttacctacatctcaaacacttaaaaagtatttgt

SEQ ID NO: 20084 - DNA, 692 bp, Homo sapiens
  misc_feature 1, 2, 3, 688, 689, 690, 691, 692: n = A,T,C or G
nnnccgtacatattagggatcaaacacataacatgttcagatcatacacttatatctggtgtcagaatccatctgcagatatggctgttagctccctggaggtgaacttgaaaggaaaaacatgtaaattacatcatgctaattgttaataggagaaaacacagtggcagagcctttcttgatacttagccctaagtaaaattcaaaaacagacgttgcttcaggagctgctgaggtcgttcagggctattagaatggtgcctccgccacacttaatccattctgccgaattcaagaatatttatttccctgaaatgaactcacaagttgccctagaggaaaacttggagaactagagctgctcactgtgcagatgccatcctgatgaccccagagatgtttacatcagtgaaacctctgggaatagtgagccccctggctagttttcaaaggacttggggaagagggtagagctaaatcctgtgttctcaacacaggaaataatataacccccattgggatgaaaattcattcttgggtggtgacaaaatcttagacgttataatggtttgtggtctctaaggggccacagcattaaaatctcatggtgggtggagttgggctattaatttctcagaatgctcaggggcatgttgataatgaaaaagagactgagaaacgctgatcnnnnn

SEQ ID NO: 20085 - DNA, 427 bp, Homo sapiens
acaaatttgatcattttattatatctgaaacagactaaaggcaggttgactgtgaggggtggcaggaagcttttgggtgatagatggtgagtggtctgtagtgctggttattccatatagacttttgtcaaagctcatggaagtgtttgtttaaaatgggtaaatttattacatatgttatacttcactagtgaaatctttaaaaactatgctggtggcttcctgtcatcttctgaataaaccctgattcttctttttcaaggtaaacaagaacttctggtgtgccttccacctttcccatacctccctccatcctcacctctaacctctccacttcaaattgccatctgcacctcagttgcgagctgccccctactcgtgtgctcttgcctctgggtctaaagtctgcagcgcactcacccaccca

SEQ ID NO: 20086 - DNA, 1006 bp, Homo sapiens
  misc_feature 1, 1004, 1005, 1006: n = A,T,C or G
ngtactatttgaaaatcattaggtttgggcatatatggatgaacaaaacaagtcccctgccctcttagatattatagatcattgagggaagaaacaaagtaaatggcacttttcacagtaaggatcgatgaaggaaaagaagagcgtggatgagaagatggcaagggaaccaaaattagaacatggaatttgggggatgctgccagggaagcttagctacgtggaagtagctaatggtgaagctcattctgtaagaaaaccatatgtgaaagcacagataatgagggggaacaagacttggcctccaagtaagaaataatactggaaaataattaccaagaatacatagatgagggatggagttagagaggtaggcaaggaccaaacatttcatagcacgggaccttagagggtcttgtttaagatcctgtcttgggcacaagtagaatctattgaaggattttgaagaagaggtctggtttatcttctgttgtgtagggaatattagtgatgagaactaagagggcaagtagggcagtaagtttggagacctattagagtaggccactgtctcaatctcttgaagaaaataatcatcccaagcctaacaataacttgccctggtttttcaaatgagtttttattgggtgtattaatgagcaaaatcagtctgagtaagataggttgagaactgatgaggctccaggaaattactaattatttctgataccttgttgggtcatataatggctttctgatttggcagaaaaaagtagcaggacattaatttatggaagtattctaaacacttgactatgtccaacactgttaaagttgtgagtttgtgttaacttaatcatcatcaaaaccttgagtaggagtagatactgttattcatgttttagaggtgagaatattggagtacagaatttaaataacttgcctaaagttaaactgctttagtggtttagcatggattcaaccctgggattaagggtgcagannn

SEQ ID NO: 20087 - DNA, 347 bp, Homo sapiens
  misc_feature 1, 2, 3, 4, 347: n = A,T,C or G
nnnntggaagcaacatctacatctttttcagcaatctagatgctggggacacaaggtccaccttccaggaatatggccatgacaccagaaatcacaaacatgatgagaatggaatgactggggaagaagtgccagatgcttcacttgtaaatgaagacccagcctctggggatgcagataccacctccctgaagaagctgaatatctgcagataagtggagttcaccaatgatgaggagcgggatggagaaaggaggtagggagagtcatccaaggaacatgagcaacatgttaaaagaattgaaccagagtccggtgaatatcagcactgggaccagttagcagan

SEQ ID NO: 20088 - DNA, 732 bp, Homo sapiens
  misc_feature 732: n = A,T,C or G
cgtccgtaaaaaaagtaaggctgggattgcaagcactgagccagtgtacccagccttttttctattttgttcttgtcttgtatattttacatttttttgcttttcatgtttctgaaaccacttaccacatttaggccaaaaggcaaaataataaaaaataaaaccaacctcacctaaaaaaaagtttaaggattaagtatttccatataccagtgttgaacagatttgaacaatatatttgattttatgctctccagttgctaaagtgaggaaaagaaacagaattatattgttttcatgtgctgacagccggaagcatgtaaacatctgcagaaaccaaacgtttcctggaactaagcttgagcagaaatctatcacgtggacctttgtttaaagaaccttgtgaaaaaccacagttacgtaaaagatccaggagcgcagttcatgtggattagattctctaggaggcagagagtctaaggagatcaaagaaaacaacgacttgggaagtgcatgtgctgagcactggagccaaactagcagaaaggagttttagaggcactgaatccagggcctctggtttttggggactgtagtaaagaaaggagttgaggcctggtgcagtggctcatacctttggtcccattactttgggaggctgaggctggaggatggtttgaggctggaagttcaagaccagcctgggcaacaaagcaagaccccttttctaan

SEQ ID NO: 20089 - DNA, 452 bp, Homo sapiens
  misc_feature 452: n = A,T,C or G
acagaatacctggacaaagacaaaggtcagcctctagaatttgccagaaatgggccagcaaagtgcagcatcttaataactgagtgatactggcaggaagatttctccaaagactaactatggtgtttgaaatacgcctgtaaattatttgacactcatcccttcaaaaggtggggactaatttctgtccctttgagtgtagactacccttaatgacttgattctaacaaataaattgtgacagaaatcatggtttatgatttcagggactacatcctaaaaagcatgtcttactctctcttcaatcactcactgtaggggaagctagatgccatgtcatgaggacactcaggcagtcctatggggacatatcgatggcaaagagctgggtcttattgacaatagccagcattagcttttcaaccacatgagtgagccacccttgaagcagn

SEQ ID NO: 20090 - DNA, 1076 bp, Homo sapiens
  misc_feature 1, 2, 3, 4, 5, 6, 7, 8, 9, 10, 11, 12, 13, 14, 15, 16, 17: n = A,T,C or G
nnnnnnnnnnnnnnnnnaagatacagggtcttgctctcttgcccagcctggactgcagtgacaggtcactgtagcctcaaactcccgggttcaagtgatcctcttacttcagtttcccaagtagctgatattacaggtatgcaccaccatgcccagttaatttttaaatttttctattgctgtctgtattttcatatcaagataaagcacaagtttagatttaccttttttttttaaaaaataatcttttactgggaggtggcaagagacccatttcttcagaattcctgtatggctcatattctgtgtcagggattgtgggaaagacaattccagggatagatgagccccgcactcatctcttcaacttacactctccatgccacatcttcaaacaggaagtagaaaccagaaataatcccaaccagaagtgtgcacagctcaggatcacagttgcttgcaagaaacagaagtgacacgtttgagtattctctctttcaaaaatggtgcaatgcaatttcatcaaggcattcatttcactacaccaaagcaacaagtactattaaatttaatgagaggtaacccatgcaccggcaggaagttcaaggggacagaaggggcttgctccactctggagccctatctcctctcacctccttccttctagtttgacatgcgatcttgtctctctcttttataaagtgcttccaggcccttttgattaggatgctgtcctaaatccttcctaaagagaggttttggagccaccaacactgcttcactgtggaataaactttccttattaagattcttcattcactcataatcatctcctttttcctcactgctcattcatttatggagatagcacccatatcatagctacttggtcaaatcatggtgatactccccacttaggagaggaagatgactaggttatagctcttgcctttaggaaattaaaaaccctgtggtgtaatctacattacacagtggaatatggcatatatcatgaaaaaatcctatgcagtttctgagaggacttcttaaagatgaaaaagtgaggaatcccgcgt

SEQ ID NO: 20091 - DNA, 338 bp, Homo sapiens
  misc_feature 338: n = A,T,C or G
acctcctagccatccaattatagaggctttccctaggatactgcttgcccttgcagggaatgggatctacacagcccatacaccttaagagtccagtattgatgtcggtgttttcatcattcctcaaagccatttctggaccattcttcctctagccccttataaaaatgcttgttcacctgagctcaaatcaacactatcaccttttaccaactatttctcaactgtctacctcttcagtcacttttccctccttcattaagactttacacccatatcagtcctcctcaccacctcaaagtttgccatttaacagcttgatctttctcttcttgacn

SEQ ID NO: 20092 - DNA, 981 bp, Homo sapiens
  misc_feature 1, 2, 3, 4, 5, 6, 7, 8, 9, 10, 865, 866, 867, 868, 869, 870,871, 872, 873, 874, 875, 876, 877, 878, 879, 880, 881, 882,883, 884, 885, 886, 887, 888, 889, 890, 891, 892, 893, 981: n = A,T,C or G
nnnnnnnnnncctgatgttgtataataacgtgcctttgtttagaagttctgcataactcagcgaactggcatttttcaaatgacttatatgtgatattacaaaattatgcatggctgaaagtccattctacatgcatgataaaccagtgaatgttaatataatgccacaaaaagttcattagtatggcttgagtctatgttatagttaacctttaaaaaactaccacttgttaagttttggtgtagtatcaaagaaaaatgtccacagttatttgaaaaagccatttaagtcttccttttccaatacgtgtctgtgtgaatgcccattttcttcatacacttcagtcagaacaacatattgcaacagaatgaatgcagaagcatatgtaagaatccagcagtcttctattaagccaaacattaagagatgtataaacataaagcaaggctattcatcttactaaattttcattttttgttttggaaaatagctttttcatttatgtagataagtaattgttttcttacttttaaatgaattaatactaagtttctcagttttcatttcaaatgtggtaattatcaatgtaagtaacccttgtaaacaaacattctttggggtccttaatgatttttaagaatgtaaaggagtactgagaccaaaagtttgagtacttctgtccttaggcatccattgtattaataaattaactttttccatgcagctataatagaatgatactacttttgtcaattttggcttttgttgccattgcttttggtgttttagacatgaagtccttgcccatacatatgtaacaaacctgcacattgtgcacatgtaccctaaaacttaaagtataannnnnnnnnnnnnnnnnnnnnnnnnnnnngaatgatactacttttgccccattttgcaagacttgagaaaattatcactcaaatcattttctgtgttctgtggtttggatgaggaan

SEQ ID NO: 20093 - DNA, 524 bp, Homo sapiens
ggttctagctttttaaaaaagcaaatccctagaatcttaaaacaattgatatctagtttgctagtatgtgatattctagtcagaattcctcttgggagtgagttggaagagggttatggtggtcgctagcattctcattttcaagaccactctgttcctttcttagaccatgtttctcatcttaagcagtcatgcccgagctggagacaggaaaccagacagcagtctgccctgataagggacagcattgtctgaaggcggggaatagccctgcttttacccccaactcagctctctttgcttgaaatttagtagtcatagaagaggcacaatgctgttgacagtttctgaaccaaaactaggattcatttcttccaaagcaaaaaaatagtgtcctcggccgggcgcggtggctcacacctgtaatttcagcactttgggaggccgaagtgggtggatcacctgaggtcaggagttcgagaccagcctagccaacatggcaaaaccccatctttactaaaagt

SEQ ID NO: 20094 - DNA, 929 bp, Homo sapiens
  misc_feature 1, 2, 3, 4, 5, 6, 7, 8, 9, 10, 11, 12, 13, 14, 15, 16, 17,18, 19, 20, 926, 927, 928, 929: n = A,T,C or G
nnnnnnnnnnnnnnnnnnnngataggctcagcagcatttattttctagttttaagaaaatttgattattcttgtatgaggtctaaagtgtgtatctatcagtccaatcaagcttttaaattttcggaaatactaaatttctaaatcataaagcgtcatttaaaaataattaattgtttcagtccaaaaatagcgtgggtcaaactggaattttcaaagtgacgtatctgtggatgatatgcttatggtaccaaaaagactctcaaaaaccaatactcccacgggcaagggaatagccaagtttgttgcggtttccaatgaatgacatcagccctgtgtaggtctcaatcaaaatgggttcagttaacaccatcagtttctttcctcttccagatccagttgaattcttgtgggcattctggatagctggaacaagcttagacatgaacccagacaacttgcaaatttcaaggaatttctcactggtgtatttcataggatgctcagtgaaagtagcataaggaacttcagtggaccatgggttccagcgggacagaagagactgctcctccggactcccccagtagatcctaaggccttctccttgtctcttgtccagggacatcccagggaaggtgaacttgcccaggcagatgcgatagacagcgctcagaggaatccgctgcagctgcacacaactcagcatgatgaagtcgtatttgcagatcaagagagtcttgtctgtgaccagtagaattctctccttctcattgttccagtggtctatctttgtcaagagccagaagccttgaatggtctctccagaagtctcagctacgtgacctttcaagtcttccatggcagtctcaatggcccccggccgtgtagcaaaggaatcattttcgctttccgcacgaaccttctcannnn

SEQ ID NO: 20095 - DNA, 618 bp, Homo sapiens
  misc_feature 1, 2, 3, 4, 5, 6, 7, 8, 9, 10, 11, 12, 13, 14, 15, 16, 17,618: n = A,T,C or G
nnnnnnnnnnnnnnnnnactgcaacttaaaaaaaaaaaaatcacctccaccatcatgacctcctaaattctgagaccaaataaaacattcttctttttctctcttttcccctcccaagtattctgagaaccccctctaaaccataacatactaaaatggcttagtgctgggctggctttgaagccaaggaagggtgtggctctcagctagtgagggggcccaggactgaaagggtacagaaagaaaaaaacctgcttctctgtggtgcatgcatgacgcacacacaggactggtctaacaagtcctgatctctcaggccaggccgcctccttctcctcccccattatccatgtgcctctccaaggccctccactgggacagttcacactgagttttctctaatcctgagaagagactgagttacttacctggatccctgtgcaaccttgccaaagacacctcacctagccctaaaaggagaaagcagggctttagggagaggccgataaggaaacaaagataagagggaggggcagaaaaacagaggaaggtgttagactaaaggaaggggagaggccaaatgcctttctccttcctacaagaggagagagatcaggn

SEQ ID NO: 20096 - DNA, 413 bp, Homo sapiens
actatcacctggctataagttctgagtttaaatcttaggtgcagaactttctagctctatggccttgggcagattgcctaacttcagtgaatctcagtttcctctttggccaaatgcagacagaaccagctacacctaacctggcgtgaagtttaaattacatgggatgacaagaaagcatttagcacccgctctacacacagctacaaataaccaagcactgattattatggtccaacaaagtgggaggaaaaaagaacaaaatatggtttttaagagaaatctaccaaacgcttcagtaatctgaggaaattttagcttgagtttgacagaaatctcaagaatgctcagagtcgtggcctctttctttagagggttccttgactcctgcaatgtgagcctcaccatcatgt

SEQ ID NO: 20097 - DNA, 536 bp, Homo sapiens
  misc_feature 536: n = A,T,C or G
acacacaggcattcacacccccaatacacacttcctccttctatctccctgtctgatttccactcatccattctcagctcctgtttgtctgaggccacatgcaactggatttgtcaagcccccttttcacaacttgttgtcacagtccattaccaaattgcatatagttatatattccactaattaggcttctaaaatatcattaacatgtctcttgatcattagcataacgtatgaggcgacgtcgttaggcacgactcgagtttgttaacgtggtaatgaaaggcacaaggcaggctctgcaggaaccaagaagcacagagaagtggggaatatccaagcaccaagatgctagccacaaaggcatagacagagacacagagagacaaaggcaggcacagagaggagatgcaaggcacgaggaaaaggcagagaaacacagtcaaaggagtgcatcagtaagcacgactttggcagtgagatggctgcttgggcgtaaaaaggtgaaaacctaatgcacccactcccacctgtgn

SEQ ID NO: 20098 - DNA, 402 bp, Homo sapiens
  misc_feature 1, 2, 3, 4, 401, 402: n = A,T,C or G
nnnnactccaagctctgagaccacctcttctgcaaagccttcctgattctgcaaagaacaggtaggcatttcatccttgggacctcacagcaattcaggacacatttgtgtcccagccctgcttggcttggctgtctccatgaatatacactttgcaacttctgcaccaggcatcataccaagcacacagtaggcactcctgtgttttttgaataagtgactatatcatcaccacatttcaaatgcggaatatatgagctactagaaaagacataagggtagattttacatctttattgtatcctagatatacaagtctattactgccttttcccatgttctgtcaacatagcataaagaatgtggatttacctgttagaaattgaataagcggccgctcnn

SEQ ID NO: 20099 - DNA, 649 bp, Homo sapiens
  misc_feature 1, 2, 3, 4, 5, 6, 7, 8, 9, 649: n = A,T,C or G
nnnnnnnnngcaggatgcacgtactttattgtgatgtttaatatgtgcacagtgtaacaaaggagatgcaggtggggggagtatgattatatgataaggaacttgaactggaaaacactatataaactctctcctcctgcagaccttaaggcactaggattttgtcatgtgccaggaggaaggggagcaggaaagaccttctccctgcctgtagagatcagagatgcagcatgaacctataggagatgaggccaaagctccaacctcagcttcttcactgtgaaaagagtcaatgtcttgaggatatttattctgtccctggacagggagacaatcaggatgcaatggggagacagggagtcacgctttgtctttttgccctggacttcaaaggccagtgaaactacatctggatttgctattggtttcaagttataggcaaggtcagtgaatcacctgacagtgaatattctctcgctaactcaagatctagggtaatgtgattacgtgcagtccccatagagaggcctaattttcaagaattagcatctcacttttgttaaacacaatcctaaaatacgtcatttactctttctctaatcatgcataaggaatttcagaacaatcaagtacctcggccgccaccgcn

SEQ ID NO: 20100 - DNA, 429 bp, Homo sapiens
  misc_feature 424, 425, 426, 427, 428, 429: n = A,T,C or G
acaaaatggtcctctgagaattttgttcctctttgtcattgcaaagagatgcattctagctggatgttttcatttatactcccaaattctaagactcttgtttctcctccagtgtttcacacagatggttagtgaaaaagtcctttctttccccccgaccaaataaacttgattttctgtctggtcctattcggttcagcttagcaagtaacagggcaaattttttttcttctttgggacttgaagtatggtgttttataattcactgagtgattacagagtgcccagaactttatgtaaattatttttgtttctcataactcatctgtgtagtagatattagtgttcccattacatagatgaggaaatagaagctcagcaacaaaaagtaattcatagctggtaacagaatttgaacctatgnnnnnn

SEQ ID NO: 20101 - DNA, 553 bp, Homo sapiens
  misc_feature 1, 550, 551, 552, 553: n = A,T,C or G
nagacctgggtttgaattctacctctaccacctgcttttgagtttttcttttgtaaaatgggataatattaccaccctgcaggaatttagaggattaaaaataatgtatgctaagagcccgtttgtacatagtagccatttatattatttttctagtttcccatctctataccagactacatttcctagaaaatcctggacctctttaccactcagcaatgattctccaaacatcgtatataatataggacacagtcccaagctatgaaatctgcttaccctttctggcgttttaaagaattcagagagctccgttaatatcttctttcaagtattcatgttctacgaactgcagtaagacaatctacccaggaacccacaatataagcctccctaagtttttctccctctgttaatttttaaaataggtttttttactattattatcgtagagacggagtctcactatcttgccgcgtggtctcaaactcctgagctcaagtaatcctcctaccttggcctaccaaagtgctgggattataggtatgannnn

SEQ ID NO: 20102 - DNA, 482 bp, Homo sapiens
actgagacctttttcataacttacaggtgccttggcataacttacaggtgccttgatttgctctgttttttcttccatcagtaacttttaagtgaattctgctcagggatgtgcctggagaaagcaagtttgatgaggaagctggtggagctggtggtttgaaggctgagtgaaagtaggggagagcccatggcctgatctatgtaagtggtaagtcagggagggtagctgcggtcagcatgtcccagagtcaccttcatcctgggatgcgccctctgattctcagagtgaacattaaaaatggcagacaaaaccaggcacggtggcttacgcctgtaatcctagcactttgggaggccgaggtgggtggatcacctgaggtcaggagttcaagaccagcctggccaacatggtgaaaccctgtctctactaaaaatacaaaaattagccaggtgtggtggcatgcacctgtaatcccaggt

SEQ ID NO: 20103 - DNA, 466 bp, Homo sapiens
  misc_feature 1, 2, 3, 4, 5, 6, 7, 8, 9, 10, 73, 74, 75, 76, 77, 78, 79,80, 81, 82, 83, 84, 85, 86, 87, 88, 89, 90, 91, 92, 93,94, 95, 96, 97, 98, 99, 100, 101: n = A,T,C or G
nnnnnnnnnngtccggctgtccctattgccttcgcccgcaacattctgcccatcccccagatcagctcaagcnnnnnnnnnnnnnnnnnnnnnnnnnnnnnagacggagtctcgtcaagcagtactttcaaagtgaaacctcctctcctccacccagcttgccatcatctcacactgcttaagctcctgctgcctttcatgtctgcacattgactccaccaacctcatctggccttgttagttaatctacatgtctcctggaggagaacctccaaagggaaggatctctaacttagacatttcactatctttgttgtgcctcacacagtgggttttatgctcaaatattggttgaatgaataaaagtagtcaaattgcatataaatgcacacaggagacatttatcccctctctgaccctgatgagttttcatttcttcagataaatgtgtgatagttcatgcagt

SEQ ID NO: 20104 - DNA, 802 bp, Homo sapiens
  misc_feature 1, 2, 3, 25, 49, 73, 76, 94, 214, 802: n = A,T,C or G
nnnaaaggttcacctttcaacaaanttagggaaatttttggggaaaaanccttaaagggattttttttactanccntggaatttgggcatcttnaacagaagagaccaaggatcatgatcaaggagtctggaaaatttttagcataattcaagaaacagaccaacaacaataattttttcaatgtaaacttggacaaagttcttcatgaccatntctatacaggtgaggaacagtggggtgtctatactcagctgctatatcaggattccaaagtaggcgattcagaataaacatagccaaccctgtgacatcactgttatcttccaaagatatgagttctccataagttgtctctagaccaattcgaagccacaaaggattgtaggacaacagccaattcaggactttctgacgttctcccacatctttccataggtgtctatcttttcgaacaattatccgcctagcttcaatttcaatttcaagctttttaatagctttaaccattttttcagaagtaaccaaacggcatgctgcacgacgtagtctgtttaacctacaccgagcagtataagctctgagagacatttcctcttttgtaggtgctctaggaacacttattttatgttgattctctattcccaaaagaagagtagcagcatttacttcagaaatatttgtttttacagtgaagtcatcaggggttaatatacaatttaaccaccaagtgaagccctgttcctgcttttccttccagcgttcatcataaaacatgttttttgcagcaaatggtgagctcan

SEQ ID NO: 20105 - DNA, 613 bp, Homo sapiens
accattaaggaaaagagatttaaatgcaatgtgcctacattctatctagagggcccattcttcagttctgacttcaacaacaggactaggtttactggcattcatgtccagtgaaaggaaggcggttaggaggagtcgcaataactttctcttctgttaagagctcccgtagcactcagccactcccggtggtgtatccttgtgttgggtaagctacccatatgccaaatgcgttctagtagaggtccagacacacacaggattgaggtcagagtcattcacagacattcgaagatatgaataaaaaaacaaatcctctcaaatacacagaagatagggtagggcttccattataatagtaagtcagaacactaaatgttaaaagtggtagctggagcaatatcagagcataggctctgcaggcagctcacgtgggctgacatccctcccttccttcataaagttgtgtatcaacgaacacgctgcctaacctctctgagcatgaggtcctcaccagtaacaggcaaaaattatacttcctctttgggttgtcctgaggagtaaatgagataatttatgtaaagtgattaacacagtacctcggccgccgccg

SEQ ID NO: 20106 - DNA, 478 bp, Homo sapiens
  misc_feature 478: n = A,T,C or G
acttcctctggatgggtgataaagttgagctttgtagatggggaagcagggagcaaggagaacaggaagaggctgaattctatattgactttggaaatgctattagttccctggcctgggacaaacaatctgttccttcttcccaccagcaaagggttgtcctggagcaggaagaagagaaaagtggaggctggggacctaccttgtagtagtcatagagcaggccgagggcagcagcactgtcctcatcaccattaatgctcatcatggccttggtggctgctgtcaggggattctccaagtatgacttccaggcttcatcctcactggtgtaggctcttcgggtattgaatggagggtcactgggcatgggcactaaggccactagtcttttattactgtaaaaacaagagaaatgtgaggttcattttcagagagagcaaattttttacccctaataatatacatattacatgan

SEQ ID NO: 20107 - DNA, 756 bp, Homo sapiens
ccgggcaggtacttttttttttttttgttgttgttctctgggctgagctgttgtgttaaaaagttgattgagaaataaattgccttgagaagcaatgagcaatcagaagtaactggatttccaaggtcacaatggggcatgacgtgcccagaccgcaaaggggcagtgtggagcaggatttgttatttcacaattaactagatgtgagaagacaccaacctgatactgtattatctcatttgctgctgattcaagaatggaatgatatcaaaaatgagttctaaaagaaacagcacatcagagttggatgtaattcccctgctgagaagctgagcctctgctataataaaagctcctacaatgacagctgctcatttctgctggtccagggctgttatcctttattttttgttaatgatgactgtgatgtgctcggcacctctaccaggtggatttttctagaatgtatgatccattcttctcttgaagaaatgaggaagaagagctaagagtatgatgttgttctagtaacagaaaacagggcaagggtcttacagagttcatgacttgaagcccaaaatctggaaaagtaatcatttccctgtcttcacttctttttgaccccagaaacctaagcatttagttcaaagatgagacatgactcaaattatcaagtttaatcttcaagggactgttttctcctattctccaagcagcaactctggagtcagacatgtctgcatgccaagtaagagt

SEQ ID NO: 20108 - DNA, 402 bp, Homo sapiens; identical to SEQ ID NO: 20098
  misc_feature 1, 2, 3, 4, 401, 402: n = A,T,C or G

SEQ ID NO: 20109 - DNA, 498 bp, Homo sapiens; identical to SEQ ID NO: 20082
  misc_feature 1, 2, 3, 4, 497, 498: n = A,T,C or G

SEQ ID NO: 20110 - DNA, 397 bp, Homo sapiens
acaaaaaattagccaggcgtggtggcaggcgcctgtagtcccagctactcaggagagtgaggaaggagaatggcgtgaacctgggaagcagagcttgcaatgagccgagatcgcgccactgcactccagcctgggtgacagagcaagactctgtctcaaaacataataataataataaaaggtattagtgtaactgctgtgtggagaatgaattaggatggctgaaagagtgaacactgatttaccaaataggaagttctcacagtagttgaaacacaagttatggtggctaggactgggaggggactatgaagataaaaaaaagcggtctattttgaaatagaaggggatatgttttgaaaatagagaaacaaaagtgactatgaagtaggttgat

SEQ ID NO: 20111 - DNA, 443 bp, Homo sapiens
  misc_feature 1, 2, 3, 439, 440, 441, 442, 443: n = A,T,C or G
nnnactcactataggcgaattggagctccccgcggtggcggccgaggtactgactgtctcaaattcttggatagctgtccctcatgtcacctagctgctgagagctttgtgatcctaacaggtgatgactcagaccgacactgcattggtaggaattccacaaataggtgcctcaatgtgcctagattgaaatatcagcctttcccagactgacctgatgggttgacttcaggtgtggtgtaaacacctacattttaatgtaaacatttcagtgtaatcaatgagaactatcattctgctttaatcaccatgagttctgaaataacaaaggatttgtctgacattcattctaagaaattcattcttacctgactaagaaacttttttaacctggcacaataataagaaatgacctgtaagtactgcggccgccaccgcnnnnn

SEQ ID NO: 20112 - DNA, 1695 bp, Homo sapiens
  misc_feature 1, 1688, 1689, 1690, 1691, 1692, 1693, 1694, 1695: n = A,T,C or G
nacccattcggcgcattttaaaccaattcgggttgcctcagagaccccactcccctttgtaagggcctcttccggtagaaacatctagcacttagtagccctactcagcacgaacaacccagttgcttggcacttctcggaagtttaacttttccagaaaagttgaagtatatcaaaacgtcacaagttgttgacaattcgtttcaagttgctgctacatgggttattctgagctggctaacaggaaggactcctgcgtttcccggagacccagtcagcgtctctaggaaccgtggtgcaggtgcatggtgcccagcacggcactgtcgtaccgctcctgcaccttcacggacttggaatgctcgaccacactgttcagttctgggattgctttcagcagtgtccccaaacccgtggtagtgtccatagtacaggttatccccaatgtcttccacccaggaaggcctactggctatgcagctacttggactcccgttcaggtgcagagaaccgcacaactcagggttagctctcagggtcttctctggctcctcagtcccactaatgcagagagaaccctggctactcggaaacggctgtcctggggctaatccactgctaattccgttagttcctgtcaagcactggccattcctgctttccatcccactgagcggggtcgtggaggggaagtccaaatgtccattgatgacacatccatttgtcaatgtattcgatacggagctactgtttttcatatctgttacgacagcacaactccctatcacgtgcatttagtcagcatcgtcttctgtgtcgccattcgtgagtggcacggcagaatccaagctttgagcttcagttctagctttctttactccaaagtcttctgagtcttccaagcatctctttcgatttgttcccacactaatatgattaggaaatacattctgatgacccccatttaagatgccattgttatagaaatggttcagatgacaattctggaggttcaagagaaactgggcacactcttggaaaccctgggtttgtgcaatgtctgctgctgtcaggccactggcatttctcaggctttagacactgaattaaaactgagggatcaaaagtaactccatgttgaagttcccctggaagacaagaatgtacactgctctgtgaaataaactcgacgtgagccccattcgccacaagggcactgatgcattctaggctcccagagcgagctgccttgtgaatgggagtttcaccctcacaatccggtttgttaatgttggctcctgcttgaatcagccagaccaggcactgaggatgtcccccaaaggctgcaatgtgggctggcgtctgcgcgtaccgtgtggtggagacgttgagtgtggctcccgctctcaccaactgcactaagcactccaacttgccgaaatgcgcggcccagtgcacgggcgtccagccatagaaggagtcctcagaggccaggtgggcgtggggtgtctgctgcagcagcgagcagagcgtggccaggtccccgtcgcggcaggcgcggtgcagcgggaaacggagcgagagcagctcctcgctggagaagcccgcctctacgcccgcgcccgctcccgccgccgacatggtccgtcaccggagagcgcggggctcgctggcctagagacgcgtcnnnnnnnn

SEQ ID NO: 20113 - DNA, 2007 bp, Homo sapiens
  misc_feature 1, 2, 2002, 2003, 2004, 2005, 2006, 2007: n = A,T,C or G
nncaatctgtgctcatggatgggcttctcagcaatataattctttttattttttatttttctcttcagttttccaaaatgggtcggatagtaagcagtacaatatcatgtgtccctgtaaggaaggttcccaagtaccaagcgaaatctgaatgttaccagactctttaccctaaaatggttaagaaccattgttttaaaggcagaaaactgaggcccagtttgcataatcgtttccttttatgaagcagatttcaagttctcattccattctagttgcttcatacaacaaacagtttggttttattttcaggtctgtggacatgtcattgattacagttaattgtcttgattactgtttatagcttaattatcaaaccagttgtttcttgaatttgtattatgacagggtgcatgtagtctttggactggttatttctggttttgaagtaatcgaacaaattgaaaatctgaagaccgatgctgcaagcagaccatatgcagatgtgcgagttattgactgtggagtacttgccacaaaatcaataaaagatgtttttgagaaaaaaaggaagaaaccaactcattcagaaggctcggattcctcttccaattcctcctcttcttcagaatcatcttcagaaagtgaacttgaacatgagagaagcagaaggaggaaacataagaggaggccaaaagttaaacgttctaaaaagaggcgaaaggaagcaagcagttcagaagagccaaggaataaacatgcaatgaacccaaaagggtacgtgtaaaacaccaatgtactcttacctaaaaacaaacactctggaatgggaaaagtatgtataattctataaactcaattttattacctgttattgaaaaaggatagcactttttaaactttaaattgaaatctggcaaatctaggagtaggtagcataggcatttcatttcaaagatttgtgtgttttcagttttcgggtgaaaatagtcctaagaactctttttttaagagatagggtcttgctctggtatccaggctggaatacagtggcacaattatagctcactgcatcctccacctcctgggctcaagagatctttctgcatcagcctcctgagtacctaggactacgggcgtataccactatgcttggctaatttttaaattttttgtagagacagggtcttccgctatgttgaccaggctggtctctgactcctgtcctcaagcaatcctcccacctaagacccctaaagtactgggattacaggtgtgagccacaatgcctggcctcctggaactcttaaaataaaaaagttaggatcatttaacaattttcctatcaaaattctagtctttgggtttttcactgggttgatattgttctctttgtgaaaatcatataactcttttgagtgagacttgtaagctatcgttaattatgctgttgttttagtaactaattttatgtgcttttattatgaaatgcaaacattatacattttaatcagtgacttggtttgttctaagtcactctgagaggagtgataccaatgaaaaaaggtcagttgattccagtgctaaaagggaaaaacctgtggtccgcccagaagagattcctccagtgcctgagaaccgatttttactgagaagagatatgcctgttgttactgcagaacctgaaccgaagattcctgatgttgcacccattgtaagtgatcagaaaccatctgtatcaaagtctggacggaagattaaaggaaggggcacaattcgctatcacacacctccaagatcaagatcctgttctgagtcagatgatgatgacagcagtgaaactcctcctcactggaaagaggaaatgcagagattaagagcatatagaccacctagtggagaaaaatggagtaaaggagataagttaagtgacccctgttcaagccgatgggatgaaagaagcttgtctcagagatccagatcatggtcctataatggatannnnnn

SEQ ID NO: 20114 - DNA, 596 bp, Homo sapiens
  misc_feature 1, 2, 3, 95, 595, 596: n = A,T,C or G
nnnggctaattttttgtggggacaaggtctcactcactatattgcccaggccggtagcttagttcttaccttcaaaaagtttgtagcctatcggngtggagagataagccaagtatccagataaccatggcataaggcagaatattttctgtactatgagaggtacaaaggcgggggaggttgctcaatgcgcaacaccaaggaagtgatatgaaataaatagggttggtatccaccaacggatagaaatttttacaactatgtgtggggagagacagtgcaaacagaagaaacagaatgagctaaaacacgaagcatgttccagcatttgtgtccttttgcttgaagtatagggtatgggaagaagtaagactggagagactaatgccattcttgtcgagtcctaaaagcagacttaggacttaattcaataagcaataggaagccattacatcttttgaactgcaatgtggcatagttacggacgtgctttaggaaggctgcttttagaacaagtgtaagaaaccactgagccaaagtgagaggtagggacataagttaggtaatgaggacccctgctagcgaagcagtggcnn

SEQ ID NO: 20115 - DNA, 616 bp, Homo sapiens
  misc_feature 613, 614, 615, 616: n = A,T,C or G
acatgccatgaaggacatatacaaggtaatggaaccacccaataaaaagtagtcttactatccttttgttttgggcatacaaaagcagattaaggataatcgtcttgttcatttatttatctatatacttatttatattctgtctctaggactgaaaaagccaaaagatcagggacctagttttgtttcttgctctttctcaagcatgaggacactgcctggcacatagagggctcacagtaaatatttcctcaatacatttgttgattaagtgaaggtgatagaaactgacagggaccttgaacaagattagagtattttatctgtatctatattgcatttgtttttgaaattctatccttatttgagctaatacaattttaacagaagacattttttatgtggagaagctataggaaataaaacctcataatgttgtaactcatgagagctaggatacatgtttgaacaaatattcttggtttgtctttatttctagatatgacatttgctttcttttttacaattcacctaaaggctgcttatttttaaatgtgtatttaaaacttcaaagttgcgagactatcttttagaataattagctataaagaannnn

SEQ ID NO: 20116 - DNA, 418 bp, Homo sapiens
  misc_feature 1: n = A,T,C or G
nacatcatgtagagaggcagactcgtcgccgacaaaagggctgacccctggaaaaccagcacagagccagctcttctgtctgaatccactctctccaaaacataacataagtcatggaaagaaatgagtctcaagaaatgagactcttaccatgatgagagggggacattgaaaagctactttagtgattagggagagaagtccccttttgcatcccaaatcaagcagaggactggtagtccaaatataattttggaataacctgagtcacctgggccttgaggaatcctggcctcttagtccacatttgcagaaatatcaggaggtcaatcaggaagctgtttaggcatctcaacacagggtcaaaaagctcctaggtacctcggccgccaccgcggggagctccaatcgccctata

SEQ ID NO: 20117 - DNA, 675 bp, Homo sapiens
  misc_feature 645, 672, 673, 674, 675: n = A,T,C or G
tccaccgcggtggagcggccgcccgggcaggtacatgccaccatgcctagctaagttttgtatttttagcagagacagggtttcaccatgttggccaggctggcctcgaactcctgaccttaggtgatccaccctcctaggtctctcaaagtgctggaattacggtgtgagccactgcgcccggcccttagtagcatcttttaatggaggtagagttgagatttcagtgactaacaactaaaggtattaaaggtaggggtttatatgatacatttgcattttagaaaactgatctaagcttcaatgtgaagaacagattgaaatggaagggggagaagactagaagcagaaacattactcatttaagtaatctggaccatgaaactgaaaaaaagtatagggactccaaaagtcataaagaagtgaaagcaagatttggcaattaactgctacgacagggaagagttgaggggagtcaaagaggaaagcaaggtttctgagctggcaaacagtgaattgtagctctgttcactgaatgaggcaaacaagagagagcaattttgaaaggatagagagtgatgtgatggtgagtttagtttgagacatgtggagtttgagatgctcgtgcgacacagtgggaggccnatagtatgtactacggccgccaccgcnnnn

SEQ ID NO: 20118 - DNA, 1380 bp, Homo sapiens
  misc_feature 1380: n = A,T,C or G
acgtaacaggacatcaataaatattagttgaatggaagattaaatcaacaaaatgggtgatggatctctgcagtaagtggaagagttcttcatggcccccaaggttatatccatctagaacttcagcacgtaatttcatctggaaatagtgcctttgcggatataagttaggtaaaactgaagatgagatcatactggattaggatgggatctaagtccaatgaaaatgtcttcataaaaaacaggaaagaacccatagaaacacaaggaagaaggtcatgtgaagatggaggcagagattggagggatgcagccaccggcccaggaatgccagcagccacccagaagctggaaggaaatgagggattctctcctagaacctttagagagaacatggtcctgtgaacagcttgattttggacttgcccatagcttgtatactcttactttggatacaattttatccaaacttggctaaacagtttctcagcctatggaaaatttaaaatggagaagattcaactcgattcttacagattcaaagcaagaaaatgatgggaacataggaggagaccaagaaagcctataaaaagcaaaaatatgaagtgaacattgtggtagctttaagatgtttagtgtagctgcaggcaccctatacacatgaaaacccccaaggggaatccccatatcacagtgtagtgtgatatttgacattcgtgatcatctagagatgtacagaaaaggtgaatctgtgttctgtatattctgcctaaggcaaagaaatgtttagctctctttaaaatagttccataattttttctaaaaagctttgcttgaaaactgtaagcttcccatatctggagcatttcactttaaatatttggataaatatgttatcttcttacttggacatttcatgtgtttagggattgtcttctaaattcttcctaattcatatagctgctaacacttcccgcagagctaaaccattacagatatgaaataaagacctattgatttgacttacttttacttgtaaaaccttctgagtgttataacctcatttaatctttcagcatttacagtttcaagagtttgtgtcacaattagaagaattcagctgcacctccaagtgacagcagttgctctggttggtgggtgatctcaggaggcttgagaattgctttgtctgtgagggaagtaagacattttcagagccccactttagaaggtgtgaactggctagataatgaaccccagggctaacgctgctatagcagtgggaaggaggtgatgggttttcagtttggacctcaaacatcaataccctcctggtacctcggccggccccgcgggggagctcaattgccctatagtagn

SEQ ID NO: 20119 - DNA, 1214 bp, Homo sapiens
gtccggggtggaggggttcatagttctccctgagtgagacttgcctgctgctctggcccctggtcctgtcctgttctccagcatggtgtgtctgaggctccctggaggctcctgcatggcagttctgacagtgacactgatggtgctgagctccccactggctttggctggggacaccagaccacgtttcttggagtactctacgtctgagtgtcatttcttcaatgggacggagcgggtgcggttcctggacagatacttccataaccaggaggagaacgtgcgcttcgacagcgacgtgggggagttccgggcggtgacggagctggggcggcctgatgccgagtactggaacagccagaaggacatcctggaagacgagcgggccgcggtggacacctactgcagacacaactacggggttggtgagagcttcacagtgcagcggcgagtccatcctaaggtgactgtgtatccttcaaagacccagcccctgcagcaccacaacctcctggtctgttctgtgagtggtttctatccaggcagcattgaagtcaggtggttccggaatggccaggaagagaagactggggtggtgtccacaggcctgatccacaatggagactggaccttccagaccctggtgatgctggaaacagttcctcggagtggagaggtttacacctgccaagtggagcacccaagcgtgacaagccctctcacagtggaatggagagcacggtctgaatctgcacagagcaagatgctgagtggagtcgggggctttgtgctgggcctgctcttccttggggccgggctgttcatctacttcaggaatcagaaaggacactctggacttcagccaacaggattcctgagctgaagtgaagatgaccacattcaaggaagaaccttctgccccagctttgcaggatgaaacacttccccgcttggctctcattcttccacaagagagacctttctccggacctggttgctactggttcagcagctctgcagaaaatgtcctcccttgtggctgcctcagctcgtacctttggcctgaagtcccagcattaatggcagcccctcatcttccaagttttgtgctcccctttacctaatgcttcctgcctcccatgcatctgtactcctgctgtgccacaaacacattacattattaaatgtttctcaaacatggaaaaaaaaaaaaa

SEQ ID NO: 20120 - DNA, 681 bp, Homo sapiens
  misc_feature 1, 2, 12: n = A,T,C or G
nngtcaactggnaacctcagtaattcagaccccacatccccgaggtacatcaccctgctgagggacatccaggacaaggtcaccacactctacaaaggcagtcaactacatgacacattccgcttctgcctggtcaccaacttgacgatggactccgtgttggtcactgtcaaggcattgttctcctccaatttggaccccagcctggtggagcaagtctttctagataagaccctgaatgcctcattccattggctgggctccacctaccagttggtggacatccatgtgacagaaatggagtcatcagtttatcaaccaacaagcagctccagcacccagcacttctacctgaatttcaccatcaccaacctaccatattcccaggacaaagcccagccaggcaccaccaattaccagaggaacaaaaggaatattgaggatgcgctcaaccaactcttccgaaacagcagcatcaagagttatttttctgactgtcaagtttcaacattcaggtctgtccccaacaggcaccacaccggggtggactccctgtgtaacttctcgccactggctcggagagtagacagagttgccatctatgaggaatttctgcggatgacccggaatggtacctcggccgccaccgcgtggagctccaattcaccctatagtagtcgt

SEQ ID NO: 20121 - DNA, 1108 bp, Homo sapiens
  misc_feature 1, 2, 1103, 1104, 1105, 1106, 1107, 1108: n = A,T,C or G
nncttccacaccggtcgcggcgcggttgggaccccttccgtttgctcctttttggcccccaaatttaatctcggcccccccaatttttttttttttttttttgtaaattgagatactctggaatagcacagacgagggacacatgagtgaaagtataccatcagtcaataggccaatgaccccaaaagggcagatggtattaatgattcgccaaataatatcccctgtttaaaatttggctaaagagtagctttccattttcctggaaaagaggttggtgggaaaaaaaagataatatttgaacctgtactatatgctagaaacttggctgaatgatttgacattatcctatttaatgttcatgacaatccaataacgtaaccactcatatctcccttttgtgcagataacaaactgaggcccagagaaatcaaatatgttgtcaaaatctacatcgttgaagagatgggtttcaaatccaggtcggcttggcccttgccacgacttcataatgaaattccatgggtgagtgttaccagtttctggtccatccttgcttatttcaagggtctcatcatcccatccactgtatcactttttttgttacaggctttactcttttctaccatggaaaagactaatgatatttttttctccataagcttggaaatattatcaatcaccataaaattcagccttcctctggtaactttggagaccctcagagcttttcttatttccagagacaggcggtttggatgagaattattctcttttttcacacaattggccagatgacatctttactggtatctgtaaagactgcatcatcccagctactttcctgctgacttccacttgggtttactcaatgggtgacactcacaggacataagagattagaaagagggataaggttttttatatatctgctccctccttacttaaagccatggttttagcagaggcccaaggtcgtggcttttttgagcagcccctttatcaaaggtctggaaagagtctaccttccccctcacaactgagtaatgaggcttactactgttgctagtcccgcgttaattaattctagaagtaccctcgannnnnn

SEQ ID NO: 20122 - DNA, 2012 bp, Homo sapiens
ctactatagggaatttggccctcgaggccaagaattcggcacgagggaacagcatatttaagttcttttctgtggaaaactcagaaatcgagtctgtgggaagcacctcgaggacagaacatgttggatggtggagcacctttctatacgacttacaggacagcagatggggaattcatggctgttggagcaatagaaccccagttctacgagctgctgatcaaaggacttggactaaagtctgatgaacttcccaatcagatgagcacggatgattggccagaaatgaagaagaagtttgcagatgtatttgcaaagaagacgaaggcagagtggtgtcaaatctttgacggcacagatgcctgtgtgactccggttctgacttttgaggaggttgttcatcatgatcacaacaaggaacggggctcgtttatcaccagtgaggagcaggacgtgagcccccgccctgcacctctgctgttaaacaccccagccatcccttctttcaaaagggatcctttcataggagaacacactgaggagatacttgaagaatttggattcagccgcgaatagatttatcagcttaactcagataaaatcattgaaagtaataaggctggtagcaagttctggatcttatacccaacacacagcaacatccagaaataaagatctcaggaccccccagcaagtcgttttgtgtctccttggactgagttaagttacaagcctttcttatacctgtctttgacaaagaagacgggattgtctttacataaaaccagcctgctcctggagcttccctggactcaacttcctaaaggcatgtgaggaaggggtagattccacaatctaatccgggtgccatcagagtagagggagtagagaatggatgttgggtaggccatcaataaggtccattctgcgcagtatctcaactgccgttcaacaatcgcaagaggaaggtggagcaggtttcttcatcttacagttgagaaaacagagactcagaagggcttcttagttcatgtttcccttagcgcctcagtgattttttcatggtggcttaggccaaaagaaatatctaaccattcaatttataaataattaggtccccaacgaattaaatattatgtcctaccaacttattagctgcttgaaaaatataatacacataaataaaaaaatatatttttcatttctatttcattgttaatcacaactacttactaaggagatgtatgcacctattggacactgtgcaacttctcacctggaatgagattggacactgctgccctcattttctgctccatgttggtgtccatatagtacttgattttttatcagatggcctggaaaacccagtctcacaaaaatatgaaattatcagaaggattatagtgcaatcttatgttgaaagaatgaactacctcactagtagttcacgtgatgtctgacagatgttgagtttcattgtgtttgtgtgttcaaatttttaaatattctgagatactcttgtgaggtcactctaatgccctgggtgccttggcacagttttagaaataccagttgaaaatatttgctcaggaatatgcaactaggaaggggcagaatcagaatttaagctttcatattctagccttcagtcttgttcttcaaccatttttaggaactttcccataaggttatgttttccagcccaggcatggaggatcacttgaggccaagagttcgagaccagcctggggaacttggctggacctccgtttctacgaaataaaaataaaaaaattatccaggtatggtggtgtgtgcctgtagtcctatctactcaagggtggggcaggaggatcacttgagcccaggaatttgaggccacagtgaattaggattgcaccactgcactctagcccaggcaacagaacaagaacctgtctctaaataaataaataaaaataataataataaaaaagatgtttttccctacaaaaaaaaaaaaaaaaaaa

SEQ ID NO: 20123 - DNA, 571 bp, Homo sapiens
  misc_feature 1, 2, 3, 4, 5, 6, 7, 8, 9, 10, 11, 567, 568, 569, 570, 571: n = A,T,C or G
nnnnnnnnnnncaggtactccctttccctgactcagccttttattgatgaaggcagggatgggatggggagagctcacctggcaaagactccacacaggtgtgcagcacaccctgatggggccagaaaatgtcactgtgagccctaggggtgaaagacacagtgatgggctgctgggcaactaccaagtgtagagatcctgagtgcccagagagttaccaaccacttcccttccctgtgcagatcagtggaggcagatacatacacaaaatgggaaggggaaagaaaacggctttcagatctccccaccatagagactataagattattccagaatggccacaattttttcactgcccactctgggccaaacagtgtccatacactacgtcattcttatgagggttacttagttccattttatgatgaggacatttaggctcaacttgtcccaggtcacataactgttaagtaattgtattttccaagaatgatcctctttcaacctcacgatgatgcttccatggttggaaaataaaattattcacaaaagtgaaagtacctcgannnnn

SEQ ID NO: 20124 - DNA, 2361 bp, Homo sapiens
  misc_feature 1, 2, 3, 2361: n = A,T,C or G
nnncgattaatcgattcctaaagatttggctcgaggcaagatggggccagggaggatgaagaaagaagaaggactccccagaaaacacgggacttccccggaagctacttgaaaaacatgacccctggccggcctatgtcacctatacctctcagacagtgaaaagactcattgagaaaagcaaaactagagaactggaatgcatgcgtgccctcgaggaaagaccctgggcatcaaggcagaataaaccttccagcgtcattcagccgaaaaggaggaagtcttccaagtcttctggcaaagctgtgttcagggacacgctgtcagaatccacgttatcaatgtggggcgcttattcggtattggccatggctcctaccatgatcccagaacccacacacttacatgcggattccagagactgtccaactgaaaactataacaagatcatctttgcccgcaagcctatgatgaggatgctccctacagttcgctactgaccaacaaggagaaacatgcaaatgttttagccaggggtccctgcagccattccccaagaacgtacaaaagttaagctccatttaccactcacttgacagtgtcctttaaatctgaacttgctcttgctcatgcggagcttggctaagagaaaccagatcagaatgcaagctgtaggtgggtgggtgagtgtgtcccctcccacactgctctctggtgggtttgggcagtccctggctctagtctctgctgcagattctcaggaccaaaatgtgggtgatttgtctgggtccaggcaggagacagaaatcacacaagctcttttattagagataatataaagaatgattaaccaggtgacagtaaagggcaggaagggaatacaaaggtatccatggaggtagcaccacaggaagcaggcatcacacttgaggcttgggaacaaggggaagatgctggactcattgaaaggtggttgcttggagaagggacatggggctgaatctcagacttctgaggtgggggagtggggatgccactcaatgcagctggtatctctgagctctgaggagagtcctgtggggatggtgccccctcctctgaataggggagatgttttgttggtgtctctgaggggacccccatgaggctgcttttgtgagtgttggaaaaaccaaaaactgcattgaaatgtttctgggaggagttgccactgcctgggtgaagaaaaagcactgctagggttagcaacctgtctggcaagggacaggaagctgatagaaagtgaacaggaagcaaacaggaagtgagcaaggggccacttcctacttcctcctttagcctagcagattccttctagctccccctgggggctgagcctatcagggcacaaagccagaatgtggtttgtagaatcccagccccagcatctccaagcataggatggattttgaagccaagagggaattagctctcggccgggttctgagtgatcccatccagctgctcctggacctggtattgagaggtttttcccttggagggcaaacaaagtggcagtggggaccagggtgtcccctgctgagaaatggagagctcttttcccctgtacttctctggggtttgccgtgtggaaccaagtgcttgggggaggagctcctggcagcactccagctggagagtcagaggacagctaggattggttcacccttgctctgagttggcccaagcgagctatgctgaactcttctccatctccaagcagacaacctttgtctttacatgcaagagggatccaattatgacaggctgacccagctggtttcatgtttggggtttatctactgagtaaggctgaccttacctgagtttctgtatgtgtatttgcaagacagttaatactaatccatcatccctcacagagatgtagaggatgagatgtagtaacttatagcagtgtcatttggaaaagttgaatttgccctacaaggcatgttctccattcaagggtcttgtgtaaacgtttgcagacacaggtgcagctttggagaactcacctctggctcttgtgcttttatgttgggacagctgcctaaattaggagctctagacctgttattggttcccaactgttggccagaatgaattcttcgaaaaatataggtggtttccagggaatttgaatgattgtattttgtgtccatggaacgtttatagacatggaggcaggcaataaattcctccaataaaaaaaaataaaggagaaaaaaaaaaaaaactcgagggggggcccggtacccaattcgccctatagtgagtcgtattacaattcactggccggcgttttacaacgtcgggactggn

SEQ ID NO: 20125 - DNA, 392 bp, Homo sapiens
ccgggcaggtaccatggatggaagtggggctttggcaaaggccctagcatttaggcctggcactgtggactcggtgttgtctagcagagaggccttgaggaagtggcccagcagtgtgcttgcgtttccaagatatctatcacccaaaagacttcgagatagacaagctttgttccctgccaaagtgacaaatgtcagcttgctggaaaagtttgaacgaagtgagagtggtgggaagattatgacccctgaaagcttatcatatccaagttgtctgaaacacgacagtgagatgaagccccaaacatctccagcttgccaggatcataacaaggcaggacaggaaatgtgctatgtatgtttggaacgagcacaacgaaattccctgttgt

SEQ ID NO: 20126 - DNA, 506 bp, Homo sapiens
  misc_feature 506: n = A,T,C or G
acttggatgggttttgtgtgtatgtttgtgtgtgcactggcgtccaccctgttgggcttagtgaactttttgattcagtgatttaaagtttctcatcagatttggaaaattctcaattacttttttctttaaatatttctcttgcccttcccctctctcttcttccaggattccaatttcatcgatgttggaacttttgtctgtgtctcacataactcccatgctctcttttagtcttcttctgtgattcagtttggatattttctgttaacttgcttctgagttttctcattcagatttctgatgtgtgccatctggtttgtaacaaatctaattctcaacttcagacattgtattttgaatttccaggatacccacttggttcttttttatggacaattgtcttctgaatgctttatattttcatacatttatttacctctttcaacatacagacttttctttttttttttttttgaaaaaggtgtcgttctgccacccaggcn

SEQ ID NO: 20127 - DNA, 255 bp, Homo sapiens
  misc_feature 252, 253, 254, 255: n = A,T,C or G
cgcggtggcggccgaggtacctggaaagatgaacaggattgcagcagatagagacaggtagaaggagagagattccaagtggaaggataaaggagagggaagagaagcaaagagcgcaacttccaagaagattttctggtttctggcactggccatagatagctcgtgcagaatcaagcaaagaggtttatgctgagatattaatggaatgacattttgagagtcttgagaatgggcacaaaagtgggatgnnnn

SEQ ID NO: 20128 - DNA, 2680 bp, Homo sapiens
  misc_feature 1, 2, 2679, 2680: n = A,T,C or G
nncccgttgaggagatcaagcccagcaatggtggcagaatcttactccacagacttcagcagactagtcatttcaatacccaaagaaagacaagtgacaggggcaatggatctcaggctctgagataagtatatcagatgacactggtggctctaaggatattgcaattaagcagctacctgtagccaggtattctgctgctcttggccttttcccacgcatcgtctcgtgtcttctccgaaagaccttggaagataggcctggaagagactgttgatgccactttgaagaaaagaacactgagaactagaggagggaacactttgcccaagattactcacaaagccaagacccagagtccagcttagagaatagagttgttcaggctgccaattgcaagctcattcctctacctcatacttcctctgaggattttgacaaaatggattaattgggtgagccttggagacatgtgggaaacacctgcagacacaaaatgagtagtcatcctgtctccctttcaatagggatctgaacaggtgttttgatacttgaaagatgtgcatgtcaagtgagggtttctttctgcgatgttcaactggaactctcccatcagtagttacaattagaaatacctactgatggttagtctgaaggccattctcatggtcacctatacagtgtgtttccctgtgagctagcagacacaatgaccaggaaaaaacctatgaattccattcttaggtttcccagccaattgctcccttctgctttagaagtgactaggtactgagagtacaaacactcccactttataatgaaggcgtcatgtcaccccttcctttacaggtcctggggtccaggagacccagaatgaaggtgtcagttgggcatgaagtgttatttagtgtccattcttgatccttctgagcacctacagctggaaactaagcagatactggtcctgcattctgactgagattgtgtcttctttatgaggatagatcaaattggcagtcaggcccatgatagtcagtgcagttggggcagttgtagactttgctacaggatttcagggtttccaatcaccccacaggtaagtgaatgccaaagtcttcttttttcagaccatacaagaagtcattttgattttcaaagaagccgttttgattttcaaagaagcaggttctggtgacattattttcttccttggacaaagtggggggaaatttctaagtattttaactgagttcagggtccttagtgagcctggacagagcaaggagagggctccccactccctaagccccacagccagctctgcatcaccacacacagccagagcctgtgaggagctgccttcttccccatgtgacttgcaaagagtctcaggcaagaaaccagggcttcaaactgctagttcccatggagggtagttccctcgtgtggagcacttgtgttaggatcactgattatctgacaaaggctggtgcagaaaaaaaattgtaggcccaagtgtcaagaaccacaccagattggagatagaaaagaatagctgaaattatgtcagtggtgaaatgtcactccattgacccaccgaaaaaagaaaagaaatctgtttctaccaaacatttccagaaacgtatttatagcatgaagaaacacacatgggtagtgtgacctgtttggatgtgattacttaaaaatggaatgctctgaataggcactctctacattaaaggtatggaaggcgataggggtcagaattttaaaaatttaattttgaaaaaggtgactcacccctcatttccagagtgtaggcaattatgtcctgctttgataaaactgctagaggatggctatgcaaaagcataacgattcaaggaaacaaagtacaggtagtttttgagctgacagcagcaaaggcaccataagtcaaaatattggttttggtggagatgatcgatgtgtgtgtgtgagagagagctatgtttctaaccaagggcctaatgtttgttacagaaatgatcccagagacctacaagatgtgggaatcagcataacagggcaatgcagcaattaaccccacatcgttttctgtagttcctttttgtttcattttcttctgtctcacctcgttagaaaattcctcccagtcaggggtcgtccagtgcaggacgggggacccaagggtctcaagcctgcaagtccagaaggtgacaaacccaggagcactgggagttaagctttccttggggagggaagagccttgatgtccagcacacagcctggctataaagacacgaagcgacctacccactgtacagtccacttcacaggatcagctgaatcatgacctttaaaagttccgagttgaaactgaaggctctcctcagacctggctttttcctcagtccctgttcataccatctctgcacccacaatcacactgatttttcaaattcattttgtttttgctgtttcatttctggcattaataaaagtcttataaggagaaatcgtgacttaagttcttttttatttaactgatgacatccaatataaataaggaacatgttttgaaagcggaatatatgaaaatggacttcataaccactttgactttgaagtacaacaaacttaacctgactcacgtgcatgttatttcactgcaaacann

SEQ ID NO: 20129 - DNA, 331 bp, Homo sapiens
  misc_feature 331: n = A,T,C or G
acatgtgtgcttttttgcatgtgtattacatgccaagggctttatatatgttatgtctgatccttctgacaccaccacgaagtaatattaattgtccccattttataaataagcaaactgatgcccaaaagattcattcaagcaaggctgtgcaactagtaaatggcaggaccaactttggcctgatgttcttttcaccgcaccacgctacctctttcagatgtccaagatggagccacatagcttggttatggggttccattagtctgccctcttatcttatttcagcacctaccctgtggccatgaaccattgattcataattttcctn

SEQ ID NO: 20130 - DNA, 402 bp, Homo sapiens; identical to SEQ ID NO: 20098
  misc_feature 1, 2, 3, 4, 401, 402: n = A,T,C or G

SEQ ID NO: 20131 - DNA, 741 bp, Homo sapiens
tggcggccgcccgggcaggtaactgttcattcaatttttctgaatatttgaaaaattttaacataaaatcttgagaaaaagtaaactgtagatgctaatagcatacaaagtgcagtcagtgtggagaacagaagagaaagatgaattccaatgaagagattcagcaggtttgtggaggagatgggattgagcagaaacttaacagatttgggccttttaggtggaggagacaatataggaaaggcacaaacctggggaaatgcacaatgtatgctgaccaagaagtggtctggcgggtagagtaaggctggaagagactctgggagaggaacatgagaggtcccagggctctgaaccagggcaaccaacagaaaaggaaggacagactgggctggaatccaggaggagcagggtggtgtggagacacaacccttgtcaagtttgaggtggaaggggacactccatgtggagacagtgaggacacagagctcagggacagcttggggactagaggtgcagatgtgatcatcccaccagaaagcacatggggtgggaaatagaccaaggactatctagatggtggacatgaaaatacttggtccaaacacatacttgaaagcccttaactagaccaggggtagttgagaacaataccaatattgttacagtttcaactgtagactaaaatattttcactgtctatctaatgtctatctaaattctaacagctctatcttaggt

SEQ ID NO: 20132 - DNA, 822 bp, Homo sapiens
  misc_feature 1, 2: n = A,T,C or G
nnaagagatggtgtctcactttgttgcctaggctggtctcacactcctggcctcaagctgatccttccacctcagcctcccaaagcactggggttgctggcgtgagccaccatacccagctgaaaagtgatttcttataagccaagcaatcagcctctgcagagaagacaggaccctcagcacatatctagctctgtaattcctcaactcaagttgggcattactatcacccctacattaacatgttctcattaggaatatgaccaagaccaggacagagtcacaagagaaacagtcagtggatcatgtgacacatgagatttattggtccaataaggtgaactggtcaggaaccagatctgctatgccccttgggaataaggtggccaaaataaattttgatttgaagattagaaaggcagcagaaagttcgttgtaaacaaagttgcatatccatggttcctgagactccacttctctgacttcattccccttttatcctttcctctgtgcctctctaattttctttctttctctacttctggccccttctttgctgctcttagcttctcaaggttcagcaggttaaagaatcagatcatatgactccccaaccacaaagatcacagttcctaagaagaatctgcaaaccagggtcagcaatctccaaagatggccaacagcaagtccttccctgtctgtactcacagggcgttcctcatatcacgaggtgaggtccagtacataccatggaatctcattcagccatgaaaaggaataaagttctaacacatgctccaacagcacggacgcgtgggtcga

SEQ ID NO: 20133 - DNA, 573 bp, Homo sapiens
atagggcgattggagctccaccgcggtggtgacctaagtgtatatttatccaaacatctaatttattccagctttagatcttctcgcatctgagttattaaaatacacatttaatttacaatacctactagtatttatcaaaaatttactgaaattattcatggtatttggggggaaacactatctaaaaaggacccatgattgattatttatttatttatttatttagtgcacttgattttgcagatgagtctggaagtgttagttgcaaagatatgcatttacttctctggctacaaaaaagaatagaaatgcacaaagcagagcagtgtgaagaagaagaggcgatgacccctagaccgaccaaagcccgtgctccactgcccagtgcctatgtcccaccactgtcgctgccaccctgcccgagagaaaggctgaaggggatgctaaaggagataaaaccaaggttaagtaggaactgcagagaagatccacaaggttgtctgctaaacctgctcctccaaagccacagccgaagcccagaaaggcctctgcaaagaagagagagaaggt

SEQ ID NO: 20134 - DNA, 1363 bp, Homo sapiens
  misc_feature 1361, 1362, 1363: n = A,T,C or G
attggagctccccgcggtggcggccgaggtactccaacccaagcaacagagcaagaccctgtctcaaaacaaaacaaaacaaaacaaacaaaaaaaaatgaggtaggcatgttttattcccatcttacagatgaggagactgaggcaataataattcaatggcttatctaaagtcacaaagctagtaaggagcaaatccagttctgtctgcttccagcccaccttgtcccacttgcttctttattggagaaggggcagatatttactctgcagtccagggagcatggagagtcaagtagagaatcaaagtcagcaaagctgaacaccactgagagactgagaggaatgaagatgacaagagacagggttgggattagtccattaggagccagcccttaacagcactgctggaggtggggttggagagtgagagccaggccaggaagagcagaggaacagcgagtgaaggaaaacatgacatcacaaacccctgagcagccccagattcttcgcccaaattggctgcatttaaaaacagagccaaggcacctgtggcccatggttggcaggatgggatcttgcttcccttcctcaggtgcctttgatgcttctttaacttagtcctgagctcataattcggtggcaaagtgttatagtccctttgacacggctgtcacactccccaagtaagtgtgacatgacctgttttgccagcagactgtttaataccacatttgattggcctccagtctgaccctgggacaccagccctcctgggacatttctcagtgcttgtccaaaccagtagttctcagagaaggccaagtgggaccagcagtatctgagaagatccgtcaggtggcacagggtttagcttctgtgcattcttccttaagatggagctgcagctgcttttccatcatggctaggcctgggaggtgtgatacagggaagagcacgggctctggaattcgacagacctggagatttgagttctgcctggatctgccctcaatagatgtcctacctcatctgtagagtggggataataacgcttcccctacgggcaggtactttttttttttttttttttttgggatggagttttgctcttctcgcccagcgccggggtaacaatggtgcgatctcagctcactgcaacctctgcctcccaggctcaagcgattctcctgtctcagcctcccgagtagctgggattacaggtgcataccaccacgcctggctaatttttgtatttttagtagaaacagtgtttccccatgtgcccggctggtcttgaactcctgacctgggtgattcaccgctcagcccccaaagtgcgcaatacagcagagcatgcnnn

SEQ ID NO: 20135 - DNA, 681 bp, Homo sapiens; identical to SEQ ID NO: 20120
  misc_feature 1, 2, 12: n = A,T,C or G

SEQ ID NO: 20136 - DNA, 652 bp, Homo sapiens
  misc_feature 647, 652: n = A,T,C or G
acctggatttgaaaacattacctgagagaaaggtgaattattggggttcaggtcaattctgggcaggatctcatcagagtcagaatgtggtcacaaagtccttcatagtggacagaggaaaactaggaatgtggttgatgagatgaggggaaaaaaaagaatagtgacatgaaagaaaatctttgcctaaataacaactttatataaagctagctttgtgcctcagaagggagaatttcctgtctgcttcccttctgccagctgccagcattcacacagttggtattgatggttaggtttctgtgggctaatctgggattgtaattgccatttataattccaattccagagggaaaaacttcttttttgtttaaagagtgccttttagagaaatttggggaacatacatgttttgtttcattttgggtatttacttcttaataactgagcttgggccgtgaggaaggagaatagcatcaatgttatctgcactaacctctaataattttgcaaaattttggagtgaatttctaggcattttgagaatatgcaacttacttctagctatttagtatttcttaacaatagcaatatttatgaattaatatttggaaactattacctgaaaaagatgtagatgttgctcncaggn

SEQ ID NO: 20137 - DNA, 626 bp, Homo sapiens
  misc_feature 1, 2, 33: n = A,T,C or G
nnatgatgtaggtgtaattattactcccaattnacagatgttaagtaacttatccatggtcattccagtagtaaatggtagagctcaaaaatgaattcaggtagtttgaccacaatgctagacagaagttgtgagaagtatttcagcaatcttggacacatcgttaatgactggttgttggtggagtaccacatgatcattcaaacactcaagcttgtttctgttgaagaggagagtcagaaaaagtagagcctaaaaagtccccaaaccagttaagtcacactgaggccagaactgtcatatagtatacacactccagggacaagaaattccgagggctcaaacagaagactcctcagagtggctcagcatggtctgtgataaacagacagaaacactatgaggaagtgctcttcacactacactcagaggttttccctcccacttacacatgattgttgccatctcagacttttcatagtaagtttttttgtttcgttttgttttgtttttgagacggattctcactctgtcccccaggctggagtgcagtggcggtgatctcaaaaaaaaaaaaaaaaaatagcagaacccaatgcaacttaataccaattcatttcttcagc

SEQ ID NO: 20138 - DNA, 1152 bp, Homo sapiens
  misc_feature 1146, 1147, 1148, 1149, 1150, 1151, 1152: n = A,T,C or G
aggtacgcggggatgcgcagtcgtgagtcctcttgtccttgagcgtcaaccttctttccctgaagtggctggggttcctgtttccttctttgattgacaacttgtgttaaccctcgcacatctctgggccaatttttgcttgaaaatggcagctcccgagcagccgcttgcgatatcaaggggatgcacgagctcctcctcgctttccccgcctcggggcgaccgaacccttctggtcaggcacctgccggctgagcttactgctgaggagaaagaggacttgctgaagtacttcggggctcagtctgtgcgggtcctgtcagataaggggcgactgaaacatacagcttttgccacattccctaatgaaaaagcagctataaaggcattgacaagactccatcaactgaaacttttaggtcatactttagtcgttgaatttgcaaaagagcaagatcgagttcactccccatgtcccacttcaggttctgaaaaaaaaaaaggtctgatgaccctgtcgaagatgataaagaaaaaaaagaacttggttatttaacagtagaaaatggaattgcaccaaaccatgggctgacttttcctttaaattcatgcctcaagtatatgtacccaccaccttccagcacaatcctagcaaacattgtaaatgccttggcaagcgtgcctaagttctatgtacaggtccttcatcttatgaataaaatgaatttgcccacacctttaggaccaattactgcgcgacctcccatgtatgaagactatatgccattgcatgcacctcttccacccacatctcctcagccacctgaggaacctcctttgccagacgaggatgaggaattatctagtgaagaatcagaatatgaaagcactgatgatgaggaccgacagagaatgaacaaattaatggaactagcaaaatcttcaggccaaaagacctcaataaagcagcgccatgtgagcacgagaacactaccggatatgtcgaatacaccttggtgttcttcacacagcagtttacatccagtgctgtaccttcagatgtattggaccaacacaactgtaggtacacagaatgacttcctattctccgaatgcccgcggctttagaaggtctgcggacccacnnnnnnn

SEQ ID NO: 20139 - DNA, 389 bp, Homo sapiens
  misc_feature 1, 2, 17, 389: n = A,T,C or G
nncactatagggcgtantggagctacccgcggtggcggccggccaggattcaaaccagggagttagctccagcactccggctcttaacctcaaccgtctgcctctccacaaacaccaggatcaaccacctagaccaaaaaaacagtctcacaaaccatcaaacattgcacttggtggctcaggaccttagcttcgtcttaaaggtccctgttatgctttttctgagtgccccagtgtggagtggtcttcgtgtttgtgagtgcaggggtcaggggttgtgtcttttcttcttgtccccttccaagaggtgacatgtatccttgatactggaagggcccttaaggtctagcactggctctctgtctcccttcatggcacatcagccaagn

SEQ ID NO: 20140 - DNA, 385 bp, Homo sapiens
  misc_feature 382, 383, 384, 385: n = A,T,C or G
acctatagcacaagctgatgatagctggcaactgaacatttggcttcaatgtcagagtaatagagtgtggcaaactgcagagctcatgctccgcctaaaaggggcagctgctgctcagctcctgccaattaccaccatgcaggaatttggcctagtgtgctcagctcttcctgtttttaccagaagctaggaatctgggtttttatgtgaaatggcctaatttttaaatgttagcatccactctgaaaaaaaaacaaaacaccgtgtgggccaaataaaacatttgctggccaaatgcagcctgatttgctctgttttcaacccctggcacagaattttgttcatttctctcttgtggtaccctggccgctctagaactagnnnn

SEQ ID NO: 20141 - DNA, 929 bp, Homo sapiens; identical to SEQ ID NO: 20094
  misc_feature 1, 2, 3, 4, 5, 6, 7, 8, 9, 10, 11, 12, 13, 14, 15, 16, 17,18, 19, 20, 926, 927, 928, 929: n = A,T,C or G

SEQ ID NO: 20142 - DNA, 1361 bp, Homo sapiens
  misc_feature 1, 2, 3, 4, 5, 6, 7, 8, 9, 10, 11, 12, 13: n = A,T,C or G
nnnnnnnnnnnnncgaaagtcttctagaattaattaacgcgggggagagagaaaaagagtgagaattggcagaaatgcaagagagagccaaaatttcagaaaacaaaagactgagttataccatattccaaactgctttggagaagcatcactgagcagtgcactcacccagccagccatccgccagccatccaaatatatatgcatacataagaacacacagacatacatttgaccatatgcaaccattcctactaaaaacacagtagcataatatgagctatgaggaacataaggacgagtgagaaaccatgtcttgttgcttcaatgaggaagcaaagcttatatatattcttataagggatgcagggatgtatcactgtaatatggggtttgctgccacatgtgctgtgaatagaaggacaggcagtaccgcatgctggatatggacagcagccttagttcagaaacatactccaagcaaatcatagagaatgtcacctcctttaagcttccatttctttataagaaaaaaaaaaaacattttgtagggttacataagaaggcaataaaataataaagagaaagcatagagcctggcatataccacatgttcaatatgggacagaatgtaagcaggagcaataacaaaagtggtagaaatttggataagtcaaagaataagatgtggaaactcgggaaagggagcgattaattctgacctaggctgcacctagccattttggagaaagtgatacaaatagaattttcaggtaacaaaaacgtgtggggtggcatgttgagaggggaccaaggactgtgctgcagggcacgcaaacaaatcacttcagtgttcctagagagtaagacagtgggtgaaccacacatagtacaaggagggcatgtcaaattcacagtaaaggagtctaaagcgaggccattatatgcttctcttctacctatctcatatatgccatttatgagcccacttaatataggacctgccctcaccataacgctcaggcctataagaactctcatacctacaaagacttcctcacacctttgccttctgctctataactggccatgtctgtattctgttcagattagagagaggtccactgaagctttccccaaaagttaggagacaaaataacaatgcccctagtaagctgacaaagggaaacattgaaaacataaatgagggccaggtgcggtggctcacgcctgtaatcccagccctttgggaagccgaggctggcagatcacctgaggtcaggagttcaagaccagcctgaccaatgtggagaaacgccatctctactaaaaatacaaaattagtcaagcatggtagtgca

SEQ ID NO: 20143 - DNA, 392 bp, Homo sapiens; identical to SEQ ID NO: 20125

SEQ ID NO: 20144 - DNA, 629 bp, Homo sapiens
  misc_feature 1, 2: n = A,T,C or G
nnccgctccactggtttcttgtctcatgaagaagaaaaaatcctaactgttcttgatgatctttaaggctcacaatgatctggacagaggtatttaccttgaagctcataaagcataggcctttctcacttgcagagtatctttctgaagctggactaaattggttaaggccactgtacttttccactttgtcttctttcctgtcacacaccctatcctttcaggctgtgttgggatggacaaaagcagttctggagtcctaaggagaagatgagtgggatatgtttctgtgacctgcagtcattttaaagtttagctgttgctagctgactccatgtaagaataccttccaggaatttgatggctgtgcactctggcagtgcagctggcatggttatagggtgcttggccgaaggtttgcatagcaatatgaacgcatcctacgacacatctagccaacactggaagactgtgggtaatggacgagaaaccaagattgactttttgcaagtttttaaaaataatcttcttgtaactcacatgtgaaagaaacatgagagggtttcacaaattcagtaatttagagacatttacatagcatcaccaatagttgggaaggctgaaacttt

SEQ ID NO: 20145 - DNA, 497 bp, Homo sapiens
  misc_feature 493, 494, 495, 496, 497: n = A,T,C or G
acgcgggctacaagcataaggcatcatgcctggctaatttttttacatgttttttttttgtcgagattatggtatcactatgttgctctggctgatctcaaatgtttgacctcaagggatctttctgccacagcctcctaaagtgctaggattatatgcatgatacaccatgcctattgtagagtattacattattttcaaagtcttattgtaagagccatttattgcctttggcctaaataactcaatataatatctctgaaacttttttttgacaaattttggggcatgatgatgagagaagggggtttgaaactttctaataagagttaacttagagccatttaagaaaggaaaaaacacaaattatcagaaaaacaaaagtaagatcaagtgcaaaagttctgtggcaaagatgatgagagtaaagaatatatgtttgtgactcatggtggcttttactttgttcttgcattttctgagtacctgcccnnnnn

SEQ ID NO: 20146 - DNA, 726 bp, Homo sapiens
  misc_feature 1, 2, 3, 717, 718, 719, 720, 721, 722, 723, 724, 725, 726: n = A,T,C or G
nnnctgatgggataataccattttcccagtcctggctgaatctgagcataaatctattttcttatggcctcaccttcttacaagggctcctaagttctttaggaaaacagaatccttggtggtttccctaccccaacaaaggttccagaccctctctacctcacacatggcatcaacacaattttagctataaacctgatagctttagactcttggttccctaagggagatagatacagggacccatctgtgtaccaccatccccagcacgtattttaaagttattcagacacacctcagaactagggtaagtgcagtttaggatctcaactatgaaaaccagaggcaactggcacactttcattattaactgcaatgaaccatttaccaaccagctaattgctttctcctcaatctcctcccatttcttgtgccacttatgtcagggaattgaataggatgaataaatcactttagtactttggtactggagaagagcatatcattcttagacagggtcttgctctgtcacccaggcaggagtgcagtggcatgatcatggctcatgcagcctttgaccccccaggctccagagatcttcccacttccgcctccccagtagctgagactacctgttttgccctattaacctagttcggttttcactcttttctcggcgagacggggtgtccccgcccgggggttggacccgcgtcnnnnnnnnnn

SEQ ID NO: 20147 - DNA, 462 bp, Homo sapiens
  misc_feature 461, 462: n = A,T,C or G
acgcgggatagttgctcagcatttcttactgcatgaaataatctttgttgtttttgccaaactctttaaattccttgaaaatgtgtattcttactaaacaaccttttctcctgagtctttggcatcagttagaagttaaaaagcactgcaagttttttgtaatcctgaagaggaggaaaagatgccaaaccagagtttattcaagataataagtggtatttttgagagatttattctctctcctctgaagcctgtttctactttagtttcacttccattttcctgcttctttgataggcagtgagatgatttttaatagcacatacactctgtcctgtttatagggtgctatcatttaatgagaagaaagtcaaataggacaaaaccgcaaatctttgaaacaaaactagaaagccctaatgggggctgggcataagggctcatgcctttaatcccagcann

SEQ ID NO: 20148 - DNA, 387 bp, Homo sapiens
  misc_feature 380, 381, 382, 383, 384, 385, 386, 387: n = A,T,C or G
acacttagattgatttttttctaccagaagaaatttctatgtaaaatgcttaaaaacctgtcatcaatttgatttctgtagcattggatatagagtgtgagcttttaaggtttttaatgtgttgccaaatgttatttcccaaaaggcttcatcggtttcataccctgctggtgagctctgtcctgttttactagctttcagcatgtgtgtgtgtgtgtgtttgagatggggtcttgctctgtcacccaggctggagtgcagtggcgcaatctctgctcaccgcaacctccgcctaccccagttggagcaattgtcctgccttagcctctgagtagctggcattacagctgcctgccaccacacccaactaagttttgaannnnnnnn

SEQ ID NO: 20149 - DNA, 779 bp, Homo sapiens
  misc_feature 1: n = A,T,C or G
naacttcgacgaccattcacatggattatgggacaaatgcccataagtttataatactttcttactttctgaaacaagatgtttttgacttttcttacactttccttatcccagccctgaaattagccatttttccaagaagccctggtttgcttggtggatatggtttttagaaaccaagatctggatgtgaggtgtgcttcttggtttttgaatgtcattgcttctacattctcttagtggacagatctaggaaatgatgtttgaatctatgtatataggtacatctcaactgatttatgtatattaaaaccatgagttcacagcagtaccttcaattccagtcacatggctcgacctagcctcaaacttcttaaatgtgtagctttcttcttcaatagtgagaagtcttgctcctattgtctttaatatatttatatgttttcttattctactttacaaaaccaatattttgatacacatgccataaccttctcagctttaacattgctagtcatctctaatcataccctcagatttgactctgaatggtccttgttgtctcttcagccccagttgtttctttggcactggccgtcctcctgacctctactgtctccttggccctcaccctgaaagtccttccagactcacttgcctctggctctataagaccctgggtatcaccagggcctctgctccctccatagaacccgtgtccctgaggcctcactggctctagctacatcaaagagagggaaaggaagagaaccagtagt

SEQ ID NO: 20150 - DNA, 601 bp, Homo sapiens
  misc_feature 601: n = A,T,C or G
actaggagaggtcctgtgacctttccagtgcctcagagagtgagaatgggaaagaggagtggatgaagtagggcttaccctcctgtgggtcacctctcttccctgctgcttctgaaccccactcagcctccttccctcttccccagcaactatcccaaagctgttacatcgtgtggcaaacgtttactgaggcttttagggataatataagtcggtttctttacaaccattccttcacagccagaacgcacgtaatttaaaactgtgtcattttcacacacgtcccataatgtctccttcatggggagcttctcatggccttggtctctccccagaggctgcctatggccatatttctggggatccaattctcacacactgggcccctcattcttgggcttcccacattcagttacctcattcttgggctgcccacaaacagtcaaaatccttattttctaagctgaagcagttgagctctctcacttactcttacaaatctaggttttgcctagaagtagtcaaaaaagcaagacagagacatcttcatcaaccacaaagtctcatcaaagtattttactccatcaaagagccattcacn

SEQ ID NO: 20151 - DNA, 664 bp, Homo sapiens
  misc_feature 1, 642, 662, 663, 664: n = A,T,C or G
ncgtccgctttttagcctttaaaattgtgtgtgttgtacaagttttctttctcatggaaatgttggcatattaattgatccacacaatcaaatagattagaaatggtgttcataaaagccctctaagggaaacagtagaaatctttttttcaaaacccttctgtgaaagcttgctgttaccacaaattataataaaagaccaaaacacataccagttatcatctatagactaccgtccctgagcaaattacttgactcaaactgttcatttggattaggaacatttctgttattatttgaaaagaatattctgttgtatatctattagaggcagtagaattagacgatctgcttgtgttaatgctttctataaaatcccacataatgaataaaaaggatagcttatccattttaccttggattataaaaatcttgaccaggtgcggtggctcacacttgtaatcccagcactttgggaggctgaggcaggcaggtcatttgaggtcaggagcttgagaccagcctgaccaacctggtgaagcctgtctctactaaaaatacaaaaaaagttagctgggcctggtggcacatgcctgtgccagctacttgggaggctgaggcaggaaaatcacttgaacctgngaggcagaggttgcagtgannn

SEQ ID NO: 20152 - DNA, 352 bp, Homo sapiens
  misc_feature 352: n = A,T,C or G
accatgtcaggatgactgtctacgtaatggaagccctgtcgccagcttttcagcttcctttcaaattcccccaactccttcttttttcacgcagcaacttgtctctttccatggaaatgctggggatttaaagaaggcggggactcagctttgcttccactgcgcagccccagatacaggctgcaggagtcccagccaccttcctctcatcatgctttcttccagggacagagttatggcccctaggagagggttttgttccaccggaacagtcagttactaatgagctcatgctgcttttccacccctggggtccccagccatcctccaaccctgatctcctagggcaccn

SEQ ID NO: 20153 - DNA, 474 bp, Homo sapiens
  misc_feature 473, 474: n = A,T,C or G
acttagcatgagctcattgacggtgaaattggccatttatacataggcaaatctataaggaaattaacaatatttcacatttcttctaattaatggtctttttgtgaacatgcactgcctactaatgtcagcttatctatgatttgaatgtatagctttctaaagcgtagcaatttttttgcatatttatgtgtcctaagagagtccccccgcttcatttttccatctctcagcctcatgaaaggctacctctatctagaatttgtgacagaggaagctgagttttggggttgatggtatcttcctggttacaatctagaactatcagagttttgcaatgatagtaacagcaatgactaacccttgcttggaatagtagcctttaatcattatcctcagtttctatctgggaaaactgagtgctattttaaagcagtcttcctgctagtagtggcaagaatggagacataaann

SEQ ID NO: 20154 - DNA, 832 bp, Homo sapiens
  misc_feature 830, 831, 832: n = A,T,C or G
acgcggggggctgaaaatcctctgggttggcaattgtaatcctgtggacattggtaatacccgaggatgcaaaatttccccaaaacaagcagaaaattttccatgaattgctgctataaagctgaattcctctccccaccccaacattttataaagagcaagtgacttttacagcctctgggtattgcccaatagcgatctggaaacaggctgctcttcgtttaaatgactgaacacacggttggggatctgttctgaaaggtggagggtgcccgcttgggaatagggacattataaatactggacaattgaagacaatatttctgaagtcgcgggtgcttgcattgttataaaataaacccaaacaggcccatggaagaaatctcttctcccaagtcctttactgaaaaaaatgatcccacagactgagaaagccactttgacttaggtcagcttggaaacccactaaattctccaggtctctaacaggagaaaaaaaactggttataattgttaccagaaaggaaaaatttttttctttaccagaaatgggcagtgtctgtcagagaaaccaactgattcctgatattatcacaaagccagatacttgaagagctctattaaaatatgactgaggccctttgatgaccagcccagcctgtggcagatacccgcactgaggaaacttgttactgggtgtgcaggtgcgattgcagtccgagctcccacacaggtgctggggctgtgctgccaccagcttggattttcattgtttgaaattgcactttaaatactttaaataaaatctccttggcattttcacttttgtnnn

SEQ ID NO: 20155 - DNA, 649 bp, Homo sapiens; identical to SEQ ID NO: 20099
  misc_feature 1, 2, 3, 4, 5, 6, 7, 8, 9, 649: n = A,T,C or G

SEQ ID NO: 20156 - DNA, 333 bp, Homo sapiens
acattttttaaaagtgaaacaatttacttgaaaacagcttgaaaaaatgatgctgaaatacagatgcagtcaccaataaacgttagaaacgaaatattttaaggatacatttcctatttgtgtgtcttgatcttatgactacagaagagccctaaagcatttaggaaggagaaagagtctttgaattagtcatttattttagagtagtatttccataatcccctgggggtcttgtagaaaagtaaaattttgagtcccacttctctgaaattctgattcattaattttggggcagaactagataactggtatgtttaaaaaaattctcaaagt

SEQ ID NO: 20157 - DNA, 398 bp, Homo sapiens
  misc_feature 1, 393, 394, 395, 396, 397, 398: n = A,T,C or G
nactcataccaggcttgctgcatttgctgtgtttggtattttacattcagctgctgttagcccatgctctggaaaaattacaaatgaaccaatgcagtggaattttcacttctggccaagactgagtaacaaggtctggatttaccctcccagctgaaacagtttgaaaactaggtttccaagacattgggcctcaggcatggacagtgatccttgcaagaggagaaacagatggtgagctgtatgattgccccaggatagagtttccaagaagggaaaacccaggtggaggcccgtggtctctctgagctggggagatggagccgcaagtcagcggaggctaatgtggctggaattggcagagcataactcccaaaaaaagaaagttgcccnnnnnn

SEQ ID NO: 20158 - DNA, 340 bp, Homo sapiens
actaagagattgtattgattcttttgttgaaaaatatttaaaaggctaccaagtgatctgtatctgaaaaatctcttaaatatctatttcccagggggtgtttcccagttggactcctttgccttgagataggtggaaagctatttatgcaaatttcatggctctatctctaatttctatttcactcattgtttacccatatatcatttttaactatggaattctctccagagaagcaaattaacagattttaatattttatcagacaattcaagttgtgggttacaaattagagaggattaaaatcttgtcctttcacagcctttgaaatgttattcac

SEQ ID NO: 20159 - DNA, 445 bp, Homo sapiens
  misc_feature 1, 2, 3, 445: n = A,T,C or G
nnnacccaatacttcataaggccctgagagtcaaataattcatttatgaaggccataagaagccagacaggttaaacacagtcttccttgtgatgctggtgaacagccatatacttactgatggatctcacctcccaactcagactcttatgggcagaggcatatttagtgctttcataggctgtgatctactaaggatcacaatttttttcctataagtgttcatcatcatagattctgtgttacactgcccaaggattcattgctcctagctcttggaaatttgtttgacatcactcagctagcaacccctttgggaattattttggcagaagagagtcacctttgccttatccatggtcatactccctaccaggggcagactacgtccaatgactggctaataaaaaaggcctggctcctcacctcaattcaagacaacccn

SEQ ID NO: 20160 - DNA, 528 bp, Homo sapiens
cacccactccctcaattttctctaaagatctcatttcagacatttaaatgaatattatgctacacaacagggaaactcagatgtccatcccctccttattcattcaaacatttccactgccataatatggcagctgcaacgccaagaaagaagaaaggaaaaaagactaaaagaggtgaagaatgaaaaagacctcaaagaaatttttttttaagaggctgggtcttactctgtcacctagggtggagtccagtggtaggatcatagttcattgtaaccttgaactcttgggctcaggcaatcctctcacctcagcctcccaagtagttgtgactacaggcctgtgctaccattcctggctaattttttctttttttttggtagggacagagtctcactatgtttcctaggctggtctcaaactcctggactcaagcaatcctcctgcctcggcctcccaaagtgctgggattacacatataaaccaccatgcccagccaccacagaacttttaataaaagagggaaa

SEQ ID NO: 20161 - DNA, 380 bp, Homo sapiens
  misc_feature 1, 2: n = A,T,C or G
nnagctccccgcgggggggggcgcccgggcaggtacacaaactattacttccagaagagaattgtttaggttgttctggcctaaattttatgcaatgaataaaaatttaaatctcttcatccatgatctactgcaggtcaggatccttggcatcagatggtagtgataaaaaccggatattggggtgctgccggtggagaaaaatggaagaagccagaggtcagcaagaaggggaggctagtaggagaaagagagattaaagagaaacctaagaaggtgaaaaaaagaaaagttagaggggcagaggaaataaaatgtagaagagatgagaaaatattcaactggatagcaggagaaggggaaaactgtaaggagggtgg

SEQ ID NO: 20162 - DNA, 556 bp, Homo sapiens
  misc_feature 555, 556: n = A,T,C or G
ggtacccagaggacacagttgaaatgaggcacaattaggaaaaactaggctgtttaatatccatattgagtagctttgcaagttactttcacaaacttccctacagaattggttctaacagaactgttcaaggccaaggatttgttttttctgggtctgggggagtcatctttataattttaatattccattagaatgccttgacgctagaaggagggtccatctcaatcacatcaataaattgatcccaacctttataaaaataagcttggatagaaaggaaaatccgaagactaaggtagtctggtagaatactagaaggagacatcttttaagaggaggacaagaaaaggcatgaaaacagagaacatggtcctacacaaggcaactggcttcagtgctaccctacaattcttatttccactcaacgtctgttctaaggtggccacatttacaaatgtttacaaccccacagtgagaaaacaaggtgtattagtccgtttcatgctgcttgataaagacatacctgagactgggaagaaaacgaggtttaann

SEQ ID NO: 20163 - DNA, 1028 bp, Homo sapiens
  misc_feature 1022, 1023, 1024, 1025, 1026, 1027, 1028: n = A,T,C or G
actgccaggcatgctcctgccttgggcagagtgtatatgtgtgagtgcacctgcccttcccacagcctagaacgttcctcctccagacagcacatatggcctgctctctcacttccttaaggtctttattcaaaagtgactttctcagtgaagccctgtctgctcaccctgcgtaaaatttcagctcttctttctatctctcttcccagattttttttctccttcatgttcgttggtgtctaaggtttatcatctatttcgctaatggtcagtagaatgtaacctccacgtaagcaaggagttttgtctgttttgttcatgtctatgtccttagtgcctggagcattccctagtatgcagtaggtgctcaataaatgtcagttggattaatggctgaaagaaaggtcaccgctataaggatggagtcagagaacaaacacagttaattcctggtccactgtttttgcttccactaaattgtatttggtctacggcttctccgcttgccctggaaccctgctcagaacactgctcccttctccttcttcttctccctccggataaattctgccattcttttcagcatcattcacatctcacctattataagaacttgttcttccgcagcctattgctccgtctccaccatccaggagtaccttattgatagcactgagcacagaggaaccccacagaattctggctgggctgtagccaccatgcccacccaagccaagtcatccgaagcctaggatcaggaagaaaggcatcagcatcactgactctcagcgcccgtcatggtgctcacgcacaaagtgatggtggaagtgaactgaaattgacatgataatcaatcgtctcccgaggccatgaagaaaataaacagcatccctaggagtatgtgaagaactatttattagagagaataccatcatcgccacagcattccctttccacatctcattgccagttttcattctgtcaacacctcagtgaatttatgaagaaagaatagaaatagnnnnnnn

SEQ ID NO: 20164 - DNA, 2506 bp, Homo sapiens
  misc_feature 1, 2, 2506: n = A,T,C or G
nncttcgcgctagtgctgtttttttttttttttttttttagcaatggcggttcccggcgtggggctcttgacccgtttgaacctgtgtgcccggagaagaactcgagtccagcggcctatcgtcaggcttttgagttgcccaggaactgtggccaaagaccttaggagagacgagcagccttcagggagcgtggagacaggctttgaagacaagattcccaaaaggagattctctgagatgcaaaatgaaagacgagaacaggcacagcggactgttttaatacattgcccagagaaaatcagtgaaaacaagtttcttaaatatttatcccaatttggacctattaataatcatttcttctatgaaagctttggtctctatgctgtcgtagaattttgccaaaaggaaagcataggttcactgcagaatgggactcatactccaagcacggccatggagactgcaattccattcagatcacgtttcttcaatctgaagttgaaaaaccagacttctgaacggtcacgcgtacggtcaagtaatcagttgccacgttcaaacaagcagctttttgaattactttgttatgcagaaagtatagacgatcagctgaacactctcttgaaggagttccagctaacagaggagaacactaagctccgatatctcacctgttctcttattgaagacatggccgccgcgtattttccagactgcatagtcagaccctttggctcctcagtcaacacttttgggaagttaggatgtgatttggacatgtttttggatctagatgaaaccagaaacctcagcgctcacaagatctcaggaaattttctgatggaatttcaagtgaaaaatgttccttcagaaagaattgcaactcagaagatcctgtctgtgttaggagagtgccttgaccactttggccctggctgtgtgggtgtgcaaaaaatattaaatgcccggtgtccgctcgtgaggttctcacaccaggcctccggatttcagtgtgatttgactacgaacaataggattgccttgacaagttccgaactcctttatatatatggtgccctagactcaagagtgagagccttggtgttcagtgtacggtgctgggctcgagcacattcactaacaagtagtattcctggtgcatggattacaaatttctcccttacaatgatggtcatcttttttctccagagaagatcaccccctattcttccaacactagattccttaaaaaccctagcagatgcagaagataaatgtgtaatagaaggcaacaactgcacatttgttcgtgacttgagtagaattaaaccttcacagaacacagaaacattagaattactactgaaggaattttttgagtattttggcaattttgctttcgataaaaattccataaatattcgacagggaagggagcaaaacaaacctgattcttctcctctgtacattcagaatccatttgaaacttctctcaacataagcaaaaatgtaagtcaaagccagctgcaaaaatttgtagatttggcccgagaaagtgcctggattttacaacaggaagatacagatcgaccttccatatcaagtaatcggccctgggggctggtatccctattgctaccatctgctccaaacagaaagtcctttaccaagaagaaaagcaataagtttgcaattgaaacagtcaaaaacttgctagaatctttaaaaggtaacagaacagaaaatttcacaaaaaccagtgggaagagaacaattagtactcagacatgatggctgctacattgtgtaaagaactgggcttagcctatcaaatggtctgtggacttacttggaaaaactgatttgaaactttcacagatctcagctttcatctgatgtcacttttcatgatcttctcattggcccccttaacctggtctgaagttctgggatgttttcagtttgatcagtctgatactcagtggcactttattaaaacatcagctgtggagtgtggcggtgcacacctgtagtcccagctgctcaggaggctgaggcaggaggatctcttgagcccaggattttgaatccatcgtggacaacatagcaagattccatctctaaaaaaaatgaaaataaacataagccacaaggaatgggtgaaagattattgtaatgtgctttaactaaataggtaaatatactaaacaatgctaaaactcagttttaggatgaaaccatgtggtatccatagtcctgtgtagaaacttaaatgcttagttatgtccgacgtggatgaataataagtcaatggtagtgccgagatggatttgaatctacggaggcttatacaataaataggcgggcgctccaacgtcttttacacacttcgccttggtcccataggcagcggtacatgggtcttcacattgttcaaaaaaaaatggggccgaaggggagagttcttatgtcacagtgacaccacgccacggacacacgcaagan

SEQ ID NO: 20165 - DNA, 309 bp, Homo sapiens
gatggactctcactctctcaccaggctggagtgctgtggcgagatctcagctcactgcaacctctgacttcttggtccaagcgattctcctgaataatacggtgggcattcaaaaatgctgttgaataaatctgtctggaaaaccgagcaattcaagatgacagaagacaagatgcttgctcatcagcaaataccactgaggtcatgtcatgagtgaggagccatgtgagacacagaaagcaacctagacagaaggaatggggtgtgtctctaactctggaagaactccagctttctgctagatctagt

SEQ ID NO: 20166 - DNA, 1840 bp, Homo sapiens
  misc_feature 1, 2, 3, 1643, 1657, 1677, 1752, 1768, 1779, 1799, 1806,1813, 1824, 1839, 1840: n = A,T,C or G
nnnctctgcgcctgcgcgctgggggcctgcgaatcaaacaccggcctcaccttttcctgcccgaagcagaagattctcgcagtcctggtttctccctccagaagaccccccacccaaatcctctgtagctcctggtagtgccctgacccctgctgccaccgtccttcagagagcaacggaagagcttcccggagggcgaggaaaagagggaaagtagccagcaatgtcgaacgcaatgtataataagatgtggcatcagacccaagaagccctcggtgctttactcgataaagagcctcagaagatgattgaaccacaaagaaatcaggttttcatctttcaaacattagccaccttctacgtaaagtatgtgcagatctttagaaacctagagaatgtctacgaccagttcgtccacccccagaaacgaatactgatcaggaaagtcctggacggggtgatgggccgcatcctggagctgaagaacgagatggtggagctggaactcacggagttccattatttcgatgatatcctgcaggatctcaagctggccccccaacaattagatattcccatacccaagtattttttgaaggagaagttggaagtaataaaaggaagagagaaaattcttgctcaaatattagcggacagcggaatagatacatctgacatgaaataccctgtaaagagtatccctttcgatgaggctgttaaattaatccagattgctgagagggcacggcaaggtcgcctaagggctttattcatgaagcaaatctatctgcaagaatatagagcaaagcaatccaagatgcttggcaagaaagtgacagatacctgggctgctgcactccgcattcagaaggtttggcgacgtttccatcaacgtaaggaaactgaaaaactgagagaagaggagatgatcttcctgggtatgaatccacctcctctctttaatgaagtcagtgctacagtaatccaggctgaaaaggtggaccgcctgcggaatgaggtgcagataaagcatgaagaggactacagggaagccctggttaccatcaagaatgacctaaagttgatagaaggcgtggatatcaaggagaaccttcaagaccagatccggcattggttcatcgaatgcagaaatttaaccgggacatttcctgactaccctgacgttgaagaaggagggtcagctattattttttctgacaagaccatacaacaggttattgaggatatcatagcaaaccaagaggaagaagaaaaaaacaaaaagaagaagaagaaaaaggaaaaacaacccaagaaagccaaaaaacaaaagaaaggaacaaaggagaaaaataaggaagaagacgaaaaatggaaaatgtcaccaagtctttttcttcctgcaatgaaggaaggatgtaacgcatacaaagaaatctggatgaaaaaagatgagtcttggaatttctctcaggactatgatccagaactgatcaaagaggagaaacgaaaagaattacagtcagagatcaggatacaggttgatgagttgatgagacaggaacttaaaaacttaaagctagctgtggacagagaaagggagcgcccagttgaaagcaggaaagaaaaagggacaagaaganaggaaagaaaggcnaaaagaaagagaagaaggcnaagaagggttaagattctgacagctgacaggaccatcgagtctcctgtattaagggactggttggaagaagattnctgtccaggctcttgnaagtcaccccncctgatttcctttggtgagntccgctncctgggncttctctttcnccagtgtcccttgann

SEQ ID NO: 20167 - DNA, 993 bp, Homo sapiens
  misc_feature 1, 2, 3, 4, 5, 6, 7, 8, 9, 10, 11, 21, 62, 70, 104, 993: n = A,T,C or G
nnnnnnnnnnnacgccttacnatttccattcgccattcaggctgcgcacctgttggaaggcngatcggtncgggcttttcgctattacgcaagctggcaaaggnggatgtgctgcaaggcgattaagttgggtacgcaggggttttcccagtcacgacgttgtaaaacgacggccagtgaattgtaatacgactcactatagggcgaattggccaagtgagctcgaattgcggccgcatgcataagcttgctcgagtctagagtcgactgggccgaggcggccgacatgttttttttttttttttttttttttttttttctattttgtgacactatttcaaaaaccaggaaaactaatacagagttggattatgtaagtaatttcagcttagctaaagggttccattaaaagtttctcagcttcaagaatcatgtttacagaacataaagcataggcacaatttgtctagcaagacttcttattgtacacaactattgagttttcaagaacagaaaaaagagagaaagtgagaatgagagtggtgttatctgtctttctttggaaactaatcaatcttcaaaaggaaaggaaagggacctctctcttccaacgaaggctgactgaaatgagccccaagccctattacccctgtaagaatggactgaatggatcccacctcagggagctttgccggccagaatcaacctgcttcctggagagataatgaggaggtgcagcagtgaaaaagaggcaaccatcctcaaagcccattctctcctcaccccaaacactgatggcaaagataggggccaaggtcagggacctgtcagaagccttcagtgaactgagttattcctggcagatggaagaaagccgggagaaataaatgctaaaatctttcacttcagaacttttctgaatcagtcaagatgacagcagagaactagtatgtccaaatataaacattgtatttgaagttatttgcttatgcn

SEQ ID NO: 20168 - DNA, 340 bp, Homo sapiens; identical to SEQ ID NO: 20158

SEQ ID NO: 20169 - DNA, 483 bp, Homo sapiens
  misc_feature 1, 2, 477, 478, 479, 480, 481, 482, 483: n = A,T,C or G
nncacaaaaatcctgttatgaatgacctgtgtcattctccctgcctgactgacatcctggagtgtgtcattgaaaaccttcactttgctggcatcttcccaaatttctcagacaccctctctttgaacctggagcctcctggggaagtattaagagccaaccagctatgaaaacaatgtgctcttccctgtgctaagtgcctcttcttaggcagtaaaatgcttcagtggtatgaacatatggcatcaacatggcctctgaaaaccatgctgggtgtttaacaagcatggagggatggggacaggctgtgatgagctctggaggcttacagaacaggacctcccctcccccaggagcagaggttcctcagggatcttgactccacatagaccaaggctatgtgggaaagagagctagtgccttgaagctattgcattttttttcctttaataaaacaccctgcagaccctgacatannnnnnn

SEQ ID NO: 20170 - DNA, 587 bp, Homo sapiens
  misc_feature 1, 570, 584, 585, 586, 587: n = A,T,C or G
ngagcggccgccgggcaggtaccaggtaatgaggaaggtgatcccggcccccattccctgatggaacctagacttcactaagggattcagatggaggaggagatgttcaagaagccaggaaggatcaacaacagggtgccctcaattcactggggccacgttagtggccgattactaaatgtcagaccaactgcagtagcgctgtcatggccactcatctctccgggatttcttcccttccaagccagctaggttcaaccttctcatttacttttaatacaccacctcttatatgatctttcttctctacttagaaccctcccataagccgaacccaatctgccttttcaccatcttcccatcttcctactgcctccatagttattcttcgggatctagctaagtaaactcttaagttattctcccatgttttcctagcacctaacattatcagtttccccctccacccccattttcttccacatacggaggctcaataaataatagttaaatgaggctgggtgtggtggcacatgtctgtaatcctggcactttgggaggctgaggcangaagatcgcttgannnn

SEQ ID NO: 20171 - DNA, 445 bp, Homo sapiens
  misc_feature 442, 443, 444, 445: n = A,T,C or G
actctttctcgtggtctggaataaattccctaccactttccactatcacctagtttactgagtctcacgtattaggattgggtttaaatgtaacctgtattgcctcacccagaaagcctttccagtctacccctgctttgattatttccctatcctctatgctgcctttgttccctgtgtgtctctccacaacagcaattagagcacatatgatttattatctcacatattggtctcaactttcagtctatgaagtctctgcgcacagaagctcatgagcgttttcttcctttctgtggattacctttgcaaaggcccgagaccaccagagaacctgccttcctacctctcttcctcatctccacccattccctgcctcacattcagttaacaccaaactgattgacgtttttttcaggtgctacttgattgatgctttcannnn

SEQ ID NO: 20172 - DNA, 2079 bp, Homo sapiens
  misc_feature 1, 2, 2079: n = A,T,C or G
nncacccacgcgtccgattacataaatggaaaatcattttacacatcatacctagcaggtaataaaatttaaaaaataaaaattaaatattagaatgtgagaaatttattaaaatatagttctaaaaataagtttcttcctgagaagaatgatactgtttatgatgaatccatagtgaaaagacagtgacctctctttcatccagtctagtatatcactaaatcatcattacgatgtttggctatcaagtcattaattactgtcctcctttcactgagctttattcaaattttgacaatcagagcactgggaagaaataaattccacaactgcctttagccttctggatactttcttttataaaatagaaaccttttccacaccagttctgcagcagtcgctattagatgctcgtggtagaacccatcaatcatctggtcctctgggtactggtgagcatccctggtcttcatacctgtgagtgggctttgtggtgaattactgtaaatatgctaccctcacttttcttggcagttatgtccatgaaatcaagagtgtgatgttctagttatttttttttatatatatttttaaatgttcaatattcaactattgaaacaaatgtacatctgtgaactagctaaaatcatcttatgtaccactaatatgcccagcacattttgtaaaacagtcctgatttggcctccaagggtatttattgaactaccagcagtatctaggagaccacgaaggaataccacgaaggaatttatgctccagtgcttgccataatttgtctgagaaggaatctgttaaataaaagcttttatcctctaacctttaccttcatcagaccttataaaaggtcaaatggtgattcttaagttttttagtcacaaatcttacttattcagtattagtgcgaagagtagaatactttcaagtaagcctaaacttacatgaaaacaaattacataaatctagctctgagaataggaaattagtgacaagatcaatctgtaagatgttgagcacttatctgaagtaaatgggtaatgagtttcacatcttataaatacaagttagcatgtgttttctcaagagtccaagggttttcattattggactacagctttaatcttctaaatgttattccccaagattaaagagcatctcaagttagatcaccaaagatcaaaagctaaaaccagaagtatttttgtcattgtggtggtggtagtgttactaattgcctagatttttaaagggaaacatttttttcactgggttgtttcgttgaaaaaaatagaagcagaaacttgcccaaagtcacagtggtcaaactggaaattgcaccaaaacttggcatactggttctgaaatccatagttttagcccttatgtatactggttaatttggaaggaagaaatatatacgttctgaagtgaagagtgagtgaaaggaagaattcagtgaatacattgataccttgatattatctgcattgtggctacatgttacttttcttcacaagagtgatataagtgaaataaagaatgattggactgggagaaaaatggctcagaaaactttgcaaaagtatgactgtatgtaaagataagtattacattaaatgggaaggaggagagcaagcagtttaatatatagaattttataattttaggcctgcagggaccttataaaacatgagcaatggaacacttttttccaaataaatttcgtgcagtgaactggcgactctgtccttcctctattctaaagcaacccttactctaagcccggtggctctgagttcagtttgtaccaactatggacacgaaagttaccacaggctttgccagcttaatggaagttttccctttaacacaatggtaaaagacctactggatggacggttgtttcctcaacaggaccgaatatcttggtcctactaattcaatcacagcgaatggtggctgtttcaaccttggaatatgtgggtcaccttaaaggggaaaacgcggctattttttgggagcaggcacgggagaattcgcccgcgtttcggtggtcccacn

SEQ ID NO: 20173 - DNA, 376 bp, Homo sapiens
  misc_feature 376: n = A,T,C or G
acctttggttttcttaaagtgaaagtcagctatatctatcaacctttgtatttgaatagtcccgctttacactctaagaagggtcataaacagtaatttaatataattatgaccatgctaatgtgaattcttaggctttactatatttacaacagcacaattttgattcaaaatcagctcttccaactgtaataactatcttcaaaaactggtttccaggccaggcacagtggctcacgccagtaatcccagcactttaggaggccaaggcaggaggatcacttgaggccacaaattcaaaaccagcctgggcaacagagcaagattccatctccacaaaaacaagttttgaaattaatcaagtatgatggcatgn

SEQ ID NO: 20174 - DNA, 587 bp, Homo sapiens; identical to SEQ ID NO: 20170
  misc_feature 1, 570, 584, 585, 586, 587: n = A,T,C or G

SEQ ID NO: 20175 - DNA, 780 bp, Homo sapiens
  misc_feature 1, 2, 3, 4, 5, 6, 7, 8, 9, 775, 776, 777, 778, 779, 780: n = A,T,C or G
nnnnnnnnngctggaacctgggaggcggaggttgcagtgaaccaagattgcaccactgcactccagccggggtgacagagtgagactccgactgaaaataaataaataaataaataaataaataaataaataaataaatattatggatggtgaagggaatggtatagaattggagagattatcttactgaacacctgtagtcccagctttctctggaagtggtggtatttgagcaggatgtgcacaaggcaattgaaatgcccataattagtttctcagctttgaatacactataaactcagtggctgaaggaggaaattttagaaggaagctactaaaagatctaatttgaaaaactacaaaagcattaactaaaaaagtttattttccttttgtctgggcagtagtgaaaataactactcacaacattcactatgtttgcaaggaattaacacaaataaaagatgcctttttacttaaacaccaagacagaaaacttgcccaatactgagaagcaacttgcattagagagggaactgttaaatgttttcaacccagttcatctggtggatgtttttgcaggttactctgagaattttgcttatgaaaaatcattatttttagtgtagttcacaataatgtattgaacatacttctaatcaaaggtgctatgtccttgtgtatggtactaaatgtgtcctgtgtacttttgcacaactgagaatcctgcagcttggtttaatgagtgtgttcatgaaataaataatggaggaannnnnn

SEQ ID NO: 20176 - DNA, 524 bp, Homo sapiens
  misc_feature 1, 524: n = A,T,C or G
nattgggaggcagagtctatgggtacacggagcaaacagagagagcagagtggagtaagcacacactatacacagtacagcattcttgtattgctgtgtttggctatcctagtatagtttgtgtttaggcttcatcacaaaatagtaacatgcagggaaaaatcaatgaaccaacgtgattccatgttatattgatgccattcccttattcactaatttcacatgagctcaatcacatcgcagaaacacatcctttcacaaaataaactgtatacttggatctacttatttttttctatatgaatgtagcatgtcagttctgtgttaatgaacaactatgtcttaaattttgtattttagaaaatgtaatgagcaacttattcatatctgtgataccttgccttcccagggtgggcttcagtggctgcttttagattcaactaagcagtcaaacccacaggacctaatcaggccatatcgaggatagattcccttagagacggatgttagaagggacacacagn

SEQ ID NO: 20177 - DNA, 515 bp, Homo sapiens
tccaccgcggtggcggccgccccgggcaggtactttaggctgagaaataaatagaaggtgagaaaaaagaacagtctttatagtcagtaagagtgaaaagagaaagatggtagttggggaaagacagatggggagaaaggttggctggttgttaataaaacagtagaggatgagcatgtattataaatgctggtgggaagaaaccttgtggcaaggagggtggtagtgttggagaagaaagagaggatatagtagaaagttaaagaggaactggaagcaggtgggatccaggacataggaaggggaagagccttgggcagaggtgagacatctgcaggagggaaggaactgagagaagggaaggtgtgcaaatgtggcaggaggagtttgagtaaagttccatctgatatcctctattttctctgtaaatcattctgaatgaagtatgagacaaagagatcaaaggcttgagaaaaaaaaaaatttaaaaaaaaaagtacctcggccgccaccgc

SEQ ID NO: 20178 - DNA, 2159 bp, Homo sapiens
  misc_feature 1, 2, 3, 4, 5, 6, 7, 8, 9, 10, 11, 12, 13, 14, 15, 16, 17,18, 19, 20, 21, 22, 23, 24, 25, 26, 27, 28, 29, 30, 2155,2156, 2157, 2158, 2159: n = A,T,C or G
nnnnnnnnnnnnnnnnnnnnnnnnnnnnnnttttttttttaaaagatacaaaaatattttcatttaataaacgtctttgcatgtcacatttaatgggaaacaaaatatcatgttaatagcctagtaatacaattttattaaagtcagtataagttgaaaagtttatcagtgttaataagaatgaaaaatatgtacaatatgcaattactattaaatacaatttgcccatagttgcacattgaattcattatcacggcagttaaatatcagagcttctggtttctcactcttcattcatgtattcagcaaccatgtgctaaggtactaggacaagcactggaattacaagataaagatgatatggtccacccctcaacaactgtttgctataatctgaaaaaacaaacaggcaattcccatacagagtcatacatacagtgacaggcataagacagcacttattagaagacatagaagggatactagcccaggtttgtgtcaatattgtaggctttttggtagaggcaattcataggttgatatctgaaggggaaggaaaacacatgtaggatagagggaagaagtaaatgcaaagagctggaggtgaagacgatcactgtggagctccatgtagtctagtttggctggatgctagaacaaaggtgcagagtatggtaagtggcgaaagagaaggctgaataacctgacaagaaccacactgatgtgagagttttgattccatgctaaggaattttcaacttttcccaggggcaaaagtaaaccaatgacaaagtcatgactagagatttaaaatgtcactggacaagtgactgcttgtgacctgtaattgcttaactaattattatcacatgagtgtggggtctgttagccttaaatcactaccttaaccttgagaagttgatgatgcctttgttttctgagaacagtttcagtgtgcaggctgacagttctataggggtggcagaagaaaagtgtagggccagaaaaaaagggatacacagacttcttgcaatttttttaaagctatgaaacatgaagaattaacaaagcataagtatactcttcactatgaatgtttatgttttcacatctttcactagatgtgtgtaagataaaatatttaatgtagcatttattaaccaaacaattgagaggaataccgttcactacttagagtttatttcagaaatcaatgatttgaatttaattcataaattttggcaacataccttcatctagctctcaaacacctgcagcatcaaacttgaatgctgcaggattttctcaagccgctcaatttggtcatcctgttttttaataatttttctcatcatcacatgttctacttcaagcctaaaatgtgcattttaaaataattactctcacacgtaattttttttaaatcatgtaaattctaaacaaacttctgaaggtataattacacaaattcttagcaatcacaaaagtagacgattgggctactgtgtcattttctacctgtgttttggtgataatatgcaaaatttaggaataatgtagaaaaatgatgtatttcgatatagcttacaaatgaaacttttttggcttcacaaagacatactaattatcataactgatacaattttcatactacagtgctcttttgctttataaatactcaagttattttgtgtgctgcttcaaattttacttttgtgtgtcgccttccatctccttagtacatcttatagtagctgtaagttgatcctgtatttcttgaagctgaaacaaagaattttaaaaaattacatttggaaatgacctaaaggtccatcagtagatgaatgaatcaacaaaatatatataaaatattttagactatcacaatcttttttatttaaaaaaggtcataatgtaggagaaatcatcccattacctgttttttgtaattaattttagtgggacactgctacaccccttcagtctgcatatcgttcatggctacttttgtgctgtaactacagggctgagttattgcaacaaggatcttatggttcacaaagccttaaataatactatctggccctttacagaaagttcactgacccctgctctaggactgaaacacaacattcttcttgcttttgaataacannnnn

SEQ ID NO: 20179 - DNA, 601 bp, Homo sapiens; identical to SEQ ID NO: 20150
  misc_feature 601: n = A,T,C or G

SEQ ID NO: 20180 - DNA, 398 bp, Homo sapiens; identical to SEQ ID NO: 20157
  misc_feature 1, 393, 394, 395, 396, 397, 398: n = A,T,C or G

SEQ ID NO: 20181 - DNA, 4601 bp, Homo sapiens
  misc_feature 1, 105: n = A,T,C or G
naatgtcggcacaagtgttcatggtgcgccccgagttgccgtttcttgtcccgttgcccgcatttttataggggccaaggtttattctctttgagtcttttagancggccgctgttggcaaattaccttggggtaagtcatacggccgggaacaactgcttcatgtattcaatagagggcggtcttcctccaaataacattttcttagtcttccgtgatgattcacatccggtgccatcttgtctgtgttagtaaataaataatcttgtgcgaacagcgttgcatgttttaaccaacacttgggcctcggcactgtggatgttgtgtccgcccaaaacggtttgcactatttgccgagacgagttgtcttcccggaggaaaatgtcatctaggacccgttccatggggcaagtctattggaggtaccccaattaggccctatactactttaacgcgtaggctcttttatttttttttttacgtagtacactgataaccacaaagctctgagtatctccccaaagtaagtgatataggcagatatgataaggtatacatacatatttttcaaagtaacagtaaaaaaaaaaaacaaaaaaaaaacacaaaacattcaggccaatactaactaagccttatttcaggatagatgaccaaggtgagggtacagggatagtgatggtgggggagggggtgtgtgtgtgtgtaagacaaaaaaaaaattactgttaacttttgagggattaaaccacagatttttatactctatattaactgaggtagtgtttaaaatgaatgtctaaaatatgttaatcccattatgaataagattacattacttcctttggaggttttaaccactatttggtctagtaactctgacatttggttctctggaaaggcagtttagttatccaagaccaaagaccacgatgacaggcaacgttcttagaagtactgttgacatttaaataaacacttgggttcagtgataaagtataaaaaaattatttatcttcaactggattttatgagagaaaatctgaagaaccacttttcaacataagcagcagcttacagcccttatctgctttgttataatgtaagttgctacacagtgcacataagaacaattcactgaagtgcagtcaaagaggtgttatgaagtgagatgaaatgcttcatcccaactggaactttcagttccagtaaataaattttttaaaaaagtatctctgtgagttatgttttctagttcacagggttctttacagagatctcaaagaacaagcccattacaaaaaggatctgcatcatgggaaaatattaatgttgctatgactgtgtcaaaactgatgtgtaattgtaataaactatttctatttatatatagatctcaaaaaagataatcctttcatttacaagcattcaaatgatggccatgctatttttatatacaaatttgcatatatgtttaattcctgtaaaaagttccaaatacctttagacatatacaaattaaacaaacaaaaaccttgccctcatcaacttaacttcacaaatggataaaggcaattaatatactcataaacccacctaccactgcatttagtttgtgcaaaacaaaaacactgatataaaaattaagttactgctgctttaaaatttggtacttaaggcttttcactacaatttttctcaataacaagctttattaatttttttttaaggaaatatggctcttctttccccatggaatgtgtaaattgcaagcaaacttatcttttcctcaggagatccaaagtattatttaatgctttcctatcctttaggtctaaactaacagtgcttgttcaagttcctgtttaaagcgatgagatggaaagttgatgaaagtggaagtccattgcaaatatatgcattctataaatgggaaatatttttaattaaaataaaaaatgatttttaaattttattcaagaactgtagtgaaaaaccttaattggttcatatatcctgtaataacacattgcaacaaaatgaagagttggaaaacaagaatctttatgcaagtctagtaacataaaaataacttataagtcccgggttgttgaggctcttcttctgctttgaggttataaacctctgaagtagtgttacaaacattaagaaaaacgtgaaagggccaaagttccctctctaataccagcagttatagcacaccccattgtggtaataggatgcagccttagagacactgattcctgctttccacaagttagttaacaaacaaggcatctgtattatttaccctaaaaatcattcagaaataacttgtgaagggtgcttctgcatatcccattattgttccactgtcattacgcttttaaaatgaaagaaaatagaaaacctatgtaggtattcagtgcttggctcttgcatacaatggtaactgaaactcttaaaactgtggtaatgaatcatgaacccctcaaaaggctcaacaaaggagagaaggaagttgttttggttaggaaagtcagcagttccaactgttcatgtaccagtaactgcggaacagtgtacagaagatactcctgtctttgctgcctagtcagtcgtattttctgaggcttttaggaaatccacaaatatgaatatatatagtatgtatctatatccatcataaatatgaggtcaggattcagcagatgtatcaactataggttgctttggtggtgttgccaacacagcctctgcttcttcatgcatttgtagaaactgtacatcttgaaataattcttgtatgaacctccgacacggaagtctgaatgtgcagtgtgacagcaaatgggaaacctcagagtaaaggcatatgtcatcaaatgtttgaggatacttctccttaattgttaaaagcccagtctcatgacatttagttgaaactgaactactcaaattaatgactaatcttagaacttctttgcgaaggagtatacggcacattggtgtatcatctggaattgttttaacacctagtaacaattctgtgcttttggtgctgctagctgagccttcttgagacaccccatcactgcatccagaaatccccgaaaacttagagggaaccacttctaaaggattatggatagtctgctcacaccaatcagaatatggaatatcttgaaagtctgaatgactacatattgcactcagttggttgctgggctggaaacccagaatttcaatacagacacaataaaggcagttatcatctgtatgttcctgtagtccagtgtcttctgtactttctaaaaacagagaggcatctgaatggattgaattcattatttccgtaagactcatctgctgtcgtagcaagtgaaaagaattttttacaagacctccagttccagatggaagacctcctgcatcatgggcaaatgctcttgcacctcgatcatcatgtggtggtatgttttttgtctgaaaatagggaatatcctttacctggaatatatcatttatatccaccgggagagcaagaccaatgtaatcatctgaacccccatatgtggcactggacaccatggaccgcactgaggaagatcgttgcagggtattttgattaataggactcaataaatcttctttatctaatgatgcataacttaaggctttcatgaacctgcttggtgttaatctggactcaaaactgttggccttcatggtgatggtatcagtaaatagcacatcttttgctggagatgccaaagcttcagagtgagataaggatggatgcattctttgttgctgtagtcttttcagtgtagcatagccaaaagcatctctagaacttgtgtaactaaagttacaatctgctagacttttaattgtagcaatagagggtgctttaagggactgtgctcttctaggaagcctgacggaagaaccacagtactcatgcttccacagtctgtgtccatagttgtagcatctacacctactgtctctcgtgaaggacttgagctcattgaacttatgccacttgttgtagtgtctgtattgaaactttggctacgtatcttcatatgtgagctcgttgaactttctactactaacctctctcggcttgtattttctctgtgattctctgtaccaaaattcttggtgaattttaagtcattttctccaatgcttggtgtactaccagtgtcttcaatgtgcttattccccataaatgaagtctctaattgtaatgttttctgtacagtggatatgggtgtaaaatcatcactatgattaaaatcaacactgggctccgtaagtgttctgattcgcctgttgcttgtcttactttcagatgataatttccctccttttggatcactgctactacgatgttttttgttaggcaaagtaagcgaatttaagatacgattcttcacaagtttactagaagcaaagaaagggaatgaatttttatcctttatgggtccagatcggtcataaaatgttggctctgtatcttcattgatatcaaggaaaaatgtactagtagagctgctgccaaaccggtcggacgcgtggtcgactcccta

SEQ ID NO: 20182 - DNA, 1404 bp, Homo sapiens
tcgacccacgcgtccgctcatatgtttttttagctcattccattgggtgtgaaatcaaatctgagaactcaggtatttgttttaagtagttagaccttttattgtactctgttgtcttaaaaagcatggtttagtggtggtaacattgacctaggtgacaggcttcagtttagtttctggcactggtcatgaaactttgaacaagttaactcctctcttaggaccttatctttatgtagagaaagttggactaaatggctgttaaggtcttttcgggccttcaaatgctgtgtttctgtaataccacccttgtttaagccacagtcatctcttgtctggactcacaggagcttcctaacttgttttcatttttgtccttccccacattattttctacccagaatacaaagtgacctttttaaaaatgtaaatcagatcatgtaataccctccggtcccaatttacccttaagaaccagttccttatcaaggcctagaaggtactgcataatccagttcttgcttacttcacaactttatccccattactcactaagctctagccagctgtacttctttctgtgacaatcttttgccagccctctgcaattctgcctcagtctcaacagtggatctcagttcagatgtcacatttacagagttttttcctgatcaccttatataaaggagcattcctcttcattacctctgtagttcttaatcataatcaataattatatttatccatttgtttgcctctcatcccctctaaactgtttcaggacaggaagatcatgttacttttccaccactatctcaaatggttagcccaataactgcctagtgctcaagagaattattttagttagaaaaatacataaagtatgtaacggtttgtccataccaattcccataataagctactccttaaactggtttttttcttcactcttttggtagtggcctggtctcataatcttgcccaggctagtctggaactactgggctcaaggatcttcctgcctcagactcccaaagtgctgggatttacaggcgtgagccaccacacccagccttaaactaatttttaaagttttatatctatgtccaactataattcctcattttttatttaggtcatctgtctcttgaggactatttgatctgattgcatgttattgaaagctaattgttcttagttactatatgttaggattaaattgagtaattttgcacaaaaggtttttagcaaagacatgaaaagttaaccagtataaaactgttagcagttcagaatatccaaatgagtgatataaatgagtgcttattagagtcaaaggaagaagtgaaacccttaggatctagtagttagaaaagacagtaaaaataaggtagaatctgcata

SEQ ID NO: 20183 - DNA, 524 bp, Homo sapiens; identical to SEQ ID NO: 20176
  misc_feature 1, 524: n = A,T,C or G

SEQ ID NO: 20184 - DNA, 316 bp, Homo sapiens
acgcgggggcctttaaagtgagagagggaggcagaagaggaagtcagagcgatgtgctgtgaaatctactaccgtttgctggttttgaaaatggagaaaaagagtgaggaactgagaaacatggatggccttgggaacgtggaaaaggaacttcctatgtcatgaagacactcaaggaactctatcgagaaattcatgtatcaagaaactgaggcctactgccaatagccatatgagcgaatcatctcaaaagtgattttatagcccctgtaaagccttcacatgactgcaaccttatgagatatcctgagccagt

SEQ ID NO: 20185 - DNA, 1189 bp, Homo sapiens
  misc_feature 1179, 1180, 1181, 1182, 1183, 1184, 1185, 1186, 1187, 1188,1189: n = A,T,C or G
accgcggtggcggccgcttttttttttttttttatatttttagtagagacagggtttcaccgtgttagccaggatggtctcgatctcctgacctcttgatccgcccacctcggcctcccaaagtgctgggattacaggcgtgagccacccatccggcctaacgagacttatttttactcaactagatggcgttcattcatttgcttactcagctgtgccaggaattaagttgggcactgggaattccaaaaccaacaagacattctctgtcatcagggaactcacagcctagtatgagagataaacaaatgaacatgaaattataattcagtaacaaagaatgagtgttatggcagagggaatgtgtaagagcttggcagggtatccagcagggatacctaactaagccccactggggaaggcatccgaacagaggggacagctgagctgagttcaatgagccagtaggaattaggttgatataagtcaaatcatttagtgtttatgacaactctgaaaaataagtatttccattttacagatgtgaagcctaagtctcaaagagttatccaacatcatccagaagtgtggggaccccacaatatccaagggaacctggccccaaaactcatgatctttcccctttaccgtgctgcctcttcaagactgagaatctgtccttgatgggatttgttcaggtaccatgtcaggatgactgtctacgtaatggaagccctgtcgccagcttttcagcttcctttcaaattcccccaactccttctttttttcacgcagcaacttgtctctttccatggaaatgcctgttcttcattgaaattaagtccatctggcatgatctcccttgacttctttcctctctttttgaacatgtgttgatcctcagcccagcagattgtaaactcctcaagggcaggtgccctgttttaatccttgtctgtgtccacataatcaggcataaaaacaaggggaggggaagaatagagaggaagaaggagggagggacagagagaaaaagggaaagggagataacgtaaatagagaaaaatgcaacaacataatggagaaacacacagaaagaaaatcagaaacagaaccccaaggcataaaaaaaaatccctgttacgtccccgcgttaattaattctagaagtaccccgannnnnnnnnnn

SEQ ID NO: 20186 - DNA, 783 bp, Homo sapiens
  misc_feature 1, 725, 758, 782, 783: n = A,T,C or G
natctgtcagccagttctttctgggtattctgtcttttctctgtaactgcttcctctctccctgcccccatcaatcaatattctagttttactgcattgtgtctagtactaggatttccttttattgctctagtttagtattcattggcttcttctatctgaggactcaccaatttgtagaagtcctcagccacctttgcatactgggcattctccatcctcgtacctttctatgggatgctgattcaacacgtaagacctttgcattctattcctccagatctcttaccctttcttctctatttttcatctaggtctctttaggtgtatctttcattttgtcatccctttcactgtatctaatctgcttaatcaatatgttacactgtaaattttaaattaccatatatgtatcatttacaaatccctttggttccaaacctacttggccaactttgattctcttcatcccacatcatattttctatctcctcttattttagtctacacctggtaattctaatatctgtaatctctttgagagtttaggtaatttgctgtatttgctgactgtctcagggtagcttgtttccacataggtccatttatattagaatgaagtcattaggactctatctgaggggaatctttgagccttggtttaaggagagttcctccagagaaggtatgtgttcacttatgctgggttcactaccaatacactntaaacttcaagccttttttccttttccttcctnaaccaaatagtatgaattcttgcnn

SEQ ID NO: 20187 - DNA, 581 bp, Homo sapiens
  misc_feature 579, 580, 581: n = A,T,C or G
cgatctgctgctcgtctcaggctcgtagttcgccttcaacatgccggagccagccaagtccgctcccgcccccaagaagggctccaagaaggccgtgaccaaggcgcagtagaaggacggcaagaagcgcaagcgcagccgcaaggagagctactccgtgtacctgtactcatagcaggtagcttcatcaagggtagttttcaatgcattttctgttgggtaaaaaactttcccctcaaaaatctgatgacaggcttctgctaacagtgaagcattggacagagctgccctcagaaaacgtttattctcccataactcagtattgtaaacaaatacaaaaatcagggcagagataagagacgcgctaaaaagacagtgcttccaagagcccatcattcacaaccaggaaatgagtaaaatatctctctcttgagataggatcagagtgtagatatatttaacttacattttctccaggttccgaaatcatcctcgtgatggctgaagctctcgttgggctgttccctgtcctttcagtcacggttctgggcctttttctttcttcttcccctctttacnnn

SEQ ID NO: 20188 - DNA, 430 bp, Homo sapiens
actggagaaatgctcaagggaaccactggcctcaaatctcacctggctttggggcaggacggttcctcctcacttcccaaaagcctgagaagaggagataaaggtggtagaccttcttttttctccagccataaagaaaaatgatacccagggaggctctcatccctttccctattcgtctcccgtttaaggctggtgaggaagaaatggatgtaaaaggcagacaggggtgccaccaaaaaaacataagtcctcagcaaaatgcaaaaatggatacgacggtaaaatgggcactttgtgtgtataaagctgataaagtggccaatatccttccaaaagcgctgaaaggtcactggtcacatgatgtttatgaattaccaaatggaactgaaaaattaaaagagtcacaggtaaggtctgtcttaaaagt

SEQ ID NO: 20189 - DNA, 4348 bp, Homo sapiens
  misc_feature 1, 2, 3, 4339, 4340, 4341, 4342, 4343, 4344, 4345, 4346,4347, 4348: n = A,T,C or G
nnnctgacagctctctccatggaaggaggcggcggccgcgatgagccttcagcctgccgggcaggggacgtgaacatggatgaccctaagaaggaagacattcttcttttggccgatgaaaaatttgacttcgatctttcattgtcttcttcgagtgcaaatgaagatgatgaagtcttcttcggaccctttggacataaagaaagatgtattgctgccagcttggaattaaataatccggttcccgaacagcctccgttgcccacatctgagagtccctttgcctggagccctctggccggggagaagttcgtggaggtgtacaaagaagctcacttactggctttacacattgagagcagcagccggaaccaggcagcccaagctgccaagcctgaagaccctcggagccagggcgtggaaagattcatacaggagtcaaaattaaaaataaacctctttgagaaagaaaaggaaatgaagaaaagccccacgtctcttaaaagggagacatactacctgtcagacagccccttgctggggccccctgtgggtgagcctcggctcttggcctcctccccggccctgcccagctctggtgcccaggcccgcctcacccgggcgccggggcctccgcactctgctcatgctttgcccagggaatcatgcactgctcatgctgcaagtcaggcagcgactcagaggaagcccgggaccaaattgctgctgcctcgagcggcctctgttagaggaagaagcatccctggggctgcggagaagcccaagaaagagattccagctagtccttccaggacaaaaatcccagctgagaaggaatcccaccgggatattctccctgacaaacctgccccgggtgctgtcaatgtgccggccgccggaagccacttgggccagggcaagcgggcgatccctgttccaaacaagttggggctgaagaagaccctgttaaaagcacccggctctaccagcaatctcgcaaggaagtcctcctcggggcctgtttggagcggggcatccagtgcgtgcacatccccagcagtgggcaaagctaaatcaagtgaatttgcaagtattcctgcaaatagctcccggcctctgtcaaacatcagcaagtcaggcagaatgggacccgccatgctgcggccagctctgcctgcaggccctgtgggggcatcctcctggcaggccaagcgggtcgatgtttctgagctggcagcggagcagctcacggcacccccctcagcatcccccacccaaccccagactccggaaggtggcggccagtggctgaactccagttgcgcttggtcagaatcttctcaattgaataagactagaagtatcagacggcgagattcctgtctaaattccaagacaaaggttatgcctactcctacaaatcaatttaaaattcctaagttttctattggtgactccccggacagctcaacaccaaagctttcgcgggcacagcggccgcagtcgtgcacgtcagttggcagggtcactgtccacagcaccccggttagacgctcatctgggccagcaccacaaagcctgctgagcgcacggcgtgtgtcagccttgcccacacccgccagccggcgctgctctggccttccaccgatgacccccaaaacgatgcccagggccgtgggctctcccctgtgtgtgccagctcggagacgttcctctgagccccgcaagaactctgcaatgagaactgaaccaacaagggagagcaacagaaagacagattccaggctggtggatgtgtcccctgacaggggttctcctccttcccgtgtgcctcaggcacttaacttttctccagaggaaagcgattctactttctccaaaagtactgccacagaagtagctcgggaggaagccaagccgggtggagatgcagcccctagtgaggctcttcttgtagatatcaaactggaaccactcgcggtcactccagatgctgcaagccagcccctcattgaccttcctctcatcgacttctgcgataccccagaagcacacgtggctgtaggatctgaaagcaggcctctgatcgacctcatgacaaacactccagacatgaataaaaatgtggccaaaccttcaccggtggtgggacagctcatagacctgagctcccctctgatccagctgagccctgaggctgacaaggagaacgtggattccccactcctcaagttctaagccgaaccaaatcctttgccttgaaagaacagccctaaagtggttttcaaccctcagaaacaagctttaggctggtcgcagtggcttacacttgtaaccctagaacttgggaggctgaggtgggcggattacttgagcccaggagttcgggaccagcctgggaaatatagtgaaactcctgtccctacaaaaaatacaaaaattagccgggtgtggtagtgcatgcctgtagtcccagctacttgggaggctgaagtgggaggatggcctgagctcaaggagatgcaggctgcagtgggctgtgattgtgccactgcactccagcctgggcaccaatgtgagaacctgtcttggaaaaaaaaaaaaagaaacatgttttagtagaagttttatttgaaaaagaaaaataagcataaatatattcccagtgctggagagggtgggctgagggactggggccagcacggaccacccaaggcctctgcttcccgccgccaccctcctcgctgccattctctgggctggaatgtgaagcctcagtcactctaaatgaagaattttcttttgaatgttttgtatgtaaaatagcaagtggctatttttaaagttaagtttgtataaatagttagatattctagatttacattaaattgtaaaataaatggacttattgaagcatatcttgatttttaagcttatcttgattttcaaacatgcatagctatttttatcactctaatcagtaaggctactatctagactcgaatgctttcatacaagtgattttcaaaaattagtcaataaaaattgatgtcagtgcaggcccaggcccgcccccagatacactagttggctaggtctggggccagcctagtaattgttactaggcacacaggtgatgctgactcgatggcctgagacacaccccttgagaagaagctgctctggggagacgagggtatgagtggaaagaggatgggcgaggaggccgggcttacctggacactaaggtgatggacggcgtctgctgggcaggcctcggggaggacccctcagctttgctctcagcaggggcccgacaagctcagtgggcagtggcaggaactgagtgccactggaaagcccattccctttatttagaaaacgagctccaggaagccgctactttgtgtccatttctcttgaggaaacttaccaccttggttgagcggcttcatggcagacagcagcgagccagcggccggactctgtatttcggaccccactccagtgctccctgggtcataccaggatctgcctctgtccacaaagatgagggaaaatgatgactgtgctgtgctctctacttcctgcggttactgcgtgattctaaagctgccactcggaacagcgagtcctctgccgtcgagagcagggaggggtagggtggacaggcgatgccgtggaaagacgtctcggtggaaactgccatggtggaaaggtggcgcgcttctcacggctgagttgctgcgcctgcagacggaagctccccacaggcagagctgcttggatgtgtgagtcatgaagccagagaagccccgctccacgagcagtgactccccaggccctgtgacctccctcctgtcttgcagctcctcctggcaccagtccccagggctctcctgttggtagttcctgcttttcttcttggaaattcctcgtggacctcgagatctttaccctaaaatagttctgttgaatttcaccctggcaatgtaaattgatagcttatcttcacagatgccagacaatggacaactcaccatcagtcctctgctcacctgagacaaatgcatgtctgattgcttcctctgccctattgtttatgtgaaaatgcagattcactgagccagactaaggcatcagtgactgttcctctacctgcctctcacatggagattgtgtattcagtgaaaggctgatcaaagacccaaaggaatgcaacagtttatctcttatctacctatgacctgcgagctgcccaccacccccagttgttgcgcctttccagacagaacccagtcgcacactcttacaccgtattaacttgatgtccctgtgnnnnnnnnnn

SEQ ID NO: 20190 - DNA, 1026 bp, Homo sapiens
  misc_feature 1, 2, 3, 4, 5, 6, 7, 8, 9, 10, 11, 12, 13, 28, 1012, 1013,1014, 1015, 1016, 1017, 1018, 1019, 1020, 1021, 1022, 1023,1024, 1025, 1026: n = A,T,C or G
nnnnnnnnnnnnncgaaagtcttctagnattaattaacgcggggtcccctgtggcaccatagacttatctcctaaacactcttcttcttcattctgcagaagacttgtatgtccactttttgtcagatagtacccctcttgtgctcatagtctgggccttctctataccagagtttagaataaaattatatgattattgccagataagtttgagtcttacgtaaggggagcttctgcaattcaggaaatccttttagccttcaagacaatcaaaagctacacattcactttctgctattgctttatggcttccttcctggaggcaaagccttcctctagttgaatgtggaggtcacaagcaaataaaaaagggaaaaatgtattaatacattctaaaacatcctctttgtttcaatatctcttggctgtctctaatcccattcattccccactcatcttttctccctactttatctcatcacactagtccccacaccagaattaaaattttcctttaaagagcattcctctgaagctgacttccttcaagcctgcaacatgtgagcaaaaatgacaaaacaaagaggggaggactacttgttgttaaatataagaaaggaaaggaagaaaagtaccaagccaatgagttggagtttgccagggaggcttctaaatttattctgctgtgaattctaagtggggcatttggaaacttcatatcccctggacattttcttagcgtgacttagtaattaaatgtgcatccaaaaaaaaaaaaaaaaaacctgcagatttgcgctcaaccccaatttggttcatctgaacacaggagcacttgagaaatgcaaaattctttaatcactccaaattgcccaagcacaaaccaggccaagagcgtcaattgcttctaaaataagatgcaggtgttctgaaaaatctacaagcagtctgctcattttaaattactcttcactccatgtgcccatagggaagggaggattgaagaaggcgnnnnnnnnnnnnnnn

SEQ ID NO: 20191 - DNA, 977 bp, Homo sapiens
  misc_feature 972, 973, 974, 975, 976, 977: n = A,T,C or G
actgatctcccttaatccagaagtcagggaggaagttggctgtgtcatcatagtttctgggaaggcaggagttgatgtggaaacacttgtattccccagagtggaggtggtagccattggagatgtgggttttgttgtcactaagtcagccaaaacagaggaaggggatagatgtttataaatcacagtccctacattgactacaggtgcggggggggagggatgaattttctctctatccttgccgacttcagacgtggctaatatttcagctgaggtgctgctcaaatttggaggtggactggtttcaggtcctgagcttgtgcgcaacatgtctgtggtcttcactgggccaagggtgagaagtgcagtcacaggatgaggagaggaggagatgctctctggtaatgtggagaaaaaagaagttgaggtcatggcaggtgaagacagtgaggaagagacagagctggcttcttccacagagggaaggctcggccatggcacatctccaggagttctactcataagagtggtcatctctgagtgtgaaaatcctggagatgcagttgagtgggtccctgaccaaaaggttgttgttgaggtgtccaaggtgagggtaccctctgatgtagccccaggagaacctgtctcaatagtgatggcactttctgctgattctgtcataatgggggaagtagaaagcctggtgatcgcttcagtagagatgtctggtgatatggtgaactgatcaggcactgacatggatgttcccctagaggatatcacttctgtcctggagacctcagtggtagcaccactgggcacttcagaaaggacagtgcttccctctgtggctgagctgatcctctcagagctgctggtctccctcaatccagaagtcagggaggatgttggttctatctgaatactgctggtctcaaagaagtcagaagtggatatggaaacactcgnnnnnn

SEQ ID NO: 20192 - DNA, 668 bp, Homo sapiens
ccaccgcggtggcgggccgagtacgggacttgtctccaggagacatgtctgggaagaagagctagactggagaatcatgagcatgttcaggtgaaaacatgtgagtggataagagcaagagggtgagaacacagaccaaggggctaagggacagactgtgttcagtatttgggtatggaacttgtttttgctacttgctagttctaagaccaggctcagactctaacttctctgtaatgtgggaataatgacagcacttaccttataagattttacaaagattaaaatatcatatataacagcacttaacacaagtaagaattcagtaaatgttgactgttattactattgtctgggtcgttataagtttgaagacacaattgcataaactgtcatcattaaaaggaaaacagagaaaagtagttctggaaggagtctgagaggcattgccagaaggttagggggaaaatcaggataaagtaatgttccataggccaaatgtgggggctgggggaggtgtaggatttcaagaagacaaagtagacaacagtttacaatgcagtaatagaggcaagtaaaataaggatttattgcatcaaactatcttaatgagcatatactcattggtgttctagaaacaaaagccaaagtacctgccgggcggccgc

SEQ ID NO: 20193 - DNA, 668 bp, Homo sapiens; identical to SEQ ID NO: 20192

SEQ ID NO: 20194 - DNA, 3565 bp, Homo sapiens
ggagctggagtaacaagatggcgtcttccgcggagtgacaggggtccctctgggccggagccggcggcagtggtggcagcggtatcgccgccctagctcaccgcgccccttttccagcccgcgacgtcgccgcgcaagcgaggcagcggcggccgccgagaaacaagtggcccagcctggtaaccgccgagaagcccttcacaaactgcggcctggcacccgaaccccggtaaaggccttcgtgttccgtttcctgccgccctcctctcgtagccttgcctagtgtaggagccccgaggcctccgtcctcttcccagaggtgtcggggcttggccccagcctccatcttcgtctctcaggatggcgagtagcagcggctccaaggctgaattcattgtcggagggaaatataaactggtacggaagatcgggtctggctccttcggggacatctatttggcgatcaacatcaccaacggcgaggaagtggcagtgaagctagaatctcagaaggccaggcatccccagttgctgtacgagagcaagctctataagattcttcaaggtggggttggcatcccccacatacggtggtatggtcaggaaaaagactacaatgtactagtcatggatcttctgggacctagcctcgaagacctcttcaatttctgttcaagaaggttcacaatgaaaactgtacttatgttagctgaccagatgatcagtagaattgaatatgtgcatacaaagaattttatacacagagacattaaaccagataacttcctaatgggtattgggcgtcactgtaataagttattccttattgattttggtttggccaaaaagtacagagacaacaggacaaggcaacacataccatacagagaagataaaaacctcactggcactgcccgatatgctagcatcaatgcacatcttggtattgagcagagtcgccgagatgacatggaatcattaggatatgttttgatgtattttaatagaaccagcctgccatggcaagggctaaaggctgcaacaaagaaacaaaaatatgaaaagattagtgaaaagaagatgtccacgcctgttgaagttttatgtaaggggtttcctgcagaatttgcgatgtacttaaactattgtcgtgggctacgctttgaggaagccccagattacatgtatctgaggcagctattccgcattcttttcaggaccctgaaccatcaatatgactacacatttgattggacaatgttaaagcagaaagcagcacagcaggcagcctcttccagtgggcagggtcagcaggcccaaacccccacaggcaagcaaactgacaaaaccaagagtaacatgaaaggtttctaatttctaagcatgaattgaggaacagaagaagcagagcagatgatcggagcagcatttgtttctccccaaatctagaaattttagttcatatgtacactagccagtggttgtggacaaccatttacttggtgtaaagaacttaatttcagtataaactgactctgggcagcattggtgatgctgtatcctgagttgtagcctctgtaattgtgaatattaactgagatagtgaaacatggtgtccggttttctattgcattttttcaagtggaaaagttaactaaatggttgacacacaaaaattggtggggaaattgtgcatatgccaattttttgttaaaaccttttgttttgaactatactgctttgagatctcatttcagaagaacggcatgaacagtcttcagccacagttgtgatggttgttaaatgctcacaattgtgcattcttagggtttttccatccctggggtttgcaagttgttcacttaaaacattcttaaaatggttggcttcttgtctgcaagccagctgatatggtagcaaccaaagattccagtgtttgagcatatgaaagactctgcctgcttaattgtgctagaaataacagcatctaaagtgaagacttaagaaaaacttagtgactactagattatccttaggactctgcattaactctataatgttcttggtattaaaaaaaaagcatatttgtcacagaaatttagttaacatcttacaactgaacatgtatgtatgttgcttagataaatgtaatcactgtaaacatctatatgatctgggattttgtttttattttgaaatgggagcttttttgtttacaagttcattaaaaactaaaaactgtttctgtaaggaaatgagattttttttaaacaacaaaaaatgccttgctgactcactattaaataaaaatctccccaattttttgatagactacttcaagccatttgttacatggtattcctttgcaagtcaatttaggtttcgtgttataacttttcctctttttttaagaaaaatgaaaaaagtaattcttttgtctgaaggggaaaggcattctttcatttttttcttttttttttttttatgacttgcaggcacaatatctagtactgcaactgccagaacttggtattgtagctgctgcccgctgactagcagctggactgattttgaataaaaatgaaagcattaaagggtttccctacaaaacatttttctttaaaatacttttgaaatggctataagcagttgactttcacccttggagagcatcacactgtgtgaggttcagtgattgttgaccctccccagcccctcctgcttctttaagttatctgtgtgcgtgcgcttcctctcaatcttctttgcacgctcatttctttttctctgacccatgagaaaggaaaacttactgatgataatttttaaatagtgtaatttattcatttatagcatgtcaggataaattaaaagaacatttgtctggaaatgctgccgggagcctattgtgtaaatgtaggtattttgtaaaataaccttgaaattgtaaattgacacgtgtttggtcagattgtgtcaagtttaatttgttttgttttcttttttcttttttttatttgaaaactactttagcaataattaattccatgattatcacattcagtattacggtactaatatcccttaatggcagaatgtgataatcatggaattaagggatattagtaccgtaatactgaagaaattttattaagtctgaacttctggggtaggcagcttctttgtttcttttctatccacccttgtcggttgaggtatttgtttcttgactaataaaccctttgatacttttagccagaaatcagtctcataaagctatttttgagtatagtttgtgtaaaataaaaatgtttagctttggtaataacttccaagctgaactccctctagcaagatatttttcagtgcttttatttactatgcacttagactatgcactttttctgaaatatttttgtaacacttttttgtatttttgccatttgaaaggttgtggtgtaattgctctgtaattaagttgcagattaaaactgctgttagctttgtaaataaatataaggtgttttttgtcctggtatatcgtcattccatctgcagctggagc

SEQ ID NO: 20195 - DNA, 418 bp, Homo sapiens; identical to SEQ ID NO: 20116
  misc_feature 1: n = A,T,C or G

SEQ ID NO: 20196 - DNA, 1979 bp, Homo sapiens
  misc_feature 1978, 1979: n = A,T,C or G
tccggttttataatatcttaaggtgtatattttattttttttattggcttagttgttttttgttttgttttgtttgagatggagtttcactgttgcccaggctggggtgcaatggtgtgatcttggctcactgcagcctccacctcccgagttcaaatgattctcctgcctcagcttcctgagtagctgggattacaggtgcatgccaccatgcccggctaatttttatatttttattagagacgggatttcgccatgttaaccaggctggtctcgaactcctgacctcaggtgatctgcccgccttggcctcccaaagtgctgggattacaggcatgagccaccatgcctggccttattggcttagtttttaaattatcctccaaaaattttgggcctttttctgtggggaaacaagtgaagctgctcttcagcatagacactacctttatcccatcattttagtaaaaactaggtttgtttcacttctgaggtgtcttattaatgtacttcatctgagaatttgttgatcttaatgttcgagctatataagaactgccattaaaaaaaatgggataatagatgattttatcagtatacctgtggaatatgtacaaactggatctatagatattttgaactggaccaggtgggtattgaagtaacccatcaaaatatgctctgcagtgattccgcttaatgtttaaattcagtaacgtacttgaaaggcaaatttcagtgcttttgtatgttggaggagggcttactgatgcgtgctaagaccgatttctgattgagggatgaaccttgggctcatttttttcttgtgaagtctctttctagaaaattttttggttttgttctttttaaaaaatacatacttttttgaatgtatcatgtcttcattaacaacagaaaatccacatggtgtttactaaacttgtttacgacattaaaaatttcctttttatttttagtagcccaggttgagtttttcacaagagatttttttcttagctgaggtatagttgtatagcaagaagaattaagccagatttttgtgtgtggaaagacagttttctatccacgtctttttctgtttgtcagaaggtgggagtatggtccaaataaatccattaggttactcctgcagcatgcgcttttagcttctctcttgactgaggatcaaatatccctttgtgagctggccctcagctcctttgctcatgtgtacaaacctcagatgttactacattttatatctaccagagctattcaagcaatagtatttgaaccactagccttttaaataaaattctgccccattactgatgtgcagatattgagttcactttcattttttgccagatttctttgcactactttaggtaaaaatagttaatctatttttctttgacatcctagtttgcgtcagtgacagaacttactgcttagtctttgtactttttaaaaaatctataaatttaatgcactgtccaagtgaaatgtcctagttgtcattgtgattaaggggccaactttccaggcagctagcagagatactattctcttcctctcccagcaaatttgtattccttcgcccacgcattcctgctatactagatggcagccagtgatggaactataaagatgtctgtggtcatatgttgaatgtggcagcttgaagatgtactgccacgggtgatctagggcaggctgtcttccagtccatgtgttctcggtcgccgtagacagcgctctggctaccaccgtgaggctacttgaactgtcaggggcatctgcctaaaccagaatcttttgtcagaaaccttaacccaacaaaacaaatcttgagtagctcatgcccggctcttaggaattttgtctgtttaaaaaaaacggacaattcggcggacacgcttaggcagttctgtcttgccccttgtaaggaatcggcccaggggaatcacgcatatcnn

SEQ ID NO: 20197 - DNA, 308 bp, Homo sapiens
  misc_feature 308: n = A,T,C or G
acctggatttgactgatgtggtccccatcattttctgatagagttctttttgctgggatcctggaagatgatcttggtttatacatgaagaatctggggtccagtgaaagtgacttggtaaaacccacagatctgtgccgaaagccttggtcagctgccccttggcctgatgctcttttctctgcatcagtgcattgcttcacctcttcttcaaggactctgattaactggaagtggacataaactggggttatttatgtgggatttggttttccttcctacatcttagattgggtcactgaatatan

SEQ ID NO: 20198 - DNA, 1028 bp, Homo sapiens
agtagagacggggtttcaccatgttagccaggatggtctcaatctcctgaccttgtgatccacccgcctcggcctcccaaagtgctgtgattacaggtgtgagccaccgcgcccggcctttacgttgaattctttaaattcagcttgtgactttgcacttcaggattctgagtgttctctgtcttcttcctgcattgtttttcttataccatacaggtttttcattggccttgactttttgttgttaactcattcttctttgggtttattttcatttgtttctgctgaatattatttgtttcaaactaaaaataacattccacattttaattgatgtgcggactcttaatctacttaaaatgtgggctgaagttccatgattccagctagtctggaataggtcatttaactggatgttaattcacctacattgttccctaagtgacatgtgggtcccattctgctgacatatttgtgggtcctggtaacaaccatttgggtagatttgctgattcctcttttctccttagtggaagagaaagccaatacccacctcctcttgggcatgtgcttagacgcctgtgctcgctaccttctgttctccaagcagccgtcacaggcacaaaggatgtatgaaaaagctctgcagatttctgaagaaatacaaggagaaagacacccacagaccattgtgctgatgagtgacctggctactaccctggatgcacagggccgctttgatgaggcctatatttatatgcaaagggcatcagatctggcaagacagataaatcatcctgagctacacatggtactcagtaatctagctgcagttttgatgcacagagaacgatatacacaagcaaaagagatctaccaggaagcactgaagcaagcaaagctgaaaaaagatgaaatttctgtacaacacattaaggaagagttggctgagctgtcaaagaaaagtagacctttgacaaattctgtcaagctctaaatccatttttgtgtagggagaataatgtcta

SEQ ID NO: 20199 - DNA, 835 bp, Homo sapiens
  misc_feature 1, 2, 834, 835: n = A,T,C or G
nnaagaagcagagaagcatgagagtgagagccatgtgaatatctggggaagggagagaatgcttcatgcataacacaacagcccgttcagaggccctgagacatgtttggggaacagcaaaaaggccactgcagcatgaacagagtctgtgaaaggcagaatggggctgcattacagtggtgcttgtaggttttgaacagaggagtgacatggtatcagtaactttttaaaaaatagggagattacttggagggcagttgcagtaacccagggagaggatgaccaaagtggtggtgatgaaagtgattgggttgaggacttgagtactagtggacgagtgggaagttaagttagaagaaaagggaagataaaagtagctagtagatgggcaattactaagccctggaacctctaataccatattgctagtggtaagatgatgagcaatgagactgaagaccacctcagaatggctttgtgtcataagctaagaagtttgagccttgtcctgaaaatgttgggataccattaaaaatcttctttaggggtcttctgctatggttttccctatttttattatctgatcatttgaattttgaaatccaaatatctcattttcttatatttaaagctacttccttaggtgtagtatacatgaatttttaatgtttaatatatcattggaccaaaatggtagaactattctaagaaagagtagggaactgacatttaagcacctactgggagccatgacctgtgtcaaacacgttttttaattctctcaatgatctattgagtgttcatctctgttttatagataaagaaagtgagcann

SEQ ID NO: 20200 - DNA, 774 bp, Homo sapiens
  misc_feature 774: n = A,T,C or G
tccaccgcggtggcggccgagtacactaggaaatgcaggaagaaaattatttgcccagatactgcaaagattttctagctatgtgagaaatgaaaatgcatttttgccatatttggtaaactgaatgttattaagaggacaaacctcatgtaaaaaggagataagcagaaactgatttgaatattattgcagagcaaagtaaataatcatgatgcattcaacctttataaatgtgcaaaaacagattaattttcccaattacaagccttaataatattaaatgactttaaacacatgaagtagggtaagaaatagatagcaatgataatacacgagtgtgttataagggatattaatgaataacttggttacacaaaagagggaggggatggagaaaaaagggaaaatgctggattaaagttaaacagatatcctgaatacttgtcatatccttaaaggctaatatacgttctgaatctctaaatacaaatagagtatacagtgttttctaaacttcttaaacccaaaaatactttgccaaagcgcctcgagagactaagagttgtgaggaatacataggtaaatgaatatctttccaattgacttagacttagagttaaactgaattgcacaggggcagtggctaatgcctataatcccagcactttgggaggctgaggcaggagaaccacttgaacccagggaggctgaggttgcaatgagccaagatcacatcattgcactccagcctgggcaacaagactgaagctccan

SEQ ID NO: 20201 - DNA, 3265 bp, Homo sapiens
actaaagggaataagcttgcggccgcggttttttttttttttttttgtatttatgctaaacctttattacttttagaaagctgtacacttttttaaaaaatttgcacttataaataatagaaaaaatattagaatcaaaatttcgtcattacagatgggaaaatatgtactataaggaattcaagttaacagaggcttgatttatataaaagaaagctgcagttttaaagttgtgttccttaaagaccagattatagcttatctgaatgggcttgacactttcaaatggaataaagttacaatattaaacagattagggtaagaaaatctaaatctggcacatctctattatttgacagtgtttaaccaaatacatcatacagaatagaaggtgagtgccaggcccctgaggaggagctctcgtgttccacagcaaagcgctgcccaaggactgcgggaagtgatccagctgccttcacacggaggacacgagactgcttcctcaagggctcctgcctgcctggacactggtgggaggcgctgtttagttggctgttttcagaggggtctttcggagggacctcctgctgcaggctggagtgtctttattcctggcgggagaccgcacattccactgctgaggctgtgggggcggtttatcaggcagtgataaacataagatgtcatttccttgactccggccttcaattttctctttggctgacgacggagtccgtggtgtcccgatgtaactgacccctgctccaaacgtgacatcactgatgctcttctcgggggtgctgatggcccgcttggtcacgtgctcaatctcgccattcgactcttgctccaaactgtatgaagacacctgactgcacgttttttctgggcttccagaatttaaagtgaaaggcagcactcctaagctccgactccgatgcctgctctttgactccacggctttcttgacagaattcaggattgcaatggtgctcagggacatgggcctggctttgggcagcaacctctgcaatggccctgtttcaggtgtaggagatgatactgctacatggccagcacttgccctgggtgtgcagggctggctcacggcaggtgacatggcagggttttcttggccagcaggaactggcactgtttctaaacacagggcaacctgtgccacaggtgccacctcagcacctccagccgtcccggccacatctgcatgttttgctagctcctgctcctggaccagctgttcctggtacttcttcatgtcatactcaagctctgatgccagctgtttgtcaactgcaaagaagtccttgagctcatctcggtaatcctgcatcacctccctgagatagtgcatgagttcccgcaaagctgggatcttatttttctccagcacagtcttcagggagatgataattggaataatattttctatgaaattcctcttctgaacttgtgagatgagcttcttctgagcttcctgcatgactacatttgccaaggccatgtcatcttcttccataaggaggtctttgtctggtttagatctcattgccaaaagcttgatctcctttgagctgaggacctcaaacgtgtctgagagtaactcactggcgtccaggtccaggggtaggatgccatcagcaaagcacgccaaaatactaaggcagattttggaagtgatgttgaatcgctgttcatctgtgaagtgctctagaagaaatttgtagattttcattcgtctctctttgtttgactttcccttcaatgaaaacagccgcttctctctctctgactgggggaacttgttgtacttctcatgcttctcatagttattaaagtgaaaaatacattcaatgaagtgttggaagaacatgacagggttcctcttcagtaacaggtgagccaggcaaaactccccgaagctggcaatgtctgggtgtgaatcgatcagagtgctgacaaatcggaagaacagggagcccttccatttcacaaattcctcctgcaagagattggtaagcaagatgagtgtctgcttccggatgaatgggtcggaatccttcagacacatggagatgttgggaatatacttgtccaccatgatggtgtagcgaatgcagagatcgcacattacaatgatgacgttgttgcggacagccacgtcctcacacacctcgagctctcgcaccagggctgggatgctcttctttgccagatcctcgtgctgtaagcacagcttacctaaggtaatgatggcatgtgctctaatcacagagggcatgacagaacctctgacctgggggggtggctgagacgctggggcctcactgctgccttgagatgatggtgagtggtcagcatcagcagacgaagccaggacggactgaatcagaaggaagatgcgcttctccaccctggctggacacagctgggctatatcccctaaggtaaaaatgtacttcaccaacaggtcttcgtccatattccctgttccattctccttgagaacgatgttggagaggcggtgctcgcaggtggagagtacatccccacacacctgcgtcagcaattcctgctcctctgctggtgtctctgcagatgctctacaaagcctctgcaaggcgtcaacagctgaactgatcacctctagagaccactgaaatccattcagcttacacttgacagcatcagtcactttgtcccgggtgctcttaggaagatgctttgcaatatgcccaatcacacagagaatatgtcctaaggtgtttgaattgggattctgctgactgctgattttctcccaagattgtattattctgctgtagtccagcctgggtgaggagccagcaatcttggagagcagcatccaggcaggtgccgaatgttccgtgccagtgtgagatattacattgtttataaaagtgggtgagaatttttctttcttggaccagatatgaaaagccttatttaaatatcggctcagttcctggctttcggtggtgaggagagtaagaagcgcccaggcgaggacctggctgtcgtccccagagtgaaaatgactgtgatgccggatgttctgcagcagcagctggtccaggaactccagggccttctcctgcacagtgctctcgcagtccatcaccaccgggaccaccccccgcaaccaggctttctggatctgcacgcatctaggctgagccataaggagttcagtaagagactggagggcctgcttccggacagacac

SEQ ID NO: 20202 - DNA, 491 bp, Homo sapiens
  misc_feature 1, 2, 3, 4, 5: n = A,T,C or G
nnnnnccgcccggtcagttaccttcataaagttctccagtttgttcctcttctgagatctcttcaagcttatttcttgcttgtgtgcctagatacttgggaagtgccatttgaggagatctcagagctgcagtggctgggtagtggagcccaaggagcgtcttcttgggcaagttccgggcggaagaggtggccatcaagaaagtgagagaacagaatgagacggatatcaagcatttgaggaagttgaagcaccctaacatcatcgcattcaagtaggtcaaggcttttttttttttaagaagtagacctattttctttcccccaatatatacacacaagtttctgctttgagagatatttcaaaagcattctctagacttagccctgtgctaggtgctttgggagggtatcaaggaactactaaattggagttgtgtcctcaggcatcttctaatccagtggttcgttttgcccaaagtatgggctaag

SEQ ID NO: 20203 - DNA, 2609 bp, Homo sapiens
  misc_feature 1, 2, 3, 4, 2609: n = A,T,C or G
nnnnagctatgtatacgtacgatgccgggtgttaatcaggccgcaggctgcgagcgctaatagtagtgatcagaaccaggactgtgacgctggcgtccaccttacgaggggacaatgaggacagagcaagagggctccatgtttaattactccaggctctgacttctgcccacaattacagagcatgaaagcagaattggcctttagttaagtgaaaaggaagctggctcctgcagccatataattgttataatttcgctatttatggacaacgagaaaaggacttcagatccactcatgttgttaagcacttgtccctcactccactggagcccccttcctatgttttgggcacagatggctggtgaccgagcaggaaagaggaagagcggctgccagagtgtgaatatacccctcagggatatacagcggagtttcatgataaactacccatactttcccaaaaaaggttgaggagcaatacataactttgcagattacaaacccttgttttactttttaaaccttttttccatactctgcttattggaaatcgatggctgtgatgtgaccaacacctgtgatgatagcaaagcccctcctttcacagtctcctgactgttcggggaacctccttggtcattggtagaaagctttagaaaagacttagctttttagggaagaactaaaaaatctccaaaacatactagtcccatgacttcgataactgaaaatgtcctgggtgtaaactaacccaggaatgtggatcatacatgttttttttaaaaaaaatccctgaatcaatattttcctacaacacaccctaaaattcctatttttgtaattaatggttggacagtgatcagccatttaaacataggctttctggaataaccagacactagaatagtttccaaagtgttttgcgtatcaaaatcctatatacttagaagaagaactcaggataagaaaaaatcgctaggtcccaaagggttcatgactatcatcagatgcaactgcgagtggcctacggtcattttttcaaatgagaagactggagagagagaacaacagtaatcacaaaacctctgttgcccttagtccatgacaatgtttaaggaaactttaaaaaattaagccatcttctgaattgttttctacaccaaatctaaaatattaaaatgaaattattaaatatttaaaatggggtatttagtggaaatgcaatcagtagaaaacattgctttttagtgcctgctaaacaagtaaaggagaaagaatgaagagaaaacagcagtccttcctgtgtgacactcgtgtggaaatgacaggcattcacatgtcattgagtgctaactcaaaagctaggtggcaatgctgtccaatgtttagagatcttttgaaatataattttaccaccattcagaggtaagtacttgcttaacagaagtctttaatgttagtgaatgaatgtataaaattataaactatgcattttcaaagagtagcatgtattttgtatcgaatccaagtaaatttttttcatagctacctaccacaactgcaaattattcaaaataaacttggatacatatccttatggggatatgggaagcccatctatattctcctacttgatgtttttaaagattgaaactttattctgaaacatcaggctctaaaaaattccatcattaagatgaataaatgggaaatggtttatttgttacttcgtaagcataaatgggaaatgttggctgttagaaaatgtgcccagttctttaaaggtggatgttctagtaacactggattaacaagcaaacaaaactgcatgaagtgaacgaatatttcattggataaagttagcataggttttatctgctgggtttaattctcaatcccagaaaaaaatattcttcaaggggtatcagttatagtttcaaagaacaaaatatgaaaatattgtccagcaaagcaaatcattgatcttttttcaaaattacttatattttggaaagtctatatagaatatccacaaatttcttcagccctcttgttgatttcatattttcatgaaactttttcccctaataatttgtcttcgctctttaatcagtgctttactacattactcagcctgaaaaaatatcttttccttcatctgacaatgtggaaataaagaactccatttctgtcattctggttctcttcagtgtccattgagaaagtttctcaactgtttgtaaaatacggggggaaaaaaacacgcatttctaaacctggtacttaaggttatactggattgtttgctacctaattagaagttattggggaaggggcattgtgtccttttatatgatttttagccaatcaggatgttctgttacacatttctggatacctgttgatggaatacagctgggggaggtcaggttgtaaacttctcctgattgtcaaagcatggtctggcagttttgccagatgataattgtgagttacaaaggggtttaaggtgtttcaaaattggtctttggtccagtgtgggaggtggtgtcaaaattttttacaagattattgggggaaacaaaatgtgtttaccggttgtatan

SEQ ID NO: 20204 - DNA, 822 bp, Homo sapiens; identical to SEQ ID NO: 20132
  misc_feature 1, 2: n = A,T,C or G

SEQ ID NO: 20205 - DNA, 984 bp, Homo sapiens
gcggggagcggagccctttacactacggtgtttccggcttcaagatggtcgcctaagctgtttagtgaaacttcttccacctttctccattcctctaggtgctttttctgaacctggatgtgaggcattaaaggatccgacggaaatagaattgaaggcattctaaaatggctaaccgtacagtgaaggatgcgcacagcatccatggcaccaaccctcaatatctggtggagaagatcattcgaacgcgaatctatgagtccaagtactggaaagaggagtgctttggacttacagctgaacttgtagtcgataaagccatggagttaaggtttgtgggtggcgtctatggtggcaacataaaaccaacaccctttctgtgtttaaccttgaagatgcttcaaattcaacccgagaaggatatcattgtagagtttatcaaaaatgaagatttcaagtatgtccgcatgctgggggcactttacatgaggctgacaggcactgcaattgattgctacaagtacttggaacctttgtacaatgactatcgaaaaatcaagagccagaaccgaaatggggagtttgaattgatgcatgttgatgagtttattgatgaactattgcacagtgagagagtctgtgatatcattctgccccgactacagaaacgctatgtattagaggaagctgagcaactggagcctcgagttagtgctctggaagaggacatggatgatgtggagtccagtgaagaggaagaagaggaggatgagaagttggaaagagtgccatcacctgatcaccgccggagaagctaccgagacttggacaagccccgtcgctctcccacactgcgctacaggaggagtaggagccggtctcccagaaggcggagtcgatcttccaaaaggagaagcccctcccctcgccgagaaaggcatcggagcaggagtccaagacgtcaccgcagcaggtcccgagatc

SEQ ID NO: 20206 - DNA, 529 bp, Homo sapiens
  misc_feature 1, 2, 3, 4, 5, 525, 526, 527, 528, 529: n = A,T,C or G
nnnnnccgaggtacaatgtgaaagcagccagcacctattcttggttgtggctgaaaggaaccacatggagatctcttgagcaggcctggaggtgaaatactcccctttattgcagctgttggttaatgaagatatgttgagggaatttcacagctctggcatcaggtaggagactcacactgattctgtatgattctgacccagttgtcaaaacatagtctcccagcaggactgtgctttgctccctggtgactgtattctccatttttacaaactgctgtttgcacaggaagcctgccttggtcttgcccttgtcctccaagattagcattcgactctgaactccaacatcaagcctgttccctggaaatcaatgacaggtttctttttgtccattggaactccttgcattgcctatttctattcttctgcccttagaacactgcactgactcatactgcatgcacattctcaaggccagctccttgcctgacccactccatgggtacctcggccgccaccgcnnnnn

SEQ ID NO: 20207 - DNA, 441 bp, Homo sapiens
  misc_feature 1, 2, 3, 423, 424, 425, 426, 427, 428, 429, 430, 431, 432,433, 434, 435, 436, 437, 438, 439, 440, 441: n = A,T,C or G
nnncggggttctcaaacacaaactaaatgaaaatgtgagagctctgctcacatctgacaggtctattggttgaagtttcaagtggcaactggtttgttagaaccagtctcttccagtgaagaaagttgttcactatttagcaaacgctaaggaggaagttcatgtaattcagataattcctatggtgtctccacagatactacgtggaaaagatggggagtagtgagagaaaacacaagaatatgtgaacccttcaggtctgtgagggatggaaggattgggattattggagaaaaataaggatagcattccagctgggcagatctaattcgagaataaacaggatgtgcctgtagatcaatgaaaagaaaggccaactggagtaggggtggcctgttggaatggtcagtttaaagcagttannnnnnnnnnnnnnnnnnn

SEQ ID NO: 20208 - DNA, 450 bp, Homo sapiens
  misc_feature 443, 444, 445, 446, 447, 448, 449, 450: n = A,T,C or G
actttgagaaggaaatactgggttgtaatcatggataaaatatgcaggggaggggaggagattatagatattaatatagagtttagggtggcattaggcaaggatgacatctgaatatctaacttccattttacattgccatgtaagtctttttgcccagtgggtttgggggacattgaggcagaactcctggaaaatagaaggaagtgaaaggtcactggtctctccaataatcttgatgggaaggactagacaacaccattagcaaaatgtgcctcttaaaaactcaagacacaagcattatcttcatctcactgaaataacagctacatcctttattaacatgagaaaatcgaaaagcttaagaaaattgtcctgaaattggaatattggtaataatttgccagaaccactaaatctactttctggaaacagtaaacacnnnnnnnn

SEQ ID NO: 20209 - DNA, 561 bp, Homo sapiens
  misc_feature 1, 2, 3, 4, 5, 6, 7, 8, 9, 147, 148, 149, 150, 151, 152,153, 154, 155, 156, 157, 158, 159, 160, 161, 162, 163, 164,165, 166, 167, 168, 169, 170: n = A,T,C or G
nnnnnnnnnccccagggggcaatttaccccccctaaaagggaaaaaaaaggggggccgggccccccccccgggggggggggtttaaaaaagtttaaattaaattcccccggcccggggggtcccctagttttaaaagggcccggggnnnnnnnnnnnnnnnnnnnnnnnncctttgttgactaagatctcagaagtatctgagaacttgggctgcgcagggaatgctggtgtgggagaagcaagccaactgagctgagctgcggccctgtttgtccttagctctccaaaacttgctgtctatgtcacttggaaggaatctgattcttttctgcaaggcactgacaataccttacaacagagctgggagataaaatgcagagcttgtgaaagtcatcagaaagttgaacacagatggtccccggcttaaaacggttcaacttgatgatttttcgacttgatgatggtgtgaacacgatacacattcagtagaaactgtatcgataagggctgctttattcaccagaagtgaaaaacacgatggttgtgtgagtatctgaagt

SEQ ID NO: 20210 - DNA, 898 bp, Homo sapiens
  misc_feature 898: n = A,T,C or G
tcgacccacgcgtccggatcaactctcacgtttgagtttgtcccattcatctacataaagactatctatcagtttgaagtgtctttttgagaatcagaaaggggagaggatatagggggcaaaggatgtattctttgagatcctgctcttaagcagtgattcttctctagcactccttatttctagaattttctagccatctctaacaaaagcaaagtgcaaagagcatttaatacaaaccaaaacatgaaatgatcttttgatagttcagcgttgtggctgtgacttggaatttttcactacattttaaaaaaaaaaagccacatatgcccgggtagtctctgcatcaagtctgataccattgctccgacgttatgaggctgaagcagttgtggctgattgatgtcactcttctagccatctcctatttccacagagagaggccgggttaatccaactccagtctaacttcggaggcatcaaggattctaggcagcatctcccgtgtttctttttccaagtgaattcctggaggaaaacaatgaggtccatgtgtctttgcatccccagggaccagctcagtaatgggcatataagaacacgctgaaaaaaattgttttgtttttgaacgacagcgatttaagagtagtaaggtcctcgtaaatataggacattgtactcgtgtttttcttccgagcatacaaatatttgcaatgaggttgcaccgcagactccacagccattgtggcacctggggctctgtgacttgggaggcagaggagatggaatgccggtgagaagaaggagattgtggtgtgaatgtgagggatgagggtgaattagcttcctacggcggctgttcaagtttaccacaagataaatgagttaaacggacgcn

SEQ ID NO: 20211 - DNA, 1115 bp, Homo sapiens
ctgagataaaaagaagggccaggatcctgggtctaggttgttcctgtttataaactaaatatccaattggggggggaggggggatccacaaaaaaaaaaactgccgtctgataaagacactgtaaaattctccacctttttattatagaaggcacaaacagcatttacccaatccatcaataactttatgttttcactatattgttcaaaggaaccactatcccttttgccttttttcttattaataagatcatcagaatggcatgatagtagagatattgttttctttatactctttgtgtgttttagaaaggcaatttcttcctttaattgatctaagttaagggaaatatccacctgaaaagcaaacgctattttccaaagcaatctgagagttttttctctgtgcctatccacaatatccttagatagaattgtatttccatgctcatcacttaattcaattcctcgtgatttaagaacttgaagaacaatgtcaacattgtgcatcttttgaagacgacttattgccggaatcctgagtttctttgagaggtcccagttctgtgtgagaagttccatggttcgcacaaggcgcactccacattgcaagtctacggcaagatttgtaacggcaaaatcaaattcatcaaatggtgtctgaacatggttaacaggtaatcccaataagccaaggtgacgggaaaggtcaccttcaccacttaggaaatctcgtgaaaaagccaaaaggatttctttactagccttgaattcggcatctttacagaagagacaaggatcatgatcaatgagtctggaaattttagcataatcaagaaaacagaccaacaacaataactttttcaatgtaaacttggacaaagcttcttcatgaccatctctatacaggtgaggaacagtggggtgtctatactcagctgctatatcaggattccaaagtaggcgattcagaataaacatagccaaccctgtgacatcactgttatcttccaaagatatgagttctccataagttgtctctagaccaattcgaagccacaaaggattgtaggacaacagccaattcaggactttcaaacgttctccccacgcgt

SEQ ID NO: 20212 - DNA, 1712 bp, Homo sapiens
  misc_feature 1, 1693, 1698, 1705, 1711, 1712: n = A,T,C or G
ncgtccgggcaggtttctggagaaattgtgcgagtccaatttggagttttaagttccttgattgatgaaactaaaaaggcaattttggaaaaagagagggggaaaagtagatcacttatcttagcaaacggttgaaaatatgtctgtcctctgtggccccaaatccagtgaaagaaattctcccagtaaaagttgcttcctaactctgtttttctcagaatacctcttacctttcccaaagaaagcttcaaccaccatcatcagaaagaaggtggcctaaaaactgacacatggccagtgcccggaggggtctggaggcataagtctagatgcccagagagcatccaggcactgaactgctcagagcttgagatgaaatgacatacaagcttcagggtaaaactgtctactagcaagattacctccctcaattctaccattgcagatttcttctgaccccaaatgcaaccttacagagaatgctgaatgaggaaggccaattccttacaatgatggcagaacccccaagcgaatgccctattgaggagaaggacatcactgtatttggaattctgcctgctagtgatagctcacacatcacatcccagaatcccactcccaatgcattatttcctgaggcaagaacttaaggtcctcacctaattcctccatcacaaccattaactcttattggacaagctcctcctgtgagtggggcctgtactcacttcctcttagatcataattccatcttcaagagactgatttccagaatagtaatctttttccagcgttctctcttctccaatgccctggttgttatttttcccacctctcctaatattgatcttcttgtcttttggttagaactgcaacttcggagtcgagttcatttcctattgctgctcaattcagtagcaacatagctggcttgttcccagacccaggaagtataagtcattgacagtttcctgagtggctctgccaatccataccacccttggtactgtgaaaaggcttcttgggcaagccaggtggcattgaggatggtattcagggcgctttccttctgtcatatagttgtgggatctctaccaagtgtgaaggtgaatgaggtaagggagatcagaaccatgcttcctggtttttcatacatccaaggaagaagtcctggtgtgggttgtttgacaccttctttccactttcaccttttattttttattccttcctttctacccccaaccagtcgagcaaatgagcaattttgtgtttctaatacaggatctggaagtagtgctttctaatcctcatttcctgtaggatgttcctgcactataacaagattatgttttcttccttctgcagcagctttctgcttcttgggtactactagctattgttcaattcaggtgaggcctgtgatgacatatatgtagcatgtgctctgcgctccctgcaagctgagcagatacaaccaatgcatcactgtatactcttgctgagaatgtggatgcagcctcacagatctttgcaacactccaaccagccagggaccagttgatcagaactgatcttattggtctgataaccaatcttatttgtgaactgattcatatctgtctttccactcttggttctcttgccgtaggaacaaaaacagtttagggaaggcataattacggacatttagggnaccantatgttntaaggnn

SEQ ID NO: 20213 - DNA, 445 bp, Homo sapiens; identical to SEQ ID NO: 20171
  misc_feature 442, 443, 444, 445: n = A,T,C or G

SEQ ID NO: 20214 - DNA, 386 bp, Homo sapiens
  misc_feature 381, 382, 383, 384, 385, 386: n = A,T,C or G
atttattgagcttttatcaggcactgcagtcagtgctagggatataaaaatgagtacacagctttagtcagttttgcctctgcagtatggaggaagctattgcctttggatattttgaaagatctttttgcctttagaaccctatcatattcctatctctgctttgaggaatctcaatgtggtgcataattggttatcattcagtccttttaaatcaataacagccacatactttaaagattctattctgaagggcacatctcaatggccgtcaaagctgtggtttactgttttgatgccacatgaagctaagttgtatatcctttctcagttccttgtcatatttggtctttttttatattatctttttctggatcacannnnnn

SEQ ID NO: 20215 - DNA, 346 bp, Homo sapiens
  misc_feature 341, 342, 343, 344, 345, 346: n = A,T,C or G
acaaggagtagtctaaaacaagtgactttactacttattcttctgcatgtccttaccagcttcttaccttcttcaggttgagcatgagatcagcttcacagcggatgggtccttaagggtttttttccatactagtttcagccttaacaatgagttttcaacccttaaacatgaaaaataaatagtgcgaaagaggggaggatggtagaaatgctttaaaattaccttttgtaaattttactttgtttatgttttaattgtgccttgcttatcaggaagtcctacaaacaaagatctccacggcttctcaggtctcccaaggaacaggttcccctgttccnnnnnn

SEQ ID NO: 20216 - DNA, 962 bp, Homo sapiens
  misc_feature 1, 2, 3: n = A,T,C or G
nnnaaatcctttagggccacctgtacctgcccgggcggccgcccgggcaggtacactgtgaaaactgaatttggagcacagctaggtcggcatccagggacctcttggctggcagtaatttctgggtcacacaaatttgtctttgcttctcagcaatcttcattttcaggaattggatcttttcttccagtagatgtatttcaatttctccatttagtttcatcttctcttggatatttattttttcataaaaaatgcatatttcttcttcccgctctatcagctgaacgccactatggtcaaattcagaggcagaggctaagtgggcattgagaccaccgttttactagtcattgtggttccctctggctttggatgcaagatatacacaacatagcatacttccagaggatcacagatagtcaccaatggctttctagttaaattacatccacactttggaattctctagggataggagggttactgagcctctcaactttgaggctgaccatgtggttggctagccacaatgtctctgaaagtcccaaaggttttcctggggtgggaaagaatgtcattcccaatgcacaaacaaagtgatcccatagtctgattttctgcagatccttttctcgggtcagacttgccaaccaaggcctggccagaagcacacaggcagggggccagggaatgtagttctggtgtgagtctgctctatattaagttgctaggcccattagtttcttctcaagttgaatatttctggttgtgatttccccataaacaggcaaaaatctatcctttgtaatcatgccaggagaaagacccctccttgaatggagaatatggggaggaaacaaagtaagaatgttctaaccccagcagctctggtctgcatggccgatcatgcaccactgatctgagtggcacctgggtgcacactgtttgtccccccgcgt

SEQ ID NO: 20217 - DNA, 478 bp, Homo sapiens
  misc_feature 476, 477, 478: n = A,T,C or G
cgtctgtgaagtatttctggaggacatagtgtgagaatttctgtcagcctcagtaactccctgtgccattccagatccctggtgggcctcacttttcctttatctcctctccaggcttcttaactacatgccagcattatcacatactctaaatcatttcaggatatcatcggcatgaacggttcctattcaaaataaggctctctgaatgatttaccattctttttatgagtctctggtgcctagataccatggtttctgtgatctgtgatgatggtgttgaaagaatgtgcattctcaaatacttcttaaaatattgtttggctagataggaactaggtattttaactaccaattgtcaaatagtaaaagctttcttttagcctcagaatttctgtttttataaaagtttggtatgctagctaaggagtgttctagttatggttgtctttggtgaaatgacactaacagtacannn

SEQ ID NO: 20218 - DNA, 543 bp, Homo sapiens
  misc_feature 1, 2, 3, 4, 5, 541, 542, 543: n = A,T,C or G
nnnnnagcccccgcccgggtcttgtacaaggaagactggctgaagaagaagctgagaacaaagcaggtctacagaggaagaagcagtgactagcctggtccctgaaccgggtgaaatgggaaagtagctctggctccccactgccaaaaggcctcagtgatcttgctgtttggggttattagagcaccttttacccttttcaacaaagcccaattttacttaatctagttagaatttctactccttgaaaccaagagagacaaagcaaaatcaactataatttaaccattcctcctactttgagagcatgtaggttatttttaattttttgattaccctatgtgatgctatagtgaacatttctgaatacaaattcttgtttgcatttctagttatttccttaagatatatatgtatgtggaattaaaagatacaaacattaaatccttgataaactattccaaaagggttagtgcacaccatcaacttacttcaccagacacagtgtacctgcccgggcggccggccaccgcggtggagnnn

SEQ ID NO: 20219 - DNA, 454 bp, Homo sapiens
  misc_feature 451, 452, 453, 454: n = A,T,C or G
acatgggagtttgttttcatattctgtctccttttggaaatgtttgagattttccagtgtcttctttctccagtgtgctgagctattggtctgcccaaaaatctgatgttttccctttgttcccatgcagtgttccaagagctgccagggtggctttcgggtccgggaagtgcggtgtctgtctgatgacatgactctaagtaacctctgtgaccctcagttgaaaccagaagagagagaatcttgtaaccctcaggactgtgtccctgaagttggtaagtagagatttcaatcatgggggaaaggttttgtgttttttaagcttgtcagattctccggtgtgacaataacaagcctcttttaggtctttctgtgaccttgcacacagtcatggagttcagagggttgaggtgcttttggtattataaatttcatggtttaagatgatcannnn

SEQ ID NO: 20220 - DNA, 625 bp, Homo sapiens
  misc_feature 1, 2, 625: n = A,T,C or G
nnactgtatactctctgttgtccccttttgatggtgtggcatacggggagctactcttgctgcccagcatcgtgagagtgtatcattctgcatgtcactagctaggaagtgagcagaattcaaaactcaagtatggtttgaatgtgcattgctgtcacattattgcaaaatcagaaaatcctaagtcagggactgcctgtatgtgggaggaaaacaatggagtgagttttgtgaattgctctgggctgataagggtccagagaccccgtgtgtaaaggagaatttatatactgcccatataaataaagaaaagggaaaggatagacagagctttttctctgtttgctgctgcttgttaattgtctgctttaactgtcttcccagaaataatttttatgtcagagtcatattttggtgttaacatagtatcctgtgatagtcaattttaaatcaggaagtatgagttctcctcctgtccctttgttcttttttaaaattagtttggctattctgggtcccttgtatttccatatgaattttaagattaattgccaatttctgcaagaaaaaaatagccatcttggatttataatagggattatactgtacctcggccgccaccgcn

SEQ ID NO: 20221 - DNA, 430 bp, Homo sapiens; identical to SEQ ID NO: 20188

SEQ ID NO: 20222 - DNA, 459 bp, Homo sapiens
  misc_feature 1, 459: n = A,T,C or G
ncttcatctgtgaaatgtggatgattgattccctacctcatggtgttgtgatgaggatttcttgagaggatgacctagtagtgcccttggcatggttcctgtcacttagtcagtgctctgtgatcagcagctggtattattataacagttcatcatgcatctgtcttcccacctgaaacgtgggacaataacccctgtcatactggcttgaaggacatggtgtcgtctgtgtgagctgtggggtcagtatagctggcatttctgccactcgaaggccagcccaaccctacaggggtaaggagacacacccagttcccagcaccaggggaagctggatgacagcttcaatccatcaatgataggcctcagtccagcctaactttatggactgcagaggtacttaagtctgtgggggttgaagtctagcccagttcatcttccacacgggctgctgcccan

SEQ ID NO: 20223 - DNA, 1717 bp, Homo sapiens
  misc_feature 1, 2, 1690, 1691, 1692, 1693, 1694, 1695, 1696, 1697, 1698,1699, 1700, 1701, 1702, 1703, 1704, 1705, 1706, 1707, 1708,1709, 1710, 1711, 1712, 1713, 1714, 1715, 1716, 1717: n = A,T,C or G
nnagctaagctgtttccagggtgacagagtggcgacctcggtggtcgattgagcaggtctgagaattgttcccaaagggttgtgcgtcacctgtgcgtcaccgagtcgttggcgctgtcatggcgggtgtgctgaagaagaccactggccttgtgggattggctgtgtgcaatactcctcacgagaggctaagaatattgtacacaaagattcttgatgttcttgaggaaatccctaaaaatgcagcatatagaaagtatacagaacagattacaaatgagaagctggctatggttaaagcggaaccagatgttaaaaaattagaagaccaacttcaaggcggtcaattagaagaggtgattcttcaggctgaacatgaactaaatctggcaagaaaaatgagggaatggaaactatgggagccattagtggaagagcctcctgccgatcagtggaaatggccaatataattattaagtgactttggtgtgttcatgggaaactgatgtaattaaatattctgttatattaagagcgtgttcttattactgacattttgtaatcaagaaaagtgatatagaaaatatgtaggagactgttaaaattggtgattatggtaatatggtcatgtgaatcaatttttgatttataaagtactcacacaagttgtttcaaagatgatatttctgtgaacagagaggccatgggaagatttgaaattattaagaaaaattcctacagattttcaatgcgagacataatcaaaagtaaacttctttagtagtatgttcaatactcattaatttaagtatcctgaagagaaggccttaatattaagctaaacaaatttatagattactgtttgaagtaaataatacgagtgaatattttcaaatgtgataaaatagcacaagtggctggtgataaaatttgaaattatggttaacctcagctgtgatcttatgtatgtaaagtgaaatttaaatagataattataggttgattacaaaatccatagtgtcattttattttagtcattattgaattataccatttactctgttttcttatagtcttaattttattatattttgttgttactgtattatatttgaaaaccttcaaattagaatacattgtacagttaaagaaattgacttggtacttaaaagaaagatttcccattgcatacaggttattggagaaattttccttttgttgcatttgtggaagttagttttctggcccgtggcctttaattttcttaatcaacctaattacatcaggatagaggtagagtttctgtaaaagaagagacattaagagttcctgaaatttatatctggcatacggataggcttatattcaaaacatcttagtcatacgaccataaattaaaagtggagtcactaaatagtttgcagtacgtttctaatataagtgtaggtgggtatcaaaacaagacaaatgctgttcagggaaagaagttggcaagcttaaggttaaacaaaaataaaattacatgtgttttcgccttcctaaaaaaaaaaaaaaaaaaaatgggggggcgggaccgagagtttaaaacatctggggccgggccagtaaggaatgttacgcgcagacacggcgaggggggtgcccaaaaaccggagggtcgaaaccggctggtctgtctcagcgtcccccnnnnnnnnnnnnnnnnnnnnnnnnnnnn

SEQ ID NO: 20224 - DNA, 774 bp, Homo sapiens; identical to SEQ ID NO: 20200
  misc_feature 774: n = A,T,C or G

SEQ ID NO: 20225 - DNA, 699 bp, Homo sapiens
  misc_feature 1, 2, 699: n = A,T,C or G
nnctggtttgagaaggaggtgaaggcaggagctatatgactaccaggagaagactgccgcaggaatagccggggcacaggccctaacgtacccaggaccaacagggacggccgggtggcttgagcaagagagtgatcagtgagtaggagaaggcagcaggagaagctagagacgactgaactttacaggccacaaaagactaaggctttgggggaggaagaggacgagaaaaagactaaacatacaaaagattttttaaaacaaaggttctggcgtgttcttattctcagaggatggggtagccatgaaagggccctgggtgcagggtgacaggccctgtctatgttaccggctgccaggctgagaatagacaagggatcacaaatgctccattatctagccttatattcaggaaaacaacaacaaaggctcagacctgggcaatagtaccagcagcaatggcatgtggctggactctcaaaagcatctgtgaaggactgcaacagactgcacaaagtgtctacagacaccagccaaaatacgttcaagttttccaggttcaatcagttgctcctgtctcagataggcaggtctgtggtacgcaagacttgaggatcgtgagcaattggactacagatggccgagacctaccgtcggggatctctaatgactgcggttcaggtggctgcgcgtataacn

SEQ ID NO: 20226 - DNA, 2062 bp, Homo sapiens
  misc_feature 1, 2, 3, 4, 5, 6, 7: n = A,T,C or G
nnnnnnncctctttgttttacctacttgatcattctttttatttttacaaagcatggcaaaatgaggaaaccactgacaggtgaagaatttgcacaatggaaaaccaccttgaccatctcatgactttatacaggaatcggaggtaagtgttcctttaaagtgattttgtcatgaaagagtcatctgaaatgactctcgtgatggaggaaaggaaagtaatgaaatcaacattcatggttatttaaaatgccttaaaagctaagcataatatacatagtaactccttttcctagtataaaaatagtgccagaaactatatttgttcaaatatattgaaaaggtataagaatacaaatagatattaacagtggctagtgatgcctcataaggttttcttaaactgtaatataaatttatattttcaactatttacattgctttcaacaacattcattaagacatgtttacacaggcttttagtaagtatatggaatggtaaagtgagctttaatactttcttcttcactctctgtagtagagcagaaggggtccaaaaccatgcacaatttaacagtccagaagaactgtgtaatctttacctggctagcacatggaaaaaataaactatatacaagaatacaaaactcctaaagtgttcttcaactatcagcaggttaagtgattcatacttgcaaaaagacaggatgtttgtttactggtagattcttagtaagtttcaggtaaagaaggtgcataaaacatatgttattgatgaaaatggaaatgatgcagtataccccatgttctcacattaaattggcagtatcagaagctaagtctcttctctagcacctccttcagggaccgtgagctccttggggtcactgctctgtctccacagcagagcacggtacctaacatgtggcaggactcaataaaaggtgggtcagtgtatttctgatacaaaacaattaaattgtgccaccttattttgactacagttgttcataagagaggataacgatgacattttgtatcctctcatattaaatcaatcttgtaaacaaaagacaattgcttgtgatggcctgttaagttttaggagtacaatctggtgaaaaacacagaaaaaaattgtagatcaaattggaacaggtctaatatttatttgctatgctgaaaataaaggcacttcactgctaggcaagaatatatctgtgactgaacagttttctccaagaatccaatatttccagtatattttcatatactttcttatctctaatactcctattaaaggaaactattattcaaaattaagagacagtggtgacaacatcatcatcctgggtttgtaccttgaagcaatatactcaatgagctctaaatctcacattcactagtgatctgcaagtgaagctgaataaatatattctctttgttcagtcatggaaactcaacattagaaatgacatgtgggaatagatcaccttctctctagactaatatcccatttctgacagtggtctccatggcccattggggcttataaagtagctgccttctgtgacattctgcttgaagacaaaggctttgcccaaacataactccttttaaaaaagcacaacttgtttaggcacacagaggttaagtgacttacacaaatccacccaggattgtgattggcacggtctaatctactgaaaaatataaggccaggcaattatatagatatcttttaacaagttagtaaaatagtggggacttttctggctaaaaattgtaattaaatggtatgttactctgttataactaaacaaacaaaaaatctagaacaagaacttcttgctagttatgggtaatataaatacagagtaaggtgaaggaggactgtatgtatatttttccaacttgagaagatactagaaaggaaattaaaaattatttgaaccaattaaccagccctaaagaagtacctgcccgggcggccgcccgggcaggtacgctttccggaatttcgagggtccgtcagggctgaagacctgcccaggcacacaactc

SEQ ID NO: 20227 - DNA, 412 bp, Homo sapiens
  misc_feature 390, 391, 392, 393, 394, 395, 396, 397, 398, 399, 400, 401,402, 403, 404, 405, 406, 407, 408, 409, 410, 411, 412: n = A,T,C or G
actgaagattttgcaccatcactgttgtttttctcataaattctttatgaggctattagtctctagggtgctcttctgaaaccagaaggaaatttggctcacacacacacacaaaaaaagttgccatataaaggcaactgcaaaatatagtgggaagttggtggaggatggagtttcactgagaatgggacagcaacatgatggaaagaacatgaacttgaatttcagttctaccacttactagaaagatgcctttgaacaagtctcaatttctgaatcttcatttgttgctctgtaaaatggggtcatattatctcacaaagttgtcacaataattaaaatgagatcttgttttctaagtcacctgacatatattaagtgtgaaatcannnnnnnnnnnnnnnnnnnnnnn

SEQ ID NO: 20228 - DNA, 338 bp, Homo sapiens; identical to SEQ ID NO: 20091
  misc_feature 338: n = A,T,C or G

SEQ ID NO: 20229 - DNA, 616 bp, Homo sapiens; identical to SEQ ID NO: 20115
  misc_feature 613, 614, 615, 616: n = A,T,C or G

SEQ ID NO: 20230 - DNA, 746 bp, Homo sapiens
  misc_feature 741, 742, 743, 744, 745, 746: n = A,T,C or G
acttctggagagtaacaaggctgaatgggaagagaggagccaagcagcccaagacgggaggcactgtctgagccaggctgaggcattttccctcaatcctcacgttactgaggcggcctggaagctgtctaagttgggagggcacgtttattcttcaatcaatcatgtttgttcttcagagggatcactcaatcagctgcaaggaagatgaatttgaaggggtaaaatcagaggcagctatccagttcagaaagctcctcactcacaattacagagaaagataaacaaggcctgagaaccgaggcattgctaagacaagagaggcgcttacctgaggaaattaaaaggtaggattttaatgctgttttacagtatcttaatgatgtgctagtaaaccttacctatgaatacaaataaatggagaagtaaacaggaaatggatagaatacagtccttacaattcttcagtgtagaggccactttatttcaataaaccccattgaaactctatgcgtgcctgtgtgtgtgtaacagacgcagttcatttaagagttatttgtgttgctgtccagctaaggagtgtttattccctagggatcaaggtacccaaatctggcaaactccaaagcagtgagaaggatgaggactgcttggtgctcaggtgctcatcttggagcctcattcttttttttttatgggggggcccctcaaaatccacccggagggtttgaaccttgggcnnnnnn

SEQ ID NO: 20231 - DNA, 1407 bp, Homo sapiens
  misc_feature 1, 2, 3, 4, 5, 6, 7, 8, 9, 10, 11, 14, 19, 1402, 1403, 1404,1405, 1406, 1407: n = A,T,C or G
nnnnnnnnnnngcngccangatgccagccattgtcacagcaccatatcccaatgagcttgtacttgaatacggtgttagagagctgctttcttatcaccaagtgcatgtcatcctggatgtggctgctggcttcattctgtttgctaaatgccagtgtgctgagaacatagaagagttttcgtatttgctgagggggtatgttatccagataatctaaaatgccctttacaaagacagcattcatcatcatagcagatgggtttaacactaccaactctagaaggacatctaaggcagtatcaacttcagcttcattcccactgcagatatgggtcactaaggcaccaaccacttcctgctggcagtacgtgtcaaaaaacttaaatgcatatttgtataggagactgccaaatgaaattatactctggtctagagagtgaagcaacctctgagccagcgacagaatggatgaacacatatccttaagaattaagtaatgccagagaatgattctgaagcagctgtcttgaatgcagcctgatcgaatcttatttcttagcaccctgtcaatgtacttcttggtctgagtattggtgctatagatgatgaaaagcatcaccaggtcaaacaccttgtgttcagatactgaggcagtgttttcaattgccttaatccaggcttctgaaatggttttctcatatctaatagctgactttattacatcaaagaggagaataatacagctctgaccgctgctttcttgatttcctgaggaacttgctcgtcctttacttttcaactttacttgggaagcctgtaaccgtgatggcaaaacacaatgctgcagatccaacttctcccgaagctcagaaattacctcaagtgtatccatggctgttacggaatgaagaatgaactttattatcacaggtaaatcctccaatctaatagacgacaacttatccatcaccaactggcgaaccttcaataggaagtttgggtcaagtcggaggcttgaaaggacatccaggattgggacagtgagtgaagtattctctatcagtaggtcactgagttctttccccacatcagcgtgctgggaatcccctaggatctcaggtaggctggtgatgatgtcatgctgcaggttctctggagcaatactgatcagctgcatgatcttggtggtgaggtccttgccatccacaactctgtcaagccattttagttgactgacaatgagtcgaggtatgttgatttcatcactgttcttgttttcaaaaaaatattctggcaacttctcaaataaggttttgataatggcaggctgcagtatgtcaatccccagaagcagtttgatgagactcttagaataagatgcacccatctggccgaacgcgnnnnnn

SEQ ID NO: 20232 - DNA, 867 bp, Homo sapiens
  misc_feature 1, 2, 3, 4, 5, 6, 867: n = A,T,C or G
nnnnnnaattggtgttaatatgtaattacagttttcattgggctttatggggtttatatctgcgttccagaaattgttgtttcctttctaaatctctaaacttttaccattactggaaaacaccaacagagggcatcaggatttaattctggggagagagcattacttctttaaatcaccatagcactgtgtgcaagccactttctctgagtgattcttcagctttaaaatggagtgatggcaaagaacgtatgttatttcctccatgaaacactacttcttaagagctcaagtccagaacccttcgactgagcagacataaaagtcagcctggatggctaccaccactaatcagatttgtctgctgatgcaaggcccttcagtcattccagaactggtaaatggagtcaccctgaggacaggccctgctgctgattgatgtccagtgtgggcagctctcttggctgctcaacattcagagaggctctccttgtttcagtgctaaatgattgacagtcagggtgagtatttcaggaggaagagtcccccgcccactccagccatgtggcaaaggtatttgcttccttgggaaggaagtgatttatctgtgggagaacactgtttgggcaaagttgcgtaggaacagcgtctgtctctgcaagcatgtgtgtatgtgagtgtgggcataaagcagcaagagtggaaggtaaagacaacgtgaacgtcataaaagaacacttctttttacaaatgcttgaaaacattcgatgctgaaagacttcagaccacataaatgaatttgcacctaattcaacatagctatacttctttctttttcagaattaatgagcctgccttatcattagn

SEQ ID NO: 20233 - DNA, 825 bp, Homo sapiens
  misc_feature 825: n = A,T,C or G
tccaccgcggtggccggccgcccgggcaggtacgtaacaggacatcaataaatattagttgaatggaagattaaatcaacaaaatggtgagttcctgatgatcataggtatgtgccacctgggttctattccagtaaggaatgggagattggctgccggaggcaagaacgtgtttcatttacatttacgcatttgaccctgaaaaatgtcaccagattttacaagttatttacaatggtgtcttggaatgactgcaggctcgtaaataaccaggaaagataaggctgaaaaaaaaaaaaaacagttgaagaatcagttgcttgttttaaaaactcatttcacaatgcgttattttcttaccaaagaggcaggaagctcaatgtctataaaactttaaagtaagcatttccctttaaaatgaagacacactcttaaacctctctgtgaaccaatctctccataaaaatttatgatgtatttgaattagagcatgctaatttaagtgtgatgcacaaagagcactgcaaaggaaaaaacaaaccttaattttatttaatctcaaataataactaataattgcacaagaaataatcaggatctttgaaaatataagccgtcatttacattgccattggtagcttaaatgtgtagcccagcaatcagaacaaggagtcaaagtttcttttcaaggatctgaaataaaaaggcaaatagcaaagcatgtgcccaaacagccggcttggagtaactccctgtcccaggatgctcaatgcctttgtaaaagaaatatcaatcgggaatgttcttctaacataaataagctan

SEQ ID NO: 20234 - DNA, 389 bp, Homo sapiens; identical to SEQ ID NO: 20139
  misc_feature 1, 2, 17, 389: n = A,T,C or G

SEQ ID NO: 20235 - DNA, 625 bp, Homo sapiens; identical to SEQ ID NO: 20220
  misc_feature 1, 2, 625: n = A,T,C or G

SEQ ID NO: 20236 - DNA, 569 bp, Homo sapiens
  misc_feature 567, 568, 569: n = A,T,C or G
acttagcatgctttcaacaataaattctctgacaaaccctaagtgtaactcagaaaaaagctacactaactaaatgcagattgaattaacataatctcccataatcagaagtttcctaaagacttttcatttttctttgttaacatttatgtctataatacctattgtcattactcctaagaaatccaactttaaaatataacaagcaagttttttgcaatgaaattggcagagtaagagttttataaccaaagggatctgtgtttaaattatgcactctctgccactttgtatctatgtgactgtaagaaactcactccatctctaagagtcagacaaactcataaaaatagcttatttggattagaaatgatacttgtttggatttcaaaggacagacacatattgaagcattagtatatccatttcaaaagtgacattcaacaccaacatttcgcaataataaaaacacagcttaatatgagactaatcattaacactatgaattctaattctgcaaaaaagttataatttaaaaaatttcaaattcagccgggtgcagtggcnnn

SEQ ID NO: 20237 - DNA, 307 bp, Homo sapiens
acatgagtgtattccgtttattaatgaatatatgtgcacagcaggcctgagttgctcaaaccctgcacatgccaaagacaggcccttgaccagctcctgagagagaacctctaagcccttggaatatgccacctgataagagtgtttgtttatgctgaggtcttgggccacgcagtattggtttggcttctgggatggtaaagggagagtagctggcgtcactcatgtgggagctgcgtacctagacgagagaccccagtaaaaaccctggacaccaaatcttgggtgagcatctctggttggcagt

SEQ ID NO: 20238 - DNA, 1115 bp, Homo sapiens; identical to SEQ ID NO: 20211

SEQ ID NO: 20239 - DNA, 825 bp, Homo sapiens; identical to SEQ ID NO: 20233
  misc_feature 825: n = A,T,C or G

SEQ ID NO: 20240 - DNA, 498 bp, Homo sapiens; identical to SEQ ID NO: 20082
  misc_feature 1, 2, 3, 4, 497, 498: n = A,T,C or G

SEQ ID NO: 20241 - DNA, 1214 bp, Homo sapiens; identical to SEQ ID NO: 20119

SEQ ID NO: 20242 - DNA, 716 bp, Homo sapiens
  misc_feature 1, 2, 716: n = A,T,C or G
nngttctgttgcctagtactatagtcaggtcactccgctattgcttcctatcttactttacagcctctttcattctatgcctatttaatttcactcattgctttattcctgtgtccttcagctgtttccaatctgcccttcatggccatgactaaatacaatatgtgtaacatacaaaggtacgttaacatacaaggtatgtaaatgaaaatcaatgcacttgtcatttcagcacaattccttattgcttacattcaacattttaaatacattttatttaaacactaataacttttgttcttgtcttggaagtctaatgatcttcttggctccctgcccctacagccctctaatcttcacagccgtggccacttagcccccatctggaggttcaggcttattctgcatcttggagctaatcttgtccctatgctgggggcatacaagatatcatagccaagagctaactgatttagcactcagctttgctgctggtttcattctgatcttgtaatttatttctcagatgtaggctatgcttctcccagcaacttgtaaccaaggcttggctttgtataccagttgcaatatctatccaggctttcctgtttcagttcttgacgagtttttctgattgacaccaatttctccatgactaaggttctcctttgtccttctccttgtctcatttgtaactgaatttattttttgaaggn

SEQ ID NO: 20243 - DNA, 1380 bp, Homo sapiens; identical to SEQ ID NO: 20118
  misc_feature 1380: n = A,T,C or G

SEQ ID NO: 20244 - DNA, 1008 bp, Homo sapiens
  misc_feature 1, 2, 3, 4, 5, 6, 7, 8, 9, 10, 11, 12, 13, 14, 15, 16, 17,1007, 1008: n = A,T,C or G
nnnnnnnnnnnnnnnnnatgaacgctaaatgaatgggtttaatgagatgctacttgtctgagtaaaaggccggcacattcggttgactggggaagtccttctgcattaattacaataagtaatactcattgaaaactttccttatttacacacagttgaacagttattctaagaaaccattttcccaccctatttaatattgacagatttcttcagttagaaacaaaaactcaaaacacacgcaatcctaaagaactcatctatgtcccccttatctcccctcatcttatgtagtccctaaaacagggcttgctgccctttcttcttcttgccttttcagcagatgagtcaaggttgcagaggtggcagtcaaccatagagtcacagagtttgatttttttccatccatcaggtcgtagaagctgccactgagcctgacaagagttggtactcaaaaatgcagaatgaattagtttgaatgaggtgattaaggattaatgagtagtggttaaggaaacaaagaccattagtggatggggtaatattgctgtattactgatggaagcaggattctctaaaaaaactttctgcagccatttacttacatacattttaaagagttactacaagatattttaaaaatttaaacagttaatacaagaaaaatatgaagtgaatagttcatgacactaaactgaactgttcatgacacaaagtatcttagaaaacaaatctcggctgggccagcactttgtgaggtcaaggccagcagatgacttgaggtcaggattttgagaccagcctggccaacatggagaaaccacatctctactaaaaatacaaaaaaattagccaggcatggtggctggtgcctgtaatcccagctactggggaggctgagattacagatgggagccaccgcccccagctgacttaccttcttaacctcacttccaagcactttcttctaggttgtccacaatctagctatgcttgtcagtcggacnn

SEQ ID NO: 20245 - DNA, 629 bp, Homo sapiens
  misc_feature 1, 2, 3, 4, 5, 626, 627, 628, 629: n = A,T,C or G
nnnnnctgaggcaaatctctaaataggatatttcccatggaaacctccaggaaggtacccatatgactgagaagggcacaggaagcaaagaaatgcttttaaatgtagccatgcacaaatcatgtgtctcctatacattccgagttgaaaagtaatttccaattttaaaaaaaatacacagaggtatgaattcatacatactcacacgtatatgtacacataaacacacacatatgtatgcatacgcacatatatgagatagaaatttctcctttaagtgccactctgtaggacctaagatatttctggattttgtttgtttatttttgttttacatctgtgagttggtatcaacttacctagcaaagtaaggggagaggcgcagaaaaaaggcgccttggcactttctggaaactagccacctttgactcaccttctgcctccagctcccagactcaggctctgagattagcaaggaataaatctccctgcctgcaggcagggtcacattcacaccctccgacactcagaatctgctccctttacaaagtcttagaaaactgaatccccggactgtctttacagccaatttggatgtttaccaacactcaggggaaagaaatcannnn

SEQ ID NO: 20246 - DNA, 929 bp, Homo sapiens; identical to SEQ ID NO: 20094
  misc_feature 1, 2, 3, 4, 5, 6, 7, 8, 9, 10, 11, 12, 13, 14, 15, 16, 17,18, 19, 20, 926, 927, 928, 929: n = A,T,C or G

SEQ ID NO: 20247 - DNA, 434 bp, Homo sapiens
  misc_feature 1, 2, 3, 26: n = A,T,C or G
nnnactcactattagggcgaattggnagctccaccgcggtggcggcccgaggtaccaactgaaaaataagacaaccaatcccatcatggtgccaaccactctagttgtcttgggcaagtcacttatttatccatcttggctttcttgctcaaaaatgatggatagctacacctcacagtgaggattcagtcatgtaagcaaagtgccttgaagacaggaagccagacattataggagcataatttttgccctgaaatgcatttggtatgggttgggcatcagatgtttctgatttgtgaattagtctgagaatgttagacatgcaatggtttaaggattgctaggagcaaaacagaaccatgttgtgtgtttatgggtaatcagccagtttggcaaaccaccagtggctgaaacttgtacctgcccgggcggcc

SEQ ID NO: 20248 - DNA, 736 bp, Homo sapiens
  misc_feature 732, 733, 734, 735, 736: n = A,T,C or G
acattttaaaagtcaggaagaaaataaaatctgactcttgtagcatttagctttgtattggagtggcctttgcaggtaatgccaacttccacgacatttagaagattcataaagtgctggtcaaaataatggaaaaaatagcagctgtcatttgatcagaatctgtgtgcaaaccaattaaaagccctgtcataactatttaagcatgtaaggtgatttatgattacctttcataaattaatgaattctccccaataggagccggggtgccaccattggggtgcccccctgtcctccgccagagtttacagctacaccattacatgaggactgctcccaggtttgctgtgtttaaatgattgaccaaggccagaaactttgtcttttcttcaactgattggcactatctacttataaccttataacttagcttatttttcactcccccccaaggagagtagagtccagaatggccggtggtagtctcagagtagaagagttgaggtgtcataagataacgacacccttgaatttatttctcctatactttgcttcataaaagtgagcacaaggacagacaggcagaaaatagtagatcactatgtgaggctagagagagtcctctttcaggttcaacaaaggaaagacagaagaaaagtgaataaggtacataaatataagaacataagtgtagacaggtagatgatgaaaaatgggagaaatggaagacgnnnnn

SEQ ID NO: 20249 - DNA, 690 bp, Homo sapiens
  misc_feature 1: n = A,T,C or G
nctgggaaaggtgctgagagcagagttcggtctctccggaaacccaaagaaaacttcttagatgggtgcttaactgtcaccaaaaatggtaaaggtgttgctaatctctggatccttcgtgtctacaaaactgtctggcgtatggcaggagcctcctcccagctctccttttaatggattctgagctgctgggttctacagccatggtcaaatttatctaaagccaagccacaaagtcactgtggccctggtgttcccaagttgcaaaggaagcttcagctctgggtagattcactcgccgggtttctggacacctttctattaatgactgaaaaagcgtgtgtctttccagtttcctttactttggttagagttgaggactagactcataaaattcagccttcctctggtaactttggagaccctcagagcttttcttatttccagagacaggcggtttggatgagaattattctcttttttcacacaaattggccagatgacatctttactggtatctgtaaagactgcatcatcccagctactttcctgctgacttccacttgggtttactcaatgggtgacactcacaggacataagagattagaaagagggataaggttttttatatatctgctccctccttacttaaagccatggttttaaaagaggcccaaggtcccccgcgt

SEQ ID NO: 20250 - DNA, 402 bp, Homo sapiens; identical to SEQ ID NO: 20098
  misc_feature 1, 2, 3, 4, 401, 402: n = A,T,C or G

SEQ ID NO: 20251 - DNA, 418 bp, Homo sapiens
  misc_feature 1, 413, 414, 415, 416, 417, 418: n = A,T,C or G
ncacctccgcggcggccgccgggcaggtaccttgaattagagcctgaaatgggggaattgcagccataaaagacattctcagacaattggagactttcctgagttgtgataatggagttatgaatatgtaggagaatgtctacatagattttatgaagatgcatgtggcaacatatctgcagcttattccaaaaaaggtccaagaaaaaaaggaagggaaagaaaataggattacaactcggtctgagccaccatgccaagcctcactgtttctaataaccaaattgttcctgtatttattgagtctctgtttcatgccagacactctgctatagtctgaatatgctatttctgttaattctcataacagttctgtgagcaagaacaattaatatcacccttttacagattannnnnn

SEQ ID NO: 20252 - DNA, 1526 bp, Homo sapiens
  misc_feature 1, 2, 3, 4, 5, 6, 7, 8, 9, 10, 11, 1427, 1526: n = A,T,C or G
nnnnnnnnnnnccgcccgttcatgtacgcggttattacggcgagtgctgtaccacctactggtaatatttttgcaaatcacgtgaaagcattggagcaactgtcttggaaaatgctctttaaacttcaaaccccagtatgttttggtagtagtggatattacacatatatgctgctcttttcagtgttcttttattgtgcgaaaacatttttaaaacatttgatttattaataggatttatttttaataggattgttaataggatttatttttctaggacattgtctttaaacacttggatgattttatatgtcttaattctttaataatttgtagatttaaaaaacttcgtgggcagaaagcgaagaaataggaaaggatatagatttatttggcatttcaaaggattttgttttattatcccctcttatttgggtataaactcaaatctattttatccttcatctgtttggattgatgtgtattgagattttgtctaattgaactgattttgataacacataaagtttaatttccctgttaaaataggactcccaaatttctgaatgtctgtttcaagtattaggttacctcagttttctggcacctaaaagctactgataacatacattagtagcaatattaaataaggtaaaataactccagtgacatcctagttacatgcttggggtgggtttttggtttcgttttaaagtatttatgagggatactttcatgcattttccatgaaactaatttttctctttctttttttagcttcagctttagctgcagctgcctctgttcagccacttgcaacacaatgtttccaactctctaacatgtttaaccctcaaacagaagaagaagttggatgggataccgagattaaggatgatgtgattgaagaatgtaataaacatggaggagttattcatatttatgttgacaaaaattcagctcagggcaatgtgtatgtgaagtgcccatcaattgctgcagctattgctgctgtcaatgcattgcatggcaggtggtttgctggtaaaatgataacagcagcatatgtacctcttccaacttaccacaacctgtttcctgattctatgacagcaacacagctactggttccaagttgacgatgaaggaagatatagtcccttatgtatatagctttttttctttcttgagaattcatcttgagttatcttttatttagataaaaataaagaggcaaggatctactgtcatttgtatgcaatttcctgttaccttgaaaaaataaaaatgttaacaggaatgcagtgtgctcattctccctaaatagtaaatcccactgtatacaaaactgttctcttgttctgccttttaaaatgttcatgtagttaatgaactataggaatagctctaggagaacaaatgtgctntctgtacacagtggttacatttcacatttcactaatgttgatatttggctgatggttgagcagtttctgaaatacacatttagtgtatggtacgacgcn

SEQ ID NO: 20253 - DNA, 962 bp, Homo sapiens; identical to SEQ ID NO: 20216
  misc_feature 1, 2, 3: n = A,T,C or G

SEQ ID NO: 20254 - DNA, 444 bp, Homo sapiens
  misc_feature 1, 2, 3, 268, 322, 419, 443, 444: n = A,T,C or G
nnnacgcggggagagagaaggttaagagcaacttgatgggaggcagctgcatggaacctgtcccactgaggaagtaaaacaggaatccaaaataatacgtttgctgggaattataaagaatttcattgagaaagtgaaaaagaaaaatctatgcaaaggaagtgattctgttgtttaatgccatcacctgtcattctgtctcttaccatggctggcttggctagtggcaccacgaacagatccctacagaccccaacaccaagaaaangtaggtttttcttctttctttgcagttctttggtatagatttgatgttctaggngtgggtggaaggccattcgtgtgagaaaagattacacttagtattgggaatgggtgaagggaatgactttcctttttcttaccctaatatggacttnttgtttttagagatgctgtcctgnn

SEQ ID NO: 20255 - DNA, 679 bp, Homo sapiens
  misc_feature 1, 676, 677, 678, 679: n = A,T,C or G
natatcatcaccatcgacctcccatagtctgaggatggcaggcagtagcaacaggttggccttgtgtacttttaacttagatacatttactttttatccactcagctgaaaaacgaggagaaaaataaaagtaggtcaggtcaatctgtttcctttcccatttaatgaattcatgcccgggagtgagtgagaaatgggaggactgaatctgctgttctccaagactagcttaggagtttctgacatcatgggcatcccagcaagccaacggtcacattagtcaccacgtatttttcatatcacgtgatccctctatcagtgtatcagcctttgctgtataatgaacaatcctaaacatcaatggcttaaaacaaaatcacttattagcacataatttggtaggttcatattttgggctggccgcaggtaggttttgcagatttcacctggtcttgtcattttgctgcagtcggctggcattttgaccagggctggaggactatccatgtgtgacaggaagctggttggctggggtgcctagtttcttcttggttctcttccatgtgggcttgggcttggtcaaatggtcttgggtttctctatgcaggaagagaggacagccccaattaacaagtagttttaacggtttggcttttggcatgttcactgatgtccnnnn

SEQ ID NO: 20256 - DNA, 635 bp, Homo sapiens
acttctagaaatgccacagaaatcaccacattcgccccaaatcaccaaatctcttaattcagattatacatgtccagaatatccagttctcctagaaacaaaatgacacttttatgtttccctaagtttgaaatatttttgaagtattaaaataagcagagccatagtcccacactgtatttttctactgagaatacaacaccagaagctaatctcatgaaattagcccatgtgaagaacaggctgttaactactgttgtgatggtaagtccagaagccctgtgcaaaatgtgctcctggaaccagctgggccagcatcacttcctaaatcagaatccctgcaggtggggcccagccagctttgtcttaagaagtcctccaggtgattctgatgcgtgcctgaatttgaaaactgcttgtcaatttttcagaagtccacagaaataaaaacaaagccagcatacctggctccaaagatgtcctttttggcgagatcaattccagaacaacttttactctgagaatacgggactctccctgtgagaaggagaacaaaaaaagaggttaaaaacctgatcttcaatcaatcactctctcatccaatattaaagtaattgatttctactcagtccagt

SEQ ID NO: 20257 - DNA, 726 bp, Homo sapiens
  misc_feature 724, 725, 726: n = A,T,C or G
ggagtcgacccacgcgtccgcagatacgatgagatctgccatcactggggaggcaatgtcctgggtcccaagtctgtgactcgcattgccaagctcaaaaaggcaaaggctaaagaacttgccaccaattggattaaatgtacactgttgagctttctttacataaaaaggtaatgcaaattttcctaaagatttctatccaaagtgacttgatgaataatatgtaattaacttgaagagagaaagcagaaggagcagaattggttggagaaaacaaattcttgatgccaaagagatgggttaggtctagagaagtgcacttgaaaatagagataatagttgaggtttgtggataaataaaatcgctcaaggagagtaatacattggaaagaagggaggtgtagagcagaacctgtggattagcagtaagggagactgagaagtggttagctgaagaaggaacaagtataccaagaaaaagtaggtagataaaaatcacaaattgaagatgttttgggacctgattgtttggcagtagattttcctgtattatttttttctacaccatatgtatgtataattagaaaaattattttaaaatcgtattggtttcgtgtaattaacagtcctatattgttacctgggcaagttaaatagtcctaattgtccctgagttgttagagaatgtttgtgaaccactcagcacagaccttgacagataggnnn

SEQ ID NO: 20258 - DNA, 354 bp, Homo sapiens
accttaccaccccatccccagagcattgcatggggtgtttggcacacagtaggtgctcaatgtaaacgtgtgcactgtggcatgttagagccagacaggatctcatccagcccgttctctgcacccctccctcccctctccaagtagccctgctgtgggttcaagtaaagaggggctggggcgctggtctgattgtgtgggtgatttggggagatctcttcctcttccggaaccccaaaaggttgggacaaacacagcaacaagcccagctccctgaatttcagtgattcatttgtgggataaaggagtgaatgataaagtgaaggacgactgtccccgcgtacctgcccgggc

SEQ ID NO: 20259 - DNA, 378 bp, Homo sapiens
  misc_feature 378: n = A,T,C or G
accatggacaataccatcagagtttccaaaaggctggttctcactcttctcctgccacatgctttccctcacacccctggtgtggaataaatgttaaggaaagctaagacacagttgggaggaggggacacaggcctttccactcaagcgcaaatacttgcaaaatgcctgggtgccaacaaaggaatttggcagagaacctgtatcagcggcagcggcgcatcaaaaaagaatgtctaccttacaaggtgaaagaaatggggggtccaaagatggttttgggtgggaaatctggcacattagacacggaatagcctgtggctgagattcatattatacaacatcctaataaaaaaattcaaatcaaccaaatttaan

SEQ ID NO: 20260 - DNA, 375 bp, Homo sapiens
  misc_feature 1, 2, 3, 375: n = A,T,C or G
nnncaggtactactgacttacctgccatgggctttctcaagacaagtcctgcaggagaggcacactcacttctagcgtcaactattgaaccagccactgccttcactcctcatctctcagcagcagtggtcactggatccagtgctacatcagaagccagtcttctcactacgagtgaaagcaaagccattcattcttcaccacagaccccaactacacccacctctggagcaaactgggaaacttcagctactcctgagagccttttggtagtcactgagacttcagacacaacacttacctcaaagattttggtcacagataccatcttgttttcaactgtgtccacgccaccttctaaatttccaagtaccn

SEQ ID NO: 20261 - DNA, 830 bp, Homo sapiens
acagtcaacatgcatgatgtgtaactccatctccataggctagaggcatcctaagtgctgcagaccagacctggacaataaatgtcaagagtcaccaccaccccgaaaagaactagaagtctgtagatctgctgaggagcccagtcattaaaatacaggatggggttcacagagactcaaggtctgcctctgaagcttttcttggtaggatctgaaaacccagaagatgctttaaatcctcaccctagtgaacagatgcaggttccctggtccttggcctgactgcagtcagagagcccaggagttagctggttttctccctccatttttggtgtgaaaagagccactgccacagcagccatggacttaggatgctagagtgcatggtctggatgcaaaacttttgccctgaaatgtggcatcaacacaaatacagagtccagatttttcatcttcctctggtgatgactcaccattagtgtccatacatgtaggtgcttatgaaataaccctcagccaggacagctcactcttctggaactgtaggaagtgttcttataccttttttttcagattaaactgattaataccttacagtgttcaaatatttggctaatctcagcgtttttctaatttggagcctgaacaaagctaaaattgagctactattggaaacaatctagaagaagaaaagacatttaataagatataggttatattggagggaaaaactgtcaagagaataggttcatgaattagcaacacctcagggtaaaaacttttgcattggtttaatttcaaaataagcacatgtgagaattgtgctgggt

SEQ ID NO: 20262 - DNA, 446 bp, Homo sapiens
  misc_feature 397, 428, 429, 430, 431, 432, 433, 434, 435, 436, 437, 438,439, 440, 441, 442, 443, 444, 445, 446: n = A,T,C or G
acgcgggggtagtagctgggactacaggtgcccgccgccatgcctggctaattttttgtattttttagtagagacggtgtttcgccgtgttggtcaggatggtctcgatcttctgacatcgtgatccacccgcctcggcctcccaaagtgctgggattacaggcgtgagtcactgcactcagtcaggttttcaggtgctggttccatggctcttcctgagccgaaaataaggaaactccatagaccttgtccactggaactcgttcccatctaccctccactctatccaggtaagaaaccaaccatctcaggaaaggaaccaggcaggagtcagaggggaagatgggcactgaaggtatcaaaatacccaaaagatgcaaattgctaaaggaaacantaatcagattaggtgtggtgaaagaccctannnnnnnnnnnnnnnnnnn

SEQ ID NO: 20263 - DNA, 474 bp, Homo sapiens; identical to SEQ ID NO: 20153
  misc_feature 473, 474: n = A,T,C or G

SEQ ID NO: 20264 - DNA, 682 bp, Homo sapiens
  misc_feature 1, 2, 3, 4, 681, 682: n = A,T,C or G
nnnnacgcgtccggctttatggcgaagggccagggccccacaccttgcgcctgacagccagccaagctcttcagtcccccgccctccacctgccagggaggctccgggcgttgtacctgccaccacgggacacatatactcacagaaatgagttatttaaagaagacggtccagattccacagtccaaaaaaaaaagaggtttgccctgcttctgaaggagtcagggtatgaatgcagaggtcttcctgtgggctcacatatcagatcttcaacgtcaacattaaatgctgaaagaacatcagggtatcagcccagcaaatattccaaatgccaggctggattccctccaattaccaggacctccaggcttctcctcctttcaagaactttctgaccctggatccagtctaaatgttggttataaactcacctgacatccacagggcccttccaaaatactgtcaagtaagtgattcttaaatttagttcaacaaacaccagttgttggacttggttgcatccaggattagttttcacaacaatcccatgaggtaggtgggggctggcactttgccccattttatagataaagatgccatctcggaggctcaaatggcatgtgcacagccagttaggggcagacctgagactgcattcaaatctgatctgcttctacccann

SEQ ID NO: 20265 - DNA, 402 bp, Homo sapiens; identical to SEQ ID NO: 20098
  misc_feature 1, 2, 3, 4, 401, 402: n = A,T,C or G

SEQ ID NO: 20266 - DNA, 375 bp, Homo sapiens; identical to SEQ ID NO: 20260
  misc_feature 1, 2, 3, 375: n = A,T,C or G

SEQ ID NO: 20267 - DNA, 806 bp, Homo sapiens
  misc_feature 1: n = A,T,C or G
nccgaggtacttagcagctgtgtgacctagagcacagtgctttgagtttttgagtcttagcttctgtgtctataaaatggggttcacacaactcaccttacagggctgtaagattagattacacagaaaatatattttttggctgtgggggctggaagtgttgctgattagcatttgaaatcccatcctgtgggtgagaaaaccccaccttatgacttggtgggaaacaaagccaacctcccactgatgaagctgaaagtagcagaaccttgcttctactgcctcccttgcagctagaggcaggcacaggactagcctgtcaattggatgcaaatgctccaggccttgaatcacaacctggtgacttgcacccaagtctattactattgtctcttgaattgaaacaggccactctttctctccttcattctacaaatgtgccaagtctgtttttatctcagggaaaagccattaatggtaagtagtggcagtggcagcagtgaccagagcttccatgccagccatggcagaaacctggtggaggcataaatattgaatgccaggggcagcaacggggccggtgggggccaggttttgtggcagcatcggtgaaggtgtcacccaattggctttgtggtgtgattttggctgtggtctggccttccttgctcctgcctgatttctgaggctggttccatagccttatgatgagtgtgtgagctcctcactttcctttcccccaaattttcctacatatactgctcactgtccatttccattgcttgcaatgaaaaaccctgaccggt

SEQ ID NO: 20268 - DNA, 385 bp, Homo sapiens
accctgcccagagatttctccaaaaggagctcttgtgaatgcaggcaagctaaagccacacaatgaagctgaaattcattcagcttagcttctcctgagagccttctttttgtgggggtaacattgcccttttgtttcacagcgaggtctgcgctaagacttgctacttagggagtcaaagctaataaaacataccgtctagaaatacagacataactggtagaactatacaagaaaaagaaagggcagaggaagaagaggaatgtgattgtggagaggtatgaagggggattacaaatccctgcttctcagagcgtggtccatggactagcagtgtggacatcactttcaaatctattagaaatgtgaatcttacacgcaaccc

SEQ ID NO: 20269 - DNA, 649 bp, Homo sapiens; identical to SEQ ID NO: 20099
  misc_feature 1, 2, 3, 4, 5, 6, 7, 8, 9, 649: n = A,T,C or G

SEQ ID NO: 20270 - DNA, 1015 bp, Homo sapiens
  misc_feature 1, 2, 3, 4, 5, 6, 7, 8, 9, 10, 11, 12, 13, 14, 15, 16, 17,18, 19, 20, 21, 22, 23, 24, 25, 26, 27, 28, 29, 30, 1012,1013, 1014, 1015: n = A,T,C or G
nnnnnnnnnnnnnnnnnnnnnnnnnnnnnntttttgagacggaatcttgctctgtcacccaggctggagtgcagtggcgcaatctcggctcactgtaagctccacctcccgggttcacgccattctcctgcctcagcctcttgagtggctgggactacaggtgcccaccaccacgcctggctacttttttttgtatttttattagagacggggtttcactgtgttagccaggatagtctcgatctcctgaccttgtgatctgcccgccttggcctcgtagccctttttgaccctcagggacagtcactgaattatgtcttgggagcccatgcttctgaggcaggcttagggagcaggagagcatacaggtgtagcagcctttccagctgatccccatgccctgctgcacctggagggctggaacaagctattctcatattggggaaaagggctgatgggacctcagtcatgtggcagagaatctgaaagccagaagcttggcaggtctgtctcggggtggggtgacggagagacatttccctagaattcagctgctgggagcagaaagacagagcaggggcaagtgctgggtttctgaggcccgcagtcctgagcatggcctcaggcagtctgttctatgacagaacctgaagaaaggcccaggcatttgcatctatgtgtgcagttctacttgtcctaaaggcacttctcacactgggagcctgcctgtctgtacctgtctagaaatcagcctggctgggacgcacaccaataggagggcatcctcacctttcccacccatgagtcgggactgttgcctgctgtgcagcaaaggcaccaggaacacggagtcagacacttagggtctaccccaggctccacttcccactgcctatttgactctgggcaagtcttttacagcttttcaaacttctctctttcttgagccgaagaaggaagaactaaaaaatgtgcggccgtttgactggttttgaaaaaaaactttccacannnn

SEQ ID NO: 20271 - DNA, 5997 bp, Homo sapiens
  misc_feature 1, 2, 3, 4, 26, 5996, 5997: n = A,T,C or G
nnnngacgtcatgagcattgcaatcntctgggagtcaccacatcagatacatcctactcagatatggcttgctgaatcagaccctgaatctctggccgcctagtcctgcagttaatgagaagagcgtgtattccactcataattatgggaccactcagaggcatgggtgtcgaggactgccttatgctacgatcatccctcgttctgacctgaatggcctgccgtcgcctgtagaggaacgctgtggagacagcccgaactctgaaggagaaactgtacctacctggtgtccttgtggtctttctcaggatggcttccttctcaactgtgacaagtgcaggggaatgagcagggggaaggttattagacttcatcggcggaagcaggacaacatatcaggtggggatagcagtgcaacagaaagctgggatgaggagctttctccttccactgtgttgtatacagcaacacagcacacacctacaagcatcaccttaactgttagaagaaccaaacccaagaagcggaaaaagagtccagaaaagggtcgtgcagcaccaaagacgaagaaaatcaagaattctccctctgaagcacagaatttagatgagaatacaactgagggctgggaaaatcggataagactatggactgaccagtatgaagaagctttcactaatcagtacagtgcagatgtacagaacgcgcttgaacaacacctacattctagcaaggaatttgtgggcaaacctactattttagacactattaataagactgaattggcctgtaataacacagttattggttcccaaatgcagttacagctgggaagagtcactcgtgttcaaaagcaccggaagatcctgagggctgcaagagatttggctttggacactcttataatagagtatcgtgggaaagtcatgttacgacagcaatttgaggtcaatgggcatttcttcaaaaaaccatacccctttgtgctcttctactcaaaattcaatggtgtagagatgtgtgtggatgcccgtactttcggtaatgatgctcggttcatcagaagatcatgtacaccaaatgcagaggtgcgacacatgattgcagatgggatgattcacctgtgcatctatgctgtgtctgccatcaccaaggatgctgaggtcaccatagcatttgattatgagtatagtaactgtaattataaagtggactgtgcctgtcacaagggaaaccggaattgtcctatacaaaaaaggaatcctaatgctacagaactgccactcctaccacctcctccaagcctacccaccattggagcagagactagacgtagaaaagcacgacggaaagagctagagatggagcagcagaatgaggcttcagaggagaataatgaccagcaatcacaagaagttccagaaaaagtaactgtatccagtgatcatgaggaagtagacaatccagaagaaaaaccagaagaagagaaagaagaggttatagatgaccaggagaacctagctcatagcaggaggaccagggaagatagaaaggtagaagccatcatgcatgcttttgaaaacttagagaaaagaaagaagcggcgggatcagcccttggaacagagcaactctgatgtagagattactacaaccacctcagagactcctgttggtgaagagacaaaaactgaagcccctgaatctgaagttagcaactctgtttcaaatgttaccatcccaagcaccccacagagtgttggtgtgaatacccggaggtcttcccaagcaggggatattgctgcagaaaaactagtccccaagccacctccagcaaagccttctaggccccggccgaagagtcgaatttctcggtacaggaccagttcagcccaaagactaaagcgtcagaagcaggccaatgcacagcaggcagaattgtcacaagctgccttggaagagggaggaagtaacagtttagtaactcctactgaagctggaagtctagacagttcaggagaaaacaggccattaacagggtctgacccaactgtggtgtcaattactggatcccatgtcaaccgtgctgcatctaaataccccaaaaccaaaaagtatctagttacagaatggttgaatgacaaagcagagaagcaagagtgccctgttgagtgccctttacgtatcacaacggatccaactgtactggcaacgaccctaaacatgttaccaggtcttatccattccccgttaatttgcaccacccccaaacactacattcgctttggctcaccctttatccctgagagacgtcgaaggccccttctgcctgatggcacattcagctcctgtaagaagcgctggataaaacaagccttagaagaagggatgactcaaacatcatctgtaccccaagagactagaactcagcacctataccaaagcaatgagaatagtagctcttctagtatctgcaaagacaatgcagacttgttgagcccattaaagaaatggaagtctcgctatctgatggagcagaatgtcaccaagttacttcggcctctgtctccagtcacaccaccccctcccaattcaggctcaaagagtccccagctggccacacctggctcatctcacccaggagaagaggagtgtcgaaatggatacagcctcatgttttcaccagtcacatctcttactactgctagtcgctgcaacactcctctacagtttgagctttgtcaccgaaaagacctggatttggcaaaagtaggataccttgactccaacactaacagctgtgctgatagaccttccctactcaactcaggtcattctgacctggctcctcatccctccctcggacccacttctgagactggtttcccaagcagaagtggagatggacatcagaccctcgtgagaaactcagaccaggcatttcggacagagttcaacttgatgtatgcctactcccctttgaatgctatgcctcgagcagatggactgtatcgaggatctcctctagtgggggataggaagcctttacatttggatgggggatattgttcccctgcagaaggattttccagcagatatgaacatggcttaatgaaagacctctctcgtggatccttgtcacctggtggtgaaagggcctgtgaaggagtcccatctgccccccagaacccaccacagaggaaaaaagtatccctgctggagtaccgaaaacggaaacaagaagctaaggaaaattctgctggtgggggaggtgactctgcacagagcaaaagcaagtctgcaggagctgggcaaggcagcagtaactccgtttccgacactggtgcccatggtgtgcagggatcctcagcccgaactccatcttcccctcacaaaaaattctccccatctcattcctctatgtcccatttggaggcggtaagcccatcagattccagaggcacttcttcatctcactgcagacctcaagagaatatcagcagtaggtggatggttcccacatcagtagaacgactccgagaaggagggagcatccccaaggtcctccgaagcagcgtgagggtggcccaaaagggagagccctctcccacatgggagagtaacatcacagagaaagactcagaccctgcagatggagaaggcccagagacattaagctcagcactctctaaaggagcaacagtttacagcccttccagatacagctaccagctcctgcagtgtgatagtcctcggacagaatcacaaagcctccttcagcagagttcctcccccttcagaggacatcctacacagtctccaggatacagttatcgaactactgcactgagacctggaaaccccccctctcacggttcttcagaatcatccctctcttccacgtcctattccagccccgcccaccctgtgtccacagactcgttggccccatttacggggacaccagggtattttagcagccagccacattctggaaacagcactggcagcaatcttccaaggaggagctgcccttctagtgctgctagccctaccctgcagggaccctcagactcgccaacctcagattcagtttctcagtccagcacaggaactctgagttccacctcctttcctcagaactctaggtcgtcattgccatcagacttacggactatcagtctgcccagtgctgggcagtcagctgtctaccaggcctccagggtatctgcggtttccaattcacagcactacccacaccgtgggagtgggggtgtgcaccagtaccgactccagccactgcaagggtcaggagtcaagactcagacgggactttcctagggcttctggatttgggcaaacagaactgaatgagcccatagctgcttccttccagctgcctctggaacctaggccgagcatattgctgaggaacggggggtacaaggtgccagaggattgggtctggtggacaagaaacaagacttgtggtcacaattggcctctggccttggagaaagctgtaaatcttgtctgaagcagagactataaagaagtttctccctgctgtcaagggtacattgttgacaagcaaatggtgtttcggttagtaacggttctaagtgcaatgagttgtgttgaagcctccgtctcccatccttgcctgtagcccgtagtcacttgtgcagtgaggacatctttttaaatttaaaaaaaaaaaaaaaaaagttttcaaaggaaaaaaagttaaaagagccaatctcaaagccccaagccatctgagtactgttagggttttatgcacttaagaaaaaaggtaggtatgtaaatgttcatcctaagacaaccattccaaaagcaggtatctggccaatgtgtgtccaccaagaatactgtttatctttgtcttaagatcaccaagaaataggcaaggatagtaaagcttggaacctgcaccaactggagggtgcctggctctttgaagaaaagctcatggtcagctcttgattattcgggagcagattatttgagtagattgtctgagcctccaactgttaccatcctactcccccttcccaagctatttcacagctcagtaacccatgaagtaagtagacaagaaaaggaggaatgagacatgatataggccaattgcattgctacttaccagcttttggcaataaatttcattaggaaggataccgagtggtttgggaatgcttcgaattttattttttctactcccaattaatcaggagttgatgatcccatgagcaggaccgcctccatgattggggagcatgcacttgtgactgcagggtaagagtgggaagataggtttgtggagtggcaccgacaggactgtgattgtgtgtgggcctgccccacatttctctgggggatgcttatgtgagagtgggcccagtgaaagagttaccaagccacccacacccctaacactgttctggatgagagatgagagcagaccggcttctccccatcagtgcattgtgcctgttgtacacccctggaggagccctggagccagcccaggtggggtacacaatctttttaaattccatatggttgccagcttatttctttcacttgtttactgtaatatctggcgtgtttttatttatctaattttgtattcagttataaccatggtaggggtagtgaatatatgacaggtgtaatccctggtgctgcagtggaccttcttttcttttggacaagataatactgtgagtttccctccttccttccctctaatttgttttccttttttccccagcctctagcaccccaagaggtctggtcttgacagcaccctgcccacacagagtggctgggggggtaggggcgggggggtggggggaactcttggaagggaagaagtatcacttctttctcaagtggagtgtttacaccttgctgtaacatttgaactttcacaagagatgtaataattttgataataaaattcttaaccann

SEQ ID NO: 20272 - DNA, 412 bp, Homo sapiens; identical to SEQ ID NO: 20227
  misc_feature 390, 391, 392, 393, 394, 395, 396, 397, 398, 399, 400, 401,402, 403, 404, 405, 406, 407, 408, 409, 410, 411, 412: n = A,T,C or G

SEQ ID NO: 20273 - DNA, 454 bp, Homo sapiens
  misc_feature 1, 2, 3: n = A,T,C or G
nnnaatatgggccgaatttctctcaaagccttattcccatagaacaggtaaccgtgaataaggatggacatgacgcgctgataagaaccatctgcggtgtgaaggatggcaatacataacgcgaccaaagacaattggctaatcacaacactgctgtgagtgacaatgtctctgctgtggttagctttggtgccttctccaaggtaaattcagcagtgacattaacaccgacctgggaacttggaacctgaaccctcatgcctaagtaataaaactaattggaacagagacatggcacttctgtctcttacatcaatgttgcgtagagctaacttaaatttttatattaagttttattcaacaagcactctttacatacctgcttgatgctgttggatacacaaatgactaagaccaggttcctgccctcttgtaggggagagaagaacaaagt

SEQ ID NO: 20274 - DNA, 659 bp, Homo sapiens
acactaatctgtattctaagtgtgaagatttgctcttcatgatgatgtgaatctgtgtttcctagtcttgagaaatggattttaggctgggttctagagagctggggtgatagtgggctgtgctggtggaggtgaagatgtagagtgttctagaggtgactagcattttaagcttaggattgttggcaaatagaagatgaaagaataggaaataattccaagatcttcaactcttctgcattacaatatgtaaccaaatgatcttaattgtctagtcaaccaaagtttacaaaaaataaattctgccataactgtgactcaaatatatgcgaatgcataaaatatgggtaagaaagtgaatttgaggcttgaacacaggtaattaagaggatcttataagaattgccaagacttgatggctaaggactcagatttagaatataataaggaaaggtcttctgcttctggctatgacagagttggtagaatcagataaattcatccactgagaataactataaaacttgagaacaactataaaacttggacaaaatacaaagcaaaacaaaacaaaatctgaaagctctgtagaacaaccagtgcagccaggacctcagggaccaagatcctggagagaaggaaaacatattgaagtgagt

SEQ ID NO: 20275 - DNA, 529 bp, Homo sapiens
tggcggccgaggtacatacttcagaggctagttggcaggagtcactaagttaatccatgcacagtgttcagcccagtgcctggcacacagtgggtgctcaaacaacagcttctctccctgcatgttggtcattagggtcacaggctctgaagtcaggctcctagggtaatatcctgtccctatcactttcaattgtaggaagatgggcaaattacatacccccataagctttaattttcttactataaaacagagataataattgtatctaccttatgggttattgcaagcagcacatacagtcacccaaataaagtatataagagtatcttgtaagttcccagtaagtgctcactcctatgatattgatgttccccatttgaattcctgtggtattatgcaatcatctgtgcaataggaaccggattagcagagggtcctgggattctggcagaaaaagaccagagcttagtggcccatcagaaattggcttttcccccagaagagagggaaccacagggcctgaggt

SEQ ID NO: 20276 - DNA, 407 bp, Homo sapiens
  misc_feature 386, 387, 388, 389, 390, 391, 392, 393, 394, 395, 396, 397,398, 399, 400, 401, 402, 403, 404, 405, 406, 407: n = A,T,C or G
acgcgggtgatctaggtcctgggaatacagcagtgatcccaacagacaaagccttgtcctcacagagcttaccttctagaacgaacaaagaaacacataaacacacaaaatgtcagatggtgggatgtgctacggggaaataaagcaagcattccctaccctacacttccttgtaagaggtaagagtgggttgctagtttgtatcaggtgttcagggaaggccttactgacatttgacctaaaagaaaggtaagaatgtgacacctgatgataaatagggaaagagtatttcaggcaggagaatcacttgaacccagggggcggaagttgcagtgagccaagatcacaccgctgcactccagcctggcaacagagtgagacttcannnnnnnnnnnnnnnnnnnnnn

SEQ ID NO: 20277 - DNA, 1108 bp, Homo sapiens; identical to SEQ ID NO: 20121
  misc_feature 1, 2, 1103, 1104, 1105, 1106, 1107, 1108: n = A,T,C or G

SEQ ID NO: 20278 - DNA, 1115 bp, Homo sapiens; identical to SEQ ID NO: 20211

SEQ ID NO: 20279 - DNA, 645 bp, Homo sapiens
  misc_feature 1, 644, 645: n = A,T,C or G
ncttctccaacataccatgggttggaggccaatgtggtatataagatgtaacaccctcagaagggttaagttttcacctgagttttcatcttcaaccaagtcattgggatggtgatctagaaggacctctaagatctagaaggataaagatctggtccaaggagtacaaatatgtaatggatctaccaccagtgtcccctgctgtactcttggcagacatcactaatccatcacagcatgccttcccactgatcacagatgtagcttcagggcattcgagttaccacttaagatggatatgagtgaccctcccttatctcactcttctcctttcacagaagcaggatctgaggcccagagagggaagctataataaactcccctaagtcaggtcccttctaagaggcagaggtaggtttagaactcaggcctcagaaacttccagaagccaagccatttgggctgtagttggtggacagtctatcagcgctctgcagatgtttcttctcagttagggaacttggaaaatgcagaaagaaagattctgtctctaagactctgtgtatgatcctactcggtaatctgcctgcttggagaaaaaatatttatcttctgggacggctttaccacaaggcctgaatgcnn

SEQ ID NO: 20280 - DNA, 869 bp, Homo sapiens
  misc_feature 1, 2, 867, 868, 869: n = A,T,C or G
nnccggcaatctgagggttcgctctacctgcttaaaagcaagaaatatttttaatatttcttctctctactctgtactaattttatctgaaaaattgctgctgaaacttaggagccattttgaaagcaacggtagtaatcaaaggtataatcctcatgctatataatgttttagattaccaactgctttactatgtggagcgttttctgcccgttactgagggttagatggagaacactgttcccatcttagaggtgaggaacctacagatggcaagaatagcatatggctggctccaagtcacacagcaagtcaatcaatcggagactaaaatatttattacctgtagactgctaaatttctgcatcatgaacaatgacttggagagaatgttgctgagcagaaattttgtcacacctgatctgagaatataaaatttgttcatttgcaaaacatgcttctgaaatattttgtttccattatttatttagccagctagtttcttatgggtactaaagaaggtctcccaaattacctaatttccacaatagggcttagatttatgaagttgtatattttttcctccttataaaaagctctttttataaagaatatccatgtaatactaaaacggggaaatctcctaaataatatattttttaatattacttttttaaaaagctagggtgagcacctcacaatcaaaatttaatgtatttgtcatattgaaatgcagggttttttgaaggaaacatggtaggtaaacattttagttcccaactcctgatcgttaaaatgcaaaattgggcctggtgtggtggctcacgcctgtaatcccagcactttgggagaccaaggcgggtggannn

SEQ ID NO: 20281 - DNA, 445 bp, Homo sapiens; identical to SEQ ID NO: 20159
  misc_feature 1, 2, 3, 445: n = A,T,C or G

SEQ ID NO: 20282 - DNA, 1189 bp, Homo sapiens; identical to SEQ ID NO: 20185
  misc_feature 1179, 1180, 1181, 1182, 1183, 1184, 1185, 1186, 1187, 1188,1189: n = A,T,C or G

SEQ ID NO: 20283 - DNA, 1429 bp, Homo sapiens
  misc_feature 1, 2, 3, 4, 5, 6, 7, 1426, 1427, 1428, 1429: n = A,T,C or G
nnnnnnncggaagtcttctagaattaattaacgcgggggaggacgggtactttatttaaaatatgaagttggaagcaacataagagtaaagtgctctcaagcaactgagtttaatttgatataataaaagatttctatgtggtgggcagagaaaggagaaattattgaaaccgtaggctggattaattgggcactatagaataaaaagttggctttgcacctttgaggttctgaacattaattgagtatatgtttgcttcccaatttctcactaaaccaaactatagggagtcgcccacgcgtccgcttttttctttgtatgataatctttttatcacggctggttagagaaaccaatcacagaagatgagagccaaacctgtcccgttttggattttaaaatatgcactaatgtctataatcttgtaaaagactttaaagcgagaagtgaaatttggactgcatgttaaactccacaatcaaaaaaaagcagctacaagattctgactaccaaggagatgctgagtttgtcaagtactttccaatttaggttttacctgattgacaagtgttcctaagaatgatattcagccaagacttttgggaaaatccattatttgattccctgcacagcaaaagcccacctgatacaaacataagatgctttatggaatagataaatccaggttgggggagaaaggagaaaatggctttaaaatatcactttgccaactcaagatgagagttttaagatgagggcatcccttgtaactgtaagcacatagggaaggctcaataaatgcttactaggtgaaattcttctcatgtaagctacgaaagcatctcttaaatatttttacaactgatttcctgttcaagctcatgcttgccagtgaaaatacacttttctatctcatgctaacaacttaattttttataattctgaccactttcaaatgagcctattttgaaggaagccctatcagtggtgtcctgagagccaggaagactaagcaacttgatagggcagcccagctttcaataacggagccaccagccctcaccttcctccaggcaggcgttttattaaggttggtattcaacattgttgcctgaagcctgattaataatttatgccttcctaagcagattagcagaagtctgtcattttgatattttaattcttagtttgtgtttggaaacagaatgtacccctgagtttacacttttaacatattttattttttagaattcatacctaaactaaacaatgtccttgccaagattttttttctcttacagttttagtagccatatgtgtgaccatgtattttctatcataaataaaacaattgcttatttgctaaaaaaaaaaaaaaaaaaaagggcggccgctagactactgacagaaaaaacgtcttcacannnn

SEQ ID NO: 20284 - DNA, 443 bp, Homo sapiens; identical to SEQ ID NO: 20111
  misc_feature 1, 2, 3, 439, 440, 441, 442, 443: n = A,T,C or G

SEQ ID NO: 20285 - DNA, 572 bp, Homo sapiens
  misc_feature 571, 572: n = A,T,C or G
actctgcatagatggcagattacaggatggataggagaaagtgtttaacattccaccccacatcatcgcgcaatctgaggcagcaccacaaaatctgatgccagtagccctggagtaatatcaggacaccaggaaatttgagttgattgagacactatggctccagagttctgctaacaaccacctgaaacaaacttagtaggagaagaccagccttccaaaaaattattattttaatggaatataaagaatgaactaggaatagaatagtaagtatgtgtgaaggccacatactatgagtagatattaataaaatatgtgtgcatatatatagtataaagtctagaaatacaacgaattatgtagctaaagatatatacatgtaagtaaatataagatataaagatatatatgcgtgtatgtatacatataagcatagatgtatataatgtctaaaacaggtatgtatataaacgtagatataaacaaaatgtacaataccatatataatgtacacatacagtgtaaaatttattaccatgtgaatgagaattaaaatatgaaaatcgcnn

SEQ ID NO: 20286 - DNA, 1214 bp, Homo sapiens; identical to SEQ ID NO: 20119

SEQ ID NO: 20287 - DNA, 813 bp, Homo sapiens
  misc_feature 1, 2, 3, 4: n = A,T,C or G
nnnnagcgtccgaaagatttgtgagataaacatgcctaaggttttctgtttactagccctggaaatttttgaaaattaacttattttagcttctcattcctttatctgaaaaagaataattgtagctatcttacaaggttgttgtaagaagctagtacatgcaaagcccatgatatagaacttggtatgtaataggcacttgatatatggcagccattattgtgattcatttaatggctatgagacacaacaggagatccctctattttcatgagatgattggtggaggagaggaacctgataatgtttactgagcttttactacatgccaagcaagcactgtaccaagtgctttacatgaattattggatttcattcatgaagttgattccttgctgattatattaagcactctttcttttggtttgtttacttatctagtatctgtcttacttacttacaggagggcaaggagcatgtctgttttattctctgctatataccagtgccttatacctcaatcaatgtttgctgaattaataaattaatgaatctgtgaaagaaaggatgagccctctagaaatgatctttgactctcttctatcaagtgctcttgattctttcacaagcagcatttctgggatgcattcatttctttatcattcctacagccataggcctgctcctgactgtcacggccttaagtctggactgtggcagccacatcgtaattcttatgtggttctagcttcttctcactcccagccaagctcctcactgctgccagggtaatattcctcccacaccctcatc

SEQ ID NO: 20288 - DNA, 770 bp, Homo sapiens
  misc_feature 765, 766, 767, 768, 769, 770: n = A,T,C or G
acctacttgaaggacttcataagcaaattacgatttaatttacaagaacactatgtcacacgtatacacacaggttttttatatttgttgtcttttccgtgattatctcttacagtgttgtatatttaatatattcattttattttaattttatgtaggttcctcattccttcatatgtgtattacatttccctggaactatcacgtattttatatacttagcaatggaaagctcctggtttcagttgtctgtgcagcaggcagggggaggagaagaaaatgggtcacactcctgaccctgcctgcatagccacaggttcccaaaagcagaggtccctgctgtgcaccttccctgggacaactttcttattgatgggtcttgtgtttaattaatgagagtttgttttggggtatgggcccaggtgcagctactgaatccagtgcaagagtggaaataagcttccaaaacagtatcacctgagagagaactgagtccatccctgtagtaccatctgagttacagcttcctgggcaaaggctcagaatcataaaaactttacatatgtgtcatgtgctgtgattcttctgtgtcactgtatgttgagctatatctgtgtggtgccacttacacttaatgagatgagattccttctacttgtttcatgtcactcgtgatctctgaagctacttcagatttctgctttaatatgtaaagagcatgtcaatcatcacccacattcttaccataataaaagtctggaaaannnnnn

SEQ ID NO: 20289 - DNA, 1128 bp, Homo sapiens
  misc_feature 1, 2, 1127, 1128: n = A,T,C or G
nngctacaaatttaaatgcaacatctgcccatccaatacctatttcatctttgaggggtaatctactcaataaactgtgtaagaccagtgaccagaccctttgctaacctgacatttacttcaatttttctttttctatgtactggatatttttgcatataaacttgcagtaatagttcaaaaattaatagtttttgacattggcttttctgagaagagaaattgaaagtgtcacaaaataaaaaaagatgaaatgaagcatatataattgtcaattttttcaattttctagccaacagagaatcgaaggattctgttcaaatattagtaaaaattgaaaataaacttgtgcttatattttgtttgcaacacactagttaatttaacctgtgactagttatctctaccgaaggtggatgtgtagtttctggttttaaaattcaagcaaactggaaaataatccatctaattatgctttctttcccaagaagttttttaatgatatgccagcttcctaatttggagacaaaagccttaattgacaatgcattcattatatatttttttgtatagttacagtatacgagttgagtatcccttagatgagatgcttgggaccagaagtgttttggatttcagatttatttttggattttggaatatttccatacatataatgagagagttggtaaatgggattcaagtctaatcataagatgcacttatgtttgatatacaccttatctgaatagcctgaaggtaattttatacaatattttaaataattttatgcctgaaacagagtttgcgcacattggaccatcagaaagcagaagtgtcactatttcaagtcagtgctcaaaaagtttcagatgttaagctggtgatgcagttcatgccagtgatccgagtactttgggaagccaagacaggtggatctcttgagcccaggagtttgaggccagactgcacaacacagtgagacctcgtttcttcaaataattaaaaaattagccaggtgtggtggtgcacacctgtagttccaggtactcatgaggctgaggttattgggattgtttgagactgggaggttgaggctgaactgagccaggatcttgccaccacann

SEQ ID NO: 20290 - DNA, 1409 bp, Homo sapiens
  misc_feature 1, 2, 3, 4, 5, 6, 7, 1409: n = A,T,C or G
nnnnnnnacggacacacggcagccgggggcctggccaggtacaaaataaatttgctcattgggttagagtatggttattgattagggggctaagcatttagttactgcatggggcagccaataataaaatcacagccctgtgtatttacctccacagtgtgtgctgataagtgcaaaaggtttgtgcaaattcttttgaagttatattgtaaccatggtatatgtattgaaaacttggccattttaccccattcctatgaatgaaaactatttggtgaatcagaggatagtctgaattgggatatgaaggccagtataagtgtcagttagcaaagtcagctctagtttagtttttttttttttttttttaaggcgtagcattactagaagtatagctttgggaaccttgtagcatcttaaagacttttaaagggttgacagctattggcaaattgactaatacagagaactaaactttggttcatgtattcaatgtctaaatgaaaaatgggaagataaaagagctaagaatgaaatgtgatttcatgtgcttctcctttttagctcttataatagattgaacagatttgatatttgtggtaaatccactcaggcagagtgacagaggcttggttgtcatttagcctttagggtcttagtggagttaatgagaactgcaaatggtcatcaagtcttggtgcttcatggagaagcaacacttttacagtgagtgtgttagcttagtggttatggtattactgcagggacatggatcacttagggagagagcgtttcaggcttgggtcagtcttaaagcagatctcatgtggagggtttctgctaacctgcatctcttacaacacaggtactagtcagtatgctgtagtattaatcagtaggtcaagttcagtgaagtaaaggagaattgaattcttgaagttcacatttaggcaaaaatttggcgttttaggaggtgagtataagacatgatctttatagaaaacgctgatgataaaaacagcgctctctgttaggtgcctttatgcttgactccattgtcatcttttcttaagaaactaagctcaggactgggtgcaatggctcatgtctgtaatcccagcactttgggaggctgaggctataggatcagttgagctcaggagttcaagatcagcctgggcaacatagctagacctcgtctctactaaaaaacaaacaaacaaaaaacacaaaaaaaacccccaaaaaaaccaacaaaccagcttggcatggtggtgcgtgcctgtggtcccagctgctcaggaagctgaagcgggaggatagcttgagcccaggagatcaaggctgcacttagctatgatcgcaccatcgcactctagcctgggtaacagaatgagaccctgtcacan

SEQ ID NO: 20291 - DNA, 1835 bp, Homo sapiens
  misc_feature 1, 2, 3, 4, 1835: n = A,T,C or G
nnnnagtcgaccacgcgtccggaaagttttgctgaaaaaatgagatgattaatagaatgctggttacctagggagagtgggggattacctaggactggtagaggattttttacttttatcttgttttttgacaacgtgtatcttattaggagggagtcagaccgctgcttgtcactcacttcatggtattttcagagtctcagcctccttgcaaggatttctcaaagcatttaagaatcatataatacagaccagttattggcttttaagttttcttctttaataaaataactcagtggccctaggagaaatctgagaaattttcatactctaaatgagattttgcttgaaagtaattttctctgctggcaaaaaggattaatactgacatgaaacatgggaagtagaattgagtaacacctggaatttgaaaatgaaagggcacagagtgccaggcagggggcaagctgaggtttctcactacagtacttcaatcctaagatgccactgaatggtctcttacagtcctttatggactattaagaaaaacagattgctagttcaattgtcacatgctatcagttgcaagtggtaaaactatacatctcagaatcagtaaagtgtggtatctggaataacagttacaggtaaattttttttaatgatttttatgatgaattacatacatagaattaaaagttcaaaaacctaccttaaagggtaagatacgttacttttctatgctagtaggaattcaaatccttgaatgataaagccatttagagtcttattccaaggtcctgctgacagagcctgatgtcacgatttccatgacataatcttgtaactttgtaaaaggctttcctttcccgtcttctctatccagggctggtgcggatggaagggcccagatttttggaacaaggatgcatactataacttatgtcttcctcagcgaccaaatatgatttaaaatatcttggagtcaaagactgcagtagagtggtattataaatttgtgaataaagaatcagtttaatttttcacattaaatcctggttctagtttgaccatttaaattatgacctttttcaaaggttgtaaatactgcacggagaatgtattttttagacgttcctttaataacttaaaagacaaagcatacacaaccagcatattataggcatgtaaatacatgtgttcttaaatggatcttcacttggaagaaagtttttcgtccttctcagaaggagattagacacaacatatggtaaagccaaaagcaggagcttatagatttgcatgaaatgaaggcgttcttcagacttcttcataacccacgtgacatctgtttttaaaaacacgttaacattaaaaacttttttttaaaaagagttttatccccaaacttccaccatgcagtcccatttttggtctctagactctggtaaatataaccagtactaaaatgttaatgagaatgaaacaatactactagaaatacgagtgtcagtattaaatggaataataaatgctatgcaaacaagagatcactgcgggaggaaaaaagcagcagctctgagttacttaccagcacttccttttcccactggtattttctacacttccgagactccgtttctgtctgagcacggcaacacaatcattcctgtcagggtgttcacttgcttttattgtctgcatacatttaattgttgtaagaaacttggcacagtctggaaatccacatgaccaagcgagatcttcagctgtttgcccgttcttattacataaactgaaaacaggataaaaacggagtgaaatgaaaaaaaaan

SEQ ID NO: 20292 - DNA, 449 bp, Homo sapiens
acttgagttttttcccttacaacttatatagtctgtgagggattagataggtatgccttaacatgatgctaaagatgtggctagggttgcatatttcttatatgacttagttaactttgccctcttccaaggtcacagattttgtccctgaccccaatcaccatgcacatgtgcacatgcacgttcaacatgcctttggtaaaataaaagaggaccaggagaaagtgttcaaacttgccacttcctgacttctagaaaatagctgaaagcccgtgccctgctgatggcatatcctcagattcaagatctaaaatgccgtcgtaacaaaacacagtttgttttgctagcttttctttttccaagtggtatctataaacatttgcgaatggcagctaaattggtttttcttaaacagtcatgagttgattgccaatcaacaaggcaagcct

SEQ ID NO: 20293 - DNA, 3073 bp, Homo sapiens
  misc_feature 1, 2, 3, 3070, 3071, 3072, 3073: n = A,T,C or G
nnncgatccacgcgtccggcaaacccaacccgtcggggccgccgctccggacccgcagccgccgccgccgcctcctccccccggatcgggtgtactgtcccaacccgaaagtccagttctgcggcccggcagcggcgagcgggcgcgatgacacaggagtacgacaacaaacggccagtgttggttcttcagaatgaagcactttatccacagcggcggtcctacactagtgaggatgaggcctggaaatccttcctggaaaaccctctcactgcagcgaccaaagcgatgatgagcatcaatggagatgaagacagcgccgctgcgctgggcctgctctatgactactacaaggttccaagagagagaaggtcatcaacagcaaagccagaggtggagcaccctgagccagatcacagcaaaagaaacagcataccaattgtgacagagcagcccctcatctctgctggagaaaacagagtgcaagtactgaaaaatgtgccatttaacattgtccttccccatggcaaccagctgggcattgataagagaggccatctgacagctccagatacgacagtcactgtctccatagcaacgatgcctacccactccatcaagacagaaacccagccacatggcttcgctgtgggaatccccccagcagtgtatcatcctgagcccactgagcgggtggtggttttcgatcggaatctcaatactgaccagttcagctctggtgctcaagccccaaatgctcaaaggcgaactccagactcgaccttctcagagaccttcaaggaaggcgttcaggaggttttcttcccctcggatctcagtctgcggatgcctggcatgaattcagaggactatgtttttgacagtgtttctgggaacaactttgaatataccctagaagcttcaaaatcacttcgacagaagccaggagacagtaccatgacgtacctgaacaaaggccagttctatcccatcaccttgaaggaggtgagcagcagtgaaggaatccatcatcccatcagcaaagttcgaagtgtgatcatggtggtttttgctgaagacaaaagcagagaagatcagttaaggcattggaagtactggcactcccggcagcacaccgctaaacaaagatgcattgacatagctgactataaagaaagcttcaacactatcagtaacatcgaggagattgcgtataacgccatttccttcacatgggacatcaacgatgaagcaaaggttttcatctctgtgaactgcttaagcacagatttctcttcccagaagggagtgaaggggttgcctcttaacattcaagttgatacctatagttacaacaaccgcagcaacaagcctgtgcaccgggcctactgccagatcaaggtcttctgtgacaagggagctgagcggaaaatcagggatgaagaacgaaagcaaagcaaaagaaaagtttctgatgttaaagtgccactgcttccctctcacaagcgaatggatatcacagttttcaaacccttcattgatctcgatactcagcctgtcctcttcattcctgacgtgcactttgccaacttgcagcggggcactcatgtccttcccattgcctctgaagaattggagggtgaaggctctgtcttgaaaagggggccgtacggcacagaagatgactttgctgtccctccttctaccaagctggcccggatagaagaaccaaagagagtgctgctctacgttcgaaaggagtcagaagaagtctttgatgccctgatgctcaaaaccccatctttgaagggcttgatggaagctatctcagacaaatacgatgttccccatgacaagattgggaaaatattcaagaagtgtaaaaaggggatcctggtgaacatggacgacaacattgtgaagcattactccaatgaggacaccttccagctgcagattgaagaagccggggggtcttacaagctcaccctgacggagatctaaaggcctgcgggccacagctccccaggagttcagtgcaggtgtttctagatcttacggtttggcaactgcaggtaaccccagtcagccatgtcgccagcacaggtctatgtcgagggaatgggttccttgcaggttggaggcggggctgcatctggcttggtggtagcatttaatctattgcattggtgtttttcagatgaaagagaaatccatataccattatgtttgaatttcctgatatatacaggatttaaagtgaaaactttattccaagagttaacagagtctctgggaagctttaggacatctgctacgttatttatcaaaatattgggatctctgccttgtgcctacagtgtcgtgggcctgctcgctagcagaagtcagaaaaggcgataggcttggctttaaggatttcgtgcccttgcctgaattcagtacaactccactgcctcacgttagcgggagcgcacctgaagagtacggggggagccctctctcccttaccctctcactctccaccagatgtttactaaacagggcatgttactgaaatcttcctttgcgactttctcggacatatcaactgcctttctcatgaagaattttaatgggttacagtatgaaatcagttaagataaagctgcattgtatataagtgcaatatatttttgaaggtctgtaaatgtgtacatacatgtcttatataaatatataatatataaatatggtgtctgtgtacatatagtgaagatatgcagtaagagctaccttaaagactttccctagacaaaggttaagttatttttgatcgtgtataccaagcagatagaatactgtgcttagtggaccgctaaaaccttttctctgtttccaacaccggcttctgtgctagaaaaactttcaatgacgagatccgttgctgtgggaatgtgtcttggttctgcctgtgtaccatgaggtgagaaaactttgggccgcttggtgccttcacgaatcctaaggagaacattttcccgatggttggtccgtaaacacagggcccgttggaaattataccccccgnnnn

SEQ ID NO: 20294 - DNA, 1409 bp, Homo sapiens; identical to SEQ ID NO: 20290
  misc_feature 1, 2, 3, 4, 5, 6, 7, 1409: n = A,T,C or G

SEQ ID NO: 20295 - DNA, 929 bp, Homo sapiens; identical to SEQ ID NO: 20094
  misc_feature 1, 2, 3, 4, 5, 6, 7, 8, 9, 10, 11, 12, 13, 14, 15, 16, 17,18, 19, 20, 926, 927, 928, 929: n = A,T,C or G

SEQ ID NO: 20296 - DNA, 553 bp, Homo sapiens; identical to SEQ ID NO: 20101
  misc_feature 1, 550, 551, 552, 553: n = A,T,C or G

SEQ ID NO: 20297 - DNA, 1214 bp, Homo sapiens; identical to SEQ ID NO: 20119

SEQ ID NO: 20298 - DNA, 1074 bp, Homo sapiens
  misc_feature 1, 2, 3, 4, 5, 1073, 1074: n = A,T,C or G
nnnnngtgatggctgggtgcagtggctcacgcctgtaatcccagcacttgggaggcttaggcggctggatcacctgaggtcaggagttcaagaccagccgtggtcaacgtggtgaaacgccgtttctactaaaaatatgaaaattagttgggtgtggtggcatgcgcttgtagtctcagctactccggaggctgaggcaggagaattgcttgaacctggaaggcagaggttgcagtgagccgaaatggcgccactgtactccaacctgggcgacagagcaagactccatctcataaattaaaaggaaagtatgatagtgttatggattttagctctgagtgagctggaaaactaggtcattatctagatgatttcagacttgaccctaattgaccatatatgaccaggaaacacttctgagtttacagctccgtggagatgacctcaacactgcctcttgatttgtttgatgcatgtcactttcattaattttccccctcctttttgaaagtcctgtggcagtactaatattttcattttatgtaatctctggtgctgctttccagtcactgtatgaagtgtctccccaacactagcaaatctaggtcctactaaatacaaatctctgggtggatgatcttctagtactgtatttttaaattaaggagttttagttataatgaaattgatttgtagtctgttttgccgtaaacttgtttttctttaaattgttcttacagtgatatcttactatttttaactgtctggggtttctgatatggggatttcagcccctggttaatcagtcttgtccctacaagtccctgatgcagtatgtttatttgtgatgtttaaagaacatttcttggctgggcgctgcggcttgcgcctgtaatctcagcactttgggaggctgaggtgggtggatcacctgaggttgggagttcgagaccagcctgacaaaacatagtgaaaccccgtctctactaaaaatacaaaaattagctgggcgtggtggtgggtgtctgtaatcccagctattccggaggctgatgcaggaaaatcgcttgaann

SEQ ID NO: 20299 - DNA, 809 bp, Homo sapiens
actttaaaattgctgcactgagagtggaagaaagacagaagcaacagggctgtggataggggaaagggaatgtattgggaagagagacgcaccatggagtcacgtccccacaaatacacagcacatttccagaaagaaaggcaggcaggcactggccaaccaaaacgagtttgaggaaaaatctataaaaggttctgtgccacacaggaaagactgcctgacaaattagctaatgaggacaaggcatctgtccttggaggtctcctccagatgcaaattggcccaaatttgaggccaactgacctctatggaaaaagcaaaaccaaagtcagattcctgtcatccggagaacaactgtcaccttgatcacactccaaaatcaagataaaagcttggctttccaagggtcacaatgggcttacaataaatgagcccatgtaggaagaaataaatatgtgaagcacctcttccacttgacatttggggcaaaggagacgggcagccactacaggatgtctctcagccccgataggcagatttctcccggttggcaccgcacagtgttgcagctcgacccatttcgcttgagtgagcccacggagggacagcatggactgagagttctctctcaggctgtgtgaactgatgtcactcacagcagcaacaaatcttctaaaagtcttctaaaagttccggtgttgatcagtgcaaaaaacctacagcccatgctactgcataagctaacctttgacctatcggctcagtccaaaagagtctgtggcaaagactgtggctaatcaatccccagt

SEQ ID NO: 20300 - DNA, 1012 bp, Homo sapiens
  misc_feature 1011, 1012: n = A,T,C or G
caccgcggtggcggccgaggtacttgtaggtgcagcctggattaccaatgaggatgcgagataccggagtgagcagatctttgccttggatcctaaccaggtcccgaaataagcagccatgcttgtgcagtgtgagaaaggcttcttgaacctctttatggagctcctcagatacactgctggcttctcggagaattagtttaggatatttcagctgccactgctgatagaattcatcatctttgggggtcagataagggagccaagtgtcttcaagctcttcaagaagcctcagtttcttagcttcgcgctctcgttcctcggcagtcggggtgcgcttcatgctgccactaaagccgccttcgacctgcccgggcggccgaggtacaaggggactgtgtccatgccagtcttccagtccttggaggcctactggccctgttcctagagcctcattggagacattgacaatgccatgaggaccttcctcaactactacactgtatggaagcagtttggggggctcccggaattctacaacattcctcagggatacacagtggagaagcgagagggctacccacttcggccagaacttattgaaagcgcaatgtacctctaccgtgccacgggggatcccaccctcctagaactcggaagagatgctgtggaatccattgaaaaaatcagcaaggtggagtgcggatttgcaacaaaagatcgctttggctgctttgtgaagaatagattgaaagggtcaaaggtgagagccatctcacatccatgcaggaaccaagcaggcaagatataaatatgaaagtagaagaaaatagtctggaagaaaatcccctgaaaagcctacagtgttgggatcaaagatctgcgagaccacaagctggacaaccgcatggagtcgttcttcctggccgagactgtgaaatacctctacctcctgtttgacccaaccaacttcatccacaacaatgggtccaccttcgacgcggggatcann

SEQ ID NO: 20301 - DNA, 473 bp, Homo sapiens
  misc_feature 411, 440, 446, 471, 472, 473: n = A,T,C or G
acaatggtttcctggaacattctgagtaaagaaatggggaaaccaatacagcttacctagcttgttaccttctatgaacgctggcattaaaagtaaaaggcagccttgggaggaagaaatgcaaacacagagggagaacatagcttccccttgtctctctctgccacaaaagcctggccaaagtgactctactaggttgaagcagcctgcataataaaacgcttaaccttggctaagttaacctcctcagccattaaaaaaagggagggtgggggaagggctagcaaaatcaagcttacgggaaataaacctaatcaaagccgagtagtaacaaagggcaccagaaacatttctactgtttcacatcccacaggctggccaagagcccggaattttcattacaactttcanagagagccagagggagggaggaaaagatntcacanaagcattatcaaggccccaacccannn

SEQ ID NO: 20302 - DNA, 449 bp, Homo sapiens; identical to SEQ ID NO: 20292

SEQ ID NO: 20303 - DNA, 466 bp, Homo sapiens
  misc_feature 1, 2, 3, 466: n = A,T,C or G
nnnactatagggcaattgagctcaccgcggggccggccgcccggccgcggtactgggattataggcgtgagccaccgcgtctggcctctaacgagatatttctaaaggttaggccttcagtcaagaattttaaagctggatcttagaggttatctaaactaacctctccatttcatagataaggaaagtgagtcccagaaaagcactggtttggacaagttcagaaagctaaacagtgactgtggatgtatgattctgtctcttaactcctaatccaaatgtcttctcactagataaggctgtgccttctacatttgaaggctcaaaccccatggatggatggagggaaggatgggtggagggatggatggatagatggatggattgattgtgtcctcatatcgttcagctttcgcaggagagatggagccaccttcccatcatacagtgtgctaattgctagaan

SEQ ID NO: 20304 - DNA, 353 bp, Homo sapiens
  misc_feature 1: n = A,T,C or G
ncatgtgtccacactaattttaaacacacatctgaacaatagcttttcattatctaagtccaatatctattgatatctagagccatacccctgatattggacttagataatgaataaccattggatatctaagttgaatatcttagatactgaatattactaaaatttactaacaatattaatactaaataataccatcttatacttatgcaaaatgttacatttgcagagctccttctcacacgtttgaccattacaactctctaagacaggctggacaaggaaaactggctctggctttcagaggagaagaggtgtctaagtaacctgcggctttgctgctgagcagctgt

SEQ ID NO: 20305 - DNA, 587 bp, Homo sapiens; identical to SEQ ID NO: 20170
  misc_feature 1, 570, 584, 585, 586, 587: n = A,T,C or G

SEQ ID NO: 20306 - DNA, 1084 bp, Homo sapiens
acctggaaagatgaacaggattgcagcagatagagacaggtagaaggagagagattccaagtggaaggataaaggagagggaagagaagcaaagagtgcaacttccaagaagattttctggtttctggcactggtcatagatagcttgggaggaaacaggcagagagggttttggagaaacagagctgcaaagccaagttagatgttaggtgagttgaaaaaataacttagggcaaaagcagagggagggaggtatttactctgaacagagatgacagggtggggaggacagattgttttgagtaggcaaaggccaggagcatgaagcaagctaggaattgggaggctggcctagaagcatgggccacctgggaaagggacaaaagttaaagtatgacaaaccctttgtgttcaccaaatttcttttctggagtccttaaccatttgatcttactggaatagaagttatactagaactcactgcaaagtggagtaaggcttacagagggaaaacagcagagggcctaatgcaagattaaccttctcagggacccctgcagggactgggagtgctaagaatcagggaggcttggagcagctcactttacagtataatgagaacaggactcacctggctcaggcctggcatccaatcatcagcccactctggtttccatcctctgcgctagctgaaaggccacatgtactgcagccattgttgctccctttgcccttcagggtgtctttccccagcatctgtccctgcagcacccccaccccctcactctaattctgagcactcaaattgcccatcagtccaagccttctcctaatcacagccctcctacctctgagccccttcatggagccctgttcatggtgcttggcattttatgacaactaaaccaaaaagcagtgaggtttgaaaaaaaagagccaaaagtcaatcctggcaggggaggatttgctctttgtcttaaaaaaccaagagtaccagcttttgatggaaaaatttcaaacctcaaacagtgagtacattttgccccatcaattacatctctcagaattcatcctaagcggacgc

SEQ ID NO: 20307 - DNA, 1108 bp, Homo sapiens; identical to SEQ ID NO: 20121
  misc_feature 1, 2, 1103, 1104, 1105, 1106, 1107, 1108: n = A,T,C or G

SEQ ID NO: 20308 - DNA, 2031 bp, Homo sapiens
  misc_feature 2027, 2029, 2030, 2031: n = A,T,C or G
gtgcttctggacggaagtggtggctgtggaaggcgtagcatcatcctgcagacagacaataattctggagatactggtggaagttccaagtccaataagacactcaaatatgagtacaaatgccttaaaatggaattgaaaaactctttattttcccctatcatttattggatgggtgggtggggtatttttttgtaattgcttttttaaatattagttaatggattaaatttaattcttcagcgtaaaatggtgaagaactagcatatagccattgatcataaactgactatcataaaatcaaaacaagtgaaataacaaaatggacatggtggctttgtttaggtagagccacaaaagaaaagacttgtaatatttttatatacagaggaaatctgtaacaggtattttgtttcttttaaagcaagcaacacagaggaatttatacctcaaactatctggccatatttactaccttatcactgcattattctcttttatctgtttaaagcatatagagatgaagtttgtagttgttttaagtactacacatttttaaattgttagcttccttaagtatatcatgtaaagaaatgtcttaatttttgaaaaaagtacatatttattttcttttgaattgtttttattgttttctatttatgccttgatgatttaatatggatttgttacagccaagtgccaaatgctctctcaaattgtcagcaatttaactagacacagataataatgggtttctttcagattttttgaaccatccacttacatatatttttaaaaaatgaaatccttttcctgttcatacactaaccaaatctctcaaatctgttatcccaatcattgttgcctctccgtttattataaactgtatgctcacaacttagtgtaatataccagcttgtatgcaatggattttcaaccagataacatacctttcctgctctggtgcttagagactatcaactccctcctttagtgaaggagccgtgttagagcttccgagaatagctccactggagagaagtggaatcctatatagaatgctgcactaattgacaacacagcctataggccaatgcatgagtaaaaaaaaaaacaattactggctcactggctttgaaaagtcacttactattgttgctgaaacttgctgagctgtttatagagaatgatgataacagaacttttcctctgtatcactggtgtttaggtgaattaattaaacattgtgatcattagtaccaggtattattatctttaagagtcttccacttcaatgcacatggtgcagttttggtgtgtaacttagaaggattgaacttctttgaatttactggacataacattttcagaatagttggtcatctagcaaccgcctcaaaatgtgtaagcaggagagaaatttctcatcacagggatttagacttactattacataaaggctaactatgagcttgctcattaattttgaaaagatgtacctggtggatatctagctagtaatatattctgaagcaacattttagctctattgatactctttctaatgctgatatgatcttgagtataagaaatgcatatgtcactagaatggataaaataatgctgcaaacttaatgttcttatgcaaaatggaacgctaatgaaacacagcttacaatcgcaaatcaaaactcacaagtgctcatctgttgtagatttagtgtaataagacttagattgtgctccttcggatatgattgtttctcaaatcttggcaatattccttagtcaaatcaggctactagaattctgtattggatatataagagcatgaaatttttaaaaatacacttgtgattataaaattaatcacaaatttcacttatacctgctatcagcagctagaaaacattttttttttaaatcaagtattttgtgtttggaatgttagaatgagatctgaatgtggtttcaatctaattttttcccagacttactattttcttttttaaggtactatttcttgnannn

SEQ ID NO: 20309 - DNA, 939 bp, Homo sapiens
  misc_feature 1, 938, 939: n = A,T,C or G
naactcattttatatagactttggcagtgttctgtgatctgttaaaatactaatatacctccagttgacatatttctgctttttttttcctggagaaaagtggaagttgagaatagtataaaggaaaatgctggagtaggaaaggacatgtactgggggggcagaaggcctgggtgaccttggccaggtcatttcctcactctggatggcttcattttacccatttagaaaacggattggggtcaatgggattgcactagtgattgctaagttctcttacagctaggattccgttattctattgtcctgatctgaaatctcccagccaaagctttaggaagccacctattctccctgttctcctatgaagtttgttactgtgaacttgaggagcagttgatctgagtggactcgccagtctagctaacatggagggctagcttcctctcagggatgcagagtgtgctttgttgtgctttcttcctggagaaaagcatgtccagtagtatatacatcagctaggtgggattctttgggacagtggcatgtgctgtgtttgaaagtcctttgacagagttgaatctgacaaagctatcccagtttgtaaccatgttaagtggtggctttcattagccttaagccacttttagatataggagacttcctatattggtacatcaacatttttcgagtacctcctgtctgcaagacaccatcacagtataaacttaaaagtacttatgactcactaatccagccacatgaaagtgatcattcatctgaataaataaataaacagttttcattattttctccatgaaaaggtctgaattaattgatgcggatttcctgccagcttacttttatctttaaggatttaaggaataaactcaaattcagaagtctctgcagaacatttgcgcaacatgtgttacagnn

SEQ ID NO: 20310 - DNA, 1189 bp, Homo sapiens; identical to SEQ ID NO: 20185
  misc_feature 1179, 1180, 1181, 1182, 1183, 1184, 1185, 1186, 1187, 1188,1189: n = A,T,C or G

SEQ ID NO: 20311 - DNA, 1409 bp, Homo sapiens; identical to SEQ ID NO: 20290
  misc_feature 1, 2, 3, 4, 5, 6, 7, 1409: n = A,T,C or G

SEQ ID NO: 20312 - DNA, 573 bp, Homo sapiens; identical to SEQ ID NO: 20076
  misc_feature 563, 564, 565, 566, 567, 568, 569, 570, 571, 572, 573: n = A,T,C or G

SEQ ID NO: 20313 - DNA, 449 bp, Homo sapiens
accatttcaaattcggtttgttataaggaaagggtggggaaacctttggaagaagagagactaatagccaggagacttaactttttcattgtgttctgtcactttacatcctaaggctgtgctctcacctcacttttctttactcagttgggcagattacctttttggttttcccctgtttggttctcagttactttgatttcatattccttattgttcattcctgctgccactctctctggttaaaccaaattcccttaagggggagatggggaaggaaagagggaaatatcccataaagcaaaatagcttttgctgtcttggagaaattttattttgatttatttatttttttgagatggaatcttactctgttgcccaggttggagtgcagtggcgaatctcagctcgctgcatcctccgcctcctgggctcaagctatccttcca

SEQ ID NO: 20314 - DNA, 582 bp, Homo sapiens
  misc_feature 582: n = A,T,C or G
actgtcacccatggccctgataggaaacagatggcatattcaagctggataatttgaagaggattaaatgaaacaagtattcacaaataggtgggcagagtttagaaaatcaacaagagatattgtagtatcctgggctagcaacagagaggatgggaatattgccccatagacctgaagtgcaaagagaaggagtgctacctcaaaaagagagctttgtggagaaggctgcctgatagcagctgtagtcccaggtagagggtgagccaccacgcccggcggttattacatagttttaaaagtgactcctcttaaggaaattttaattaagagaaaaatatcctagaactatgattagggtcaaaacagtatctatgttctttaggtattaaggaaaaagtgtatctgtcctaagaaagtgtttataaggagaagagtcttcctagaacactaactttaacacagaactctcatcactactctaaaaaattaacattaaaaataatcttggccaggtgtggtggctcatgtctgtaatcccagcgctttgggaggccgaggcgggtggatcacttgagggcn

SEQ ID NO: 20315 - DNA, 986 bp, Homo sapiens
  misc_feature 1, 8, 9, 15, 985, 986: n = A,T,C or G
natcgaanncccttnggcatgggacgcgcgccattgtgttggtacccgggaattcggccattatggccgggggagtggcgccagggatttgaaccgcgctgacgaagtttggtgatccatcttccgagtatcgccgggatttcgaatcgcgatgatcatcccctctctagaggagctggactccctcaagtacagtgacctgcagaacttagccaagagtctgggtctccgggccaacctgagggcaaccaagttgttaaaagccttgaaaggctacattaaacatgaggcaagaaaaggaaatgagaatcaggatgaaagtcaaacttctgcatcctcttgtgatgagactgagatacagatcagcaaccaggaagaagctgagagacagccacttggccatgtcaccaaaacaaggagaaggtgcaagactgtccgtgtggaccctgactcacagaatcatgaaaagcaggaaagccaggatctcagagctactgcaaaagttccttctccaccagacgagcaccaagaagctgagaatgctgtttcctcaggtaacagagattcaaaggtaccttcagaaggaaagaaatctctctacacagatgagtcatccaaacctggaaaaaataaaagaactgcaatcactactccaaactttaagaagcttcatgaagctcattttaaggaaatggagtccattgatcaatatattgagagaaaaaagaaacatttgaagaacacaattccatgaatgaactgaagcagcatcaataaggagggtcaggatccagtactccaagaggagaatctctgtggttctatccatcagcaacgaagttgaaggcggtcttggggcctgattagataacttgggttgagggtatcagggttgttttgcagtaaagggtgggttcactgcacaaagggtagtctgacaattctgaatggtgcacggttggggcccgggggtggcacatcaccnn

SEQ ID NO: 20316 - DNA, 2538 bp, Homo sapiens
  misc_feature 2538: n = A,T,C or G
tttccagggagtaaaaaggccttttgggtggcacataaatctactgcggtgctgcctgctgtggcgcgggacagctgttgaattgttgtaattggctgactccctgaagtggtggtattttctgtaggggttgttgtccttgaaaaccctgaggaacaaacagtttaactgggaatgccccagtttgttggggggcctgaggctggcccctcttcctgtttccagacaatggttgcccatctttatcaaatttagaatgacattgattggcccaatgttttgcttttccacattttggacacaggccagatggctttttattttttgctgttaatagcttgatttattatattctgtttatttaagcctgggcaactccttttcagatgaccgatttgaccacaattataacattttttcccaaatgttctaacttgtcctcctagagtgagccccctcattgcttgagccattagcattgccttatgcatagctcctccaatcccatcacaagccttcacatattctgtaattacatcaactcctgctggaacttttccttttaatggctttatggccgactgacattctggatttgcattttcataggccattaattctacaataacttttcgggcattgtcatctgtaatagacttttgagcagcatcttgtaatcttgccacaaagtcaggatatggctctttagagccttgtctaattgaattaatagggaaagctgttcctgggtcctgaatttttccccaggccctgaggcaaatagcccttacttgttcaatagcctcattctgcatcactgattgttggttaatggtgctccaatttggacctgttcctaacaattggtctgcgtctatattaacagtgggcttagtagcctgattttttcgtacctgttcttgtactccatcaatccaccaggttttaaactgtagatactgagaggatgaaagggaagatttggccaaaatttcccagtcataaggagtaagtctatttccatgagcaatggaatctaataatgttcttatataaggggagttggatccatattgtttaactccttcctttatatcttttaacattttcatggtgaaaggttcacatctagtctcagctcgggcaggcgctcctacttgagtctcttccccggcctgtaccagttgtaaaattaccaggaaccgccatgcctcaagatcgccctgttttctggcttcatcaatgactgcatgcagtgcaccaccctgtccactacgtgatgctgtaggattaagtctcacagtgggcggctgaggatacagcgccgcgtcctgtgttgctggtgaattagacgccatcgctgtgggttgctggtatggtgccgtgctatttggcacaggacacaccgcttgaggtctgtattgaacctctgaaggaggccgatactgaagctcggttggcagccggtattgataaactaccagcggttgggtcttattttctaccggctgatattgtggatactgtatctgagttggcattgccgggatagagactctgtccctttctacttgattttctcttggggtttgtgcttgtctaacctgcgtttgaggttgtaatgttacaggcatctgaaccacgggaggaggagttgatggcgatcgtggtttaggctctgatggccccaatgattctggacctccttcccccaattttgatgattcagggtatattatctcctgtaattgactgtagtcaacattttgcgttgactgagccattacagactctgctacatatttacaatgtgaactttccgttccttgctgggattctgtccctgcctcttcttcacaatctgttacacagcttttaggggcatcagaaactgaaacaatatcttctcctgtttgaaatggttctaaagttgctttaataatggcccaatcattccatactgtaagtgggatgattttaccttccctatttgcttgttttaattctttgccaattttttcccaatcttttagatctaaagttccctgttctggaaaccatgggcagaattgttctattgtttgaaatagcgtaattagattttctgtagaagctctaactccccctcttcttaaaagaattttaataaagctgagataagaggcatatttactttcagtttgccccatcgttaccctgggttcctctaagcacacaagcttaccgcaaggctgaccgtggacgtacttgggaatctctcgtcggctgtcctcaatgctcacgttcttagcgtaccttcaccctagagaagggcccccacgccgggcgccagatgaaggggtggcctgcccctccacacctgtgggtatttctagtcgggtgggatgagagacggagaaaagaaataagacacagagacaaagtatagagaaacatcagtgggtccaggggaccagcacttagcacaccaaggacatgcacaggcaccggcctatgagttccctcagtttttattgattatgattttcattatttcan

SEQ ID NO: 20317 - DNA, 561 bp, Homo sapiens; identical to SEQ ID NO: 20209
  misc_feature 1, 2, 3, 4, 5, 6, 7, 8, 9, 147, 148, 149, 150, 151, 152,153, 154, 155, 156, 157, 158, 159, 160, 161, 162, 163, 164,165, 166, 167, 168, 169, 170: n = A,T,C or G

SEQ ID NO: 20318 - DNA, 482 bp, Homo sapiens; identical to SEQ ID NO: 20102

SEQ ID NO: 20319 - DNA, 619 bp, Homo sapiens
  misc_feature 1, 2, 3, 4, 501, 617, 618, 619: n = A,T,C or G
nnnnacactttgcctgctccagccctggaatcagccattgctgctgtgctatccttgacagaactataacctgaatttaacaaggaggaaatatcaggcaaacacaaatggagtgacattctagtaaacaactgatcagcactctttaaaaatgaaagacaaagaatgactgaggaatgagttcagattaaaagagacgaagggacacgctccaactgtaactgcaacgcatgactgcgggctgcgttctgcattggaaaaaagtgttactgatgaaatttgaatatcgtctctagattgagcaactaagcaataatattgtattaaattgctagattgggcaatagtattgtactaaagttaatttcctgacacagttaaataattgtactgtgtatataagatgtcaaaattgagaagttgcaaggctaaatggaatttctcagttttttaaactcttactttgtacatctgaaattattttaaaataaaacccttcgnaaaaaaaaaaaaaaatgcggccgcaattcgagctcacttggccaattcgccctatagtgagtcgattacaattcactggcccgcgttttaccgtcgtgactgggcccttgcgttannn

SEQ ID NO: 20320 - DNA, 308 bp, Homo sapiens; identical to SEQ ID NO: 20197
  misc_feature 308: n = A,T,C or G

SEQ ID NO: 20321 - DNA, 1063 bp, Homo sapiens
accctaatgttttatataattatttactaaaccattccaggtgacttaattacaattgttgttttacatacatatatatacctatctctttatgtatctgtgaatacttactctatacagttcctagaaaacaaaatgccttaagcattgcatagttacaactcacttggcctgcttacttccttttaaaggagggaatgctttagggagggggaagatgcaggatggtttttaacccctatgtgctattcattcattggacatcttataatgtaattgtgttaaaactgcctggaaattcctaacagttcttagctttttatttgaagaaattttggagtgatgaaaatatagtttatttagggaaattcaaaagaaagggttaacatgaatccagcaaaacaaccttatccatagtgggtaaaaaaaccaaatctgctctgcaacctgaccctacttcagagttttctcctagttccttttccctactgttactttcccagtccttgctcctaccctccttgtctaatgaacgtgattgaattaccatttagaatgtccttctcctccaacctcaaccactatggcatgacccatgtagctagtgtcagcgatgtactgttggacaactcattcactccaccttgtcagcggatgggcggaatggtctcttttcggacttttgaagattttgtcaggtaagacattgtggaactatgtctgtacaaggggagccatggacatctgtgttttggggtctcatctttctgcaaaatgaataaaggtctcccgaatagccatgagccagctaaaaagatgtaacccttgctgtatatgccgttggagaggtatatatccttgcatttctacctctcattcagattctacaagcctctacttgtagtatgggcctggtcagaaaaaaagaaacaaacaaaaaccatcttttcctgtggagctaacagaagaagctgtctgctctgtgatgagtgaaatgtcaggagaaattaaacataacactagagtgagccccacaagagacaatacatcttttgattaaatg

SEQ ID NO: 20322 - DNA, 951 bp, Homo sapiens
  misc_feature 947, 948, 949, 950, 951: n = A,T,C or G
tccgctcagcttatattctgttgaatatatgcagaattcttagtgtgaaaggtgatgtaccacttcagatcagttttcactggagatgactctgtaatgggttgctgtagctcgtatccatccctagtcactttgccaggatgaatgctgttgggcagcagtagcctaagttacggaaggggagcagattgaatggggttttgagacatcttctctgataccttagctttccttctgctctggtcgctatccactcagtcgtgtgctagaaatgtttaacaaccaggatctctggggtgggggtggggggggaagccctgaatttgtagcattttgctgcaaatataaattataaataaaattctaatataaattagaattttatatcaaattctttgatataaattagttactcctcctgtggctgatttcaagctaccaccttagagttcagaaaggatgtgcacagttggctcagagccagtgctggcaaaccattgcatttactccacccaagagtggattttcacataatttctaaaataattttttcttatttatatactgacttttcaaaatacaaaattaaaatatcatgtctgacttcagtgatctttttctttttctttttttagaaatgagatctttcagtaatcctttaatttaattttttagagatggagtcttggtgtgttacccagggtggactcaaactcccgggctcaagtgatcctcctgcctcagcctcctgcatagctgggctacaggcatgcaccaccacacctggcttagtaatccttctttattaatggtttgtcacagtacgtttgtgatgttatattgctcatggcatactttatgtgttcgaacaaaggtggaaatttccattgatttttttttttttaaatgtatgcacaaacaatctggattttgaggagtacggtcannnnn

SEQ ID NO: 20323 - DNA, 2506 bp, Homo sapiens
  misc_feature 2503, 2504, 2505, 2506: n = A,T,C or G
tagggcgaattggagctccccgcggtggcggccgaggtacatagtgtttataatattgtaataatatattttacctgtggtatgtgggcatgtttactgccactggcctagaggagacacggacctggagaccgttttaatgggggtttttgcctctgtgcctgttcaagagacttgcagggctaggtagagggcctttgggatgttaaggtgactgcagctgatgccaagatggactctgcaatgggcatacctgggggctcgttccctgtccccagaggaagccccctctccttctccatgggcatgactctccttcgaggccaccacgtttatctcacaatgatgtgttttgcttgactttccctttgcgctgtctcatgggaaaggtcattctgtctgagaccccagctccttctccagctttggctgcgggcatggcctgagctttctggagagcctctgcagggggtttgccatcagggccctgtggctgggtctgctgcagagctccttggctatcaggagaatcctggacactgtactgtgcctcccagtttacaaacacgcccttcatctcaagtggccctttaaaaggcctgctgccatgtgagagctgtgaacagctcagctctgagtcggcaggctggggcttcctcctgggccaccagatggacagggggtattgtttgcctcactcctggatgctgcgttttaaggaagtgagtgagaaagaatgtgccaagatacctggctcctgtgaaaccagcctcaggagggaaactgggagagagaagctgtggtctcctgctacatgccctgggagctggaagagaaaaacactcccctaaacaatcgcaaaatgatgaaccatcacgggccactgttctctttgaggggacaggtttaggggtttgcgttcgcccttgtgggctgaagcactagctttttggtagctagacacatcctgcacccaaaggttctctacaaaggcccagatttgtttgtaaagcactttgactcttacctggaggcccgttctctaagggcttcctgcgctcccacctcatctgtccctgagatgcagagcaggatggagggtctgcttctagctcagctgtttctccttgaggttgcggaggaattgaattgaatgggacagagggcaggtgctgtggccaagaagatctccgagcagcagtgacggggcaccttgctgtgtgtcctctgggcatgttaacccttctgtggggccaaaggtttgcatcgtggatccagctgtgctccagtctgtcccctcctcctccactctgactgccacgccccggaccagcagcttggggaccctccagggtactaatggggctctgttctgagatggacaaattcagtgttggaaatacatgttgtactatgcacttcccatgctcctagggttaggaatagtttcaaacatgattggcagacataacaacggcaaatactcggactggggcataggactccagagtaggaaaaagacaaaagatttggcagcctgacacaggcaacctacccctctctctccagcctctttatgaaactgtttgtttgccagtcctgccctaaggcagaagatgaattgaagatgctgtgcatgtttcctaagtccttgagcaatcatggtggtgacaattgccacaagggatatgaggccagtgccaccagagggtggtgccaagtgccacatcccttccgatccattcccctctgcatcctcggagcaccccagtttgcctttgatgtgtccgctgtgtatgttagctgaattttgatgagcaaaatttcctgagcgaaacactccaaagagataggaaaacttgccgcctcttcttttttgtcccttaatcaaactcaaataagcttaaaaaaaatccatggaagatcatggacatgtgaaatgagcatttttttcttttctttcttttttttttttaacaaagtctgaactgaacagaacaagactttttcctcatacatctccaaattgtttaaacttactttatgagtgtttgtttagaagttcggaccaacagaaaaatgcagtcagatgtcatcttggaattggtttctaaaagagtaaggcatgtccctgcccagaaacttaggaagcatgaaataaatcaaatgtttattttccttcttatttaaaatcatgcaaatgcaacagaaatagagggtttgtgccaaatgctatgaacggccctttcttaaagacaagcaagggagattgatatatgtacaatttgctctcatgttttaaaaaaaaaaggtaaatgtaacttaatagttttgtaaatgggagagggggaatctataaactataaatacagttattttattttttgtacatttttaaggagaaaaaaataaatattcataacataagaggaaaaaaaaaaaaaaaaaaaaaaaaataaatattcataacataagagtaaaaaaagtcgacgcggccgcgaannnn

SEQ ID NO: 20324 - DNA, 727 bp, Homo sapiens
acctttctatatttagattctatctttgtcaagcaagatgacttgtttgacagggctctggtttttcacctctgaaaagctactcatccacagagcttgggattgaggggagaggaaagggggaggagatctggcttctctctccaactctgaacagatgggatcagaatagggcccttctacatccctagccaagatgcctgggccttggcagttgtcccaggacatagacaatggggtctgatggcagcttctcagacctggctttccctgggcaagaggcttttcctgaggctggcaatgccatttcttcagactcagaaaagggatttagggagggggaaatggggactgcaatgaggcaactcttgacagcttaccctggaaaactaggacacagcttgtgggagcccagcccagcagctctgccatctgacccttcttctgcctctgccaggactactgtcctggaagacaggcagaaatggcccagggacactggtctcctgggtgctgaaaagagagaccagggtctgggaaaaggggtgaggagtgaggggagaagggacaggttgctgggatggtgcaggtagctaatctggtatttctctttttggtgaagcagggctttggggataggcaggagcaggtagcttctgagcacagccaccatagaaaagatttaacattaggtaggggaagaagtttatgtgctcatacatcttag

SEQ ID NO: 20325 - DNA, 617 bp, Homo sapiens
accccatatatgctggtggtttctaaacctaaattgttgtcccagcccattcctacttgcagctcggatgtgccttgctagcctggcttctctacctggcacctcacactcaggatgccaaaaaaagttctgttttctttccccgaaatcctgttctctgctgctgctccactgccacctgttttcttttcttttggttgctggttcccaccagccattcagattccagccggacacacgggattgtcctggactcctctgaattcctcatcctcttcccctggcccacatccagtgggaggacccccgtcctccctcgttcacctcctgatgacataaattcttgaccgtgggctctttgtatctcaccgaaacttctgcgcccgcatattccccaactggtctcctaaccttcacttgtgtccccaggaattctgtccctccacaagacccagccccaggggtcatcttcctaaaacaaatctgatcccacatcaccaatattttttgaaattcagtgtctgcaagtcatgatctgtcctcaggtgctcttcctgcctaagccccgtgtaactgcttcatgttccgtcaacagaatcggtgatggttcttggtgt

SEQ ID NO: 20326 - DNA, 466 bp, Homo sapiens; identical to SEQ ID NO: 20303
  misc_feature 1, 2, 3, 466: n = A,T,C or G

SEQ ID NO: 20327 - DNA, 187 bp, Homo sapiens
  misc_feature 178, 179, 180, 181, 182, 183, 184, 185, 186, 187: n = A,T,C or G
acaagcagccacttcagttttaccacattcatcttccacacactgatgaaccatatggaggcagcaggaattgaagtagaaccagagggagtagttaggacagacattctgattcattcattctgattctcactattggtcaggaggtaaaggtttcattggaatttttccttctgannnnnnnnnn

SEQ ID NO: 20328 - DNA, 668 bp, Homo sapiens; identical to SEQ ID NO: 20192

SEQ ID NO: 20329 - DNA, 1084 bp, Homo sapiens; identical to SEQ ID NO: 20306

SEQ ID NO: 20330 - DNA, 792 bp, Homo sapiens
  misc_feature 783, 784, 785, 786, 787, 788, 789, 790, 791, 792: n = A,T,C or G
actcaccttgtattagctgagtgactttggttaaggacagttacttaattatcctgggtctcagtttctctctttgaaaaacagattcattcactaaaataatatttatgaagtattcattttgtgataagcactagtctagctaccggggatatacatttacaaaacagattttaaaatatcctgtcctggtggacctcacattacgttcattactaaccgggataatttcagtgcctctctcataggattgttgcaagaattaaattgatgaatacatacgtaacacttataacagtgtcacaaaatgagagctcagtaaaagccatcatcaccataatcaaatattgaattttcataaaaagttttcctttatgttttcccattccttgtttccttggaacttagaaataatagatttaagttataaaataatagtgttaatgtagtatcactaggcctcaatttccttacctataaaatggtgatatccccctctacagtgttggtataaaaataaaatgaaacaatttaaatgaaagtgctttgtaaactatcaagagctccacagactaaatatgtcattatgtagcaagtgccttggcttaagtccttgcactcagaagtccttcaatacacgttaattgaattaatttatggcctaagcaattgcatagatactatttgagcagttctgaaatacttgagacccaagacactaacctattataagtaggtaacaagctactataatcaacttcccgataatttaataaagcctannnnnnnnnn

SEQ ID NO: 20331 - DNA, 371 bp, Homo sapiens
  misc_feature 369, 370, 371: n = A,T,C or G
accacgtcattactgttacctgggggaaaaaagtaaaaagcactgctcccagctagcactggtttcgtccccacactcaactgtgtctggctccgataatggggcacattttttttttggagaatcctttctttactattctgatgggcaaagattgaaaactggcaataaaaagaaattaaagctgtactttttcataaacagatggcaaaattttatgtgtatgggtgtatgcatacaagaaagggaaatcaagggccgggcgcggcggctcacgcctgtaatcccagcactttgggaggccgaggcgggtggatcatgaggtcaggagatcgagaccatcctggcttacaaggtgaaaccccgtgnnn

SEQ ID NO: 20332 - DNA, 419 bp, Homo sapiens
  misc_feature 418, 419: n = A,T,C or G
acattttattcatccgtcgtttgggtcagggtctgcgggcagacacaggtagctactgccctgttgtgagaagcaatacctcaattggtgccccatgtgaggagagctgtgtgaggacagtcaggggtctgcagaaacagaccttccgcagtcggagcccctttgtaaggcaagctttgaaggaagtgtaaggaccgctttcatgaggaaagctgcaaaggaagcctgaggaatgcgacgggcccccgggaaacaaaggtgaagaaaaaccgcgtggtcaagtcagtgagtaactagtaagtcattggtgcccactcaaggttaccaagttctggggaaagttggttcaagctgagatttcatcatgggacaacagttattagcacagcagaaacattatataaaagtattacaacann

SEQ ID NO: 20333 - DNA, 207 bp, Homo sapiens
  misc_feature 1, 2, 205, 206, 207: n = A,T,C or G
nnagcttcaccgcggaggcggccgaggtactatttttaagaaaacactgttggcatctaatatatagaaatgtatacattttgaaagtgtaatgtttggctttgaaactcttctcccagttattgagtagcaccaattcagaagcacccatcaggagtataaggaatttttctagacttaatgtatttatttgctttaacaacannn

SEQ ID NO: 20334 - DNA, 651 bp, Homo sapiens
  misc_feature 1, 650, 651: n = A,T,C or G
ngaggtgacttagaggatcccgcgcgttgttgttactatttaatcctccagatctattctccatcctttaccctgtgcctaggaggctgcgtcatgtactacataaactgggctctttgttctctggctttaaatcgggttcaataaatgagaagcaacaaccagggtctctctggactcccacaactactctctccctttgcccttgctgggccaaatatggtgcaacttcctatcattgctagtccctaggtgctgcactattccttgctggattcccgtaacccttcccataccattgtaaatacctgcttcattacactctttgacctaattaagagtgttacttgtttcctatcaggatactaatagagagggacacctaactcagtctggggaagcctgggaagaattctcagaggagatgatgcttcagctacgttttttgtttgtttgtttttttgagactgagtctcaatctgtggcccaggctggaatgcagtggcacgatcttggctcactgcaacctccacctcctgggttcaagcagtcctcccgcctcagccttctgaatagctgggttacaaacatccatcaccgtgcccagctaatttacttatttggtgtaaacaacaacgcacgtaactgcnn

SEQ ID NO: 20335 - DNA, 806 bp, Homo sapiens; identical to SEQ ID NO: 20267
  misc_feature 1: n = A,T,C or G

SEQ ID NO: 20336 - DNA, 440 bp, Homo sapiens
  misc_feature 440: n = A,T,C or G
acagcagaactgcatggatcaggtaagtgtgctgagctgtggatcctcctcattcctgagctgggtgtgtagagacaagagcaggagactaggggctgatgatcttttagtcacatccatttaccccagagtgctctatacaaatagcatttttatgtattccccggcatgaaaaagctggaaagcaccaagagaaggttggtgttaaacaacatgaagttttggaatctcagaaagtctgaatgagttaatttttttgagctttagcatacttatcattttataatgaggataattccttaaagcaattctgtccaatagaactttgggatgatagaaatgttctgtatctgagctgtccaatggtgtagccactagtcacatgtggcttttcagcatttaaaaaatggctagtaaggttggggcacagtggcttatgn

SEQ ID NO: 20337 - DNA, 479 bp, Homo sapiens
  misc_feature 478, 479: n = A,T,C or G
accagccgctaagcatacaaagattcaaggttaaaaaaatcctctcttcattcaaaaagttcagcgtctagtaggatgaataaatgaatgaatgaataaaccaagtgaaacactgccaagtgctattgtttagatctaaaccaaagcctgcagagggaacagtggactctacctgggaagattaagaagatcttacccaagtggggacagggaacaaggtctcaaggtgtgagatgtcttccaggtgaagaagcgagagagggccattctaggcaaggagaaccccagagatgggtcaaacaagaggttggaagtaagtaggaaaaaatagtgaagggtgaaaagatatctgtcattttaaaatattaataaaagacagattatgttggattgagaaatgggtgacagtttaagatgtcgggcaggaagtgtacgctcctcttttaagaaacatgaagtgcctgtagtcccagctacnn

SEQ ID NO: 20338 - DNA, 397 bp, Homo sapiens
acatgagtctcttttttttaagaattttaattttcctagtttcttatctttttaatgattattctttaagtggtatagctccattctccaagacatttaagacatgcgcttttaagagcagctgaaaattattggttgtttactatgggttttatccatttgtatactgtttttttttctcagctatcttcaaaatagccataggaggtagattccattattattttactctaaaaagagaaaactgagttttaaagtgttaaagtggcaggaccaagatgaagatacgaggtgaaagtaactaaaggttgttagcataacaattcaaccaaagatgcaattgaaacaatatgtctttgctgtcatgtctagacaatgagatggccagattgcaggc

SEQ ID NO: 20339 - DNA, 2843 bp, Homo sapiens
  misc_feature 1, 2, 3, 4, 2815, 2816, 2817, 2818, 2819, 2820, 2821, 2822,2823, 2824, 2825, 2826, 2827, 2828, 2829, 2830, 2831, 2832,2833, 2834, 2835, 2836, 2837, 2838, 2839, 2840, 2841, 2842,2843: n = A,T,C or G
nnnnaaccctgtcattatttcccctccgactgggccggtgccatcggaaaccggagtgaccagaggagggacacgcatccaatttcactgggctgcaagatatcaataagccttgcctctttaaactacttatgtacaaataaaagtgatggtgagaacctggctcaggaaatgcagtagcaggccatattgcatccaaaggaattactcacagctgtgctgtgtgcattctctgtgggcctagcagggaaggggacagccctgtggcaatgggcatgacacggatgctcctggaatgcagtctcagtgacaagttgtgtgtcatccaggagaagcagtatgaagtgattatcgtcccaactttgttggttactatcttcctcatccttcttggggtcatcctgtggctttttatcagagaacaaagaactcaacagcagcgttctggacctcaaggcattgcccctgttcctccacctagggacctaagctgggaagcaggacatggaggaaatgtggctttgccacttaaggagacatccgtggaaaactttctgggagctaccacacctgccctggctaagctgcaggtgccgcgggagcaactctctgaagttctggagcagatttgcagtggtagctgtgggcccatctttcgagccaatatgaacactggggacccttctaagcccaagagtgttattctcaaggctttaaaagaaccagctgggctccatgaggtacaagatttcttagggcgaatccaattccatcaatacctggggaaacacaaaaacctggtgcagctggaaggctgctgcactgaaaagctgccactctatatggtgttggaggatgtggcccagggggacctgctcggctttctctggacctgtcggcgggatgtgatgactatggatggtcttctctatgatctcacagaaaaacaagtatatcacatcggaaagcaggtccttttggcgctggaattcctgcaggagaagcatttgttccatggggatgtggcagccaggaatattctgatgcaaagtgatctcactgctaagctctgtggattaggcctggcttatgaagtttacacccgaggggccatctcctctactcaaaccatacctctcaagtggcttgccccagaacggcttctcctgagacctgctagcatcagagcagatgtctggtcttttgggatcctgctctatgagatggtgactctaggagcaccaccgtatcctgaagtccctcctaccagcatcctagagcatctccaaagaaggaaaatcatgaagagacccagtagctgcacacataccatgtacagtatcatgaagtcctgctggcgctggcgtgaggctgaccgcccctcacctagagagctgcgcttgcgcctagaagctgccattaaaactgcagatgacgaggctgtgttacaagtaccagagttggtggtacctgaactgtatgcagctgtggccggcatcagagtggagagcctcttctacaactatagcatgctttgaagagtctcgggcaagaaacattcatgcatgagtatatgttcttggaatcaattcctctaagaacagagaatggtctttcccagggacacaaagggagaaatgggacatggattcttgatcttcctttacacatttctcgggaaatctgaaatgatgctggatgggactctacacatcctgagctaagacatactgtcagtctcacttctgctgtcccagtcctagaaatcctgggtagaagtggtggacctgtgcaaaggaggttttagaactctgcagtatttgttggggcatggcacaaataagctcatccctcccgtccgaggctagtttcctctggaaccacatttttatctagatgaaaatttggaatgaaatgaaggaatagaaatccaataaaagagttgaagggaaagaaaatttaaggttcttcttgctcaggattacagatatggaccaacacctccttcaagaaaaggtggtaggacacaaagttcttcagtcctgagccctacatgtggggttggaggagaactataacggaaaaacctctgagtttcaccttaggtatagataaaagaaagatggtccccttttatctgattctgagacaggtaaattctgtttgttactacgtttaattagaaggtggaggagtcatttcatgattaagaacattcaacatgtattgttcattaagctagcttcctagttccgattagactaaggagactaagcctagagagtcaatgttagaacagtgaaaagaattctgtgtgtgtgtgtgtgtgtgtgcacaataaataggaaatgtagaaaccaagcaagaaggcttagtagctcagtctttaacaagggctagaaaagaatgtaatctgatatggaaggatagcagcttctaattttcaatcatctgttgatatactgtgaaacttattttattaaattaatatttattaaatggaaatatgcttttctggtttataactactaaaaatatcatagggaggataaaagtaaataagtgaaagttaatgccaatagaaaaattcaagagataatgtacaatgtcagaaaagggattctttatgtgtaaatggggataatacctatttcacaaggttgttctgaggattgatacgttttgagtatgtatttgtacactatctggcacatatgcgctcaataaacgtgtttctcctttaaaaaaaaaaaaaaaaaaaaaaaaaaaaaaaaaaaaaaaaaaaaaaaaaaaaaaaaaaaaaaaaaaaaaaaannnnnnnnnnnnnnnnnnnnnnnnnnnnn

SEQ ID NO: 20340 - DNA, 539 bp, Homo sapiens
  misc_feature 535, 536, 537, 538, 539: n = A,T,C or G
actaactctaccactcttattctactgattctattactgctattaataattctattattactgattctccttgttattaggcaatattgataaaaagggggcggaaatgacacacacaattacttctttttcgagcacaaatacatatggacccttctgggtgctttccttataaaatgaaatggacctatccattttaggtgtgacatctacttttaaaattaaaaaaaaaaaaactatacacatgtttcagaaaagtttgtaactgtcacagttataatgcaacttgtttagtccatcagtataaatatactttttttggtcaaaaatctctggatggaaaaatgtgtgaattattcttaaaactgtgccttacaacgtggtagaaaattaagccaaaacacaagacagaatgaccaaaaccaccagatgttttcatagaatgcagacattgctctaatgaatttcatccctatggaaaatcccacccgattttataaggttcataatgtgtttccttaaagaatggaaacannnnn

SEQ ID NO: 20341 - DNA, 592 bp, Homo sapiens
  misc_feature 592: n = A,T,C or G
ctagctagctcattggtttagatacgggtgccggtgaaggtttgtggcttaggaggtagattagatatttatttccattggactgaggcttaagctcagtttaatgctcatggatatggataacttattttgattcacctccagaaattgtcgttaagcaatttgtgtttgtgcaagtgttaccatctctcacaaaggatatgagtttctgaacactgatattttatagtttctgtatcattatactttgcaagattttggtcaaaaagaccaaaagctttatgtcaaaatgggaaagtagtgataataaaaagttactcagtatctttttctttgcattaattcccatgaatggattaaactaagagattaaccatacttaggggaaatgcaaacttttttctgttttcttttttttgagacagtgttgctctgttccgcatgagtgcagtggtgcagtcatggttctctcacctcctgagctcaacctgtctttccatctcagctttccttgctcttttaatttacgaaaatgttcctgtccatagccactcctgggacaagaataaacattgctttgttgaaatagtgn

SEQ ID NO: 20342 - DNA, 376 bp, Homo sapiens
  misc_feature 376: n = A,T,C or G
acttttatctgacagaggcttcatttttctcaaatattcctttgaatcaaagacatccatcatattaaaaagagtaaaatcatttcagggaggattgctagaggatacagagggcagggatttagccttccaggtgacctctgctggggtcccaaggggtgggacagggtttttagtcactaatttaaaagtataaaaaggtttccaatgctttataagttaacaaacccatatcctgagaattcaaagaatactgaatggcaacattataaatagtaacatttgctattaaaaaaggcagtaagactctagctacctgaaaccaaaataagcagttaaggccgggcaccgtggctcactcctgtaatcccagcan

SEQ ID NO: 20343 - DNA, 382 bp, Homo sapiens
acctgctaagaatattttcagctacgagtatcagaaaactagcctagaggatcttaaacaaatagggtttttcacatgtaacaagaagtttctggtttgcgtcagctgctccatatcaccaccaggagcccagattctttcttaccttttttctcccctccctagagagctttctgcatttttgtgttcatggttgttgccccctggacacagaatttgacagaattgccaaatgtatcaacattttaggcaggaaaaatcgtaacgggcagaaggctgtatcatccatgtctgaaatccttttttagaggacaaaattttgtccctacaacactgctcagttgatttctgcttatatctcaatggccatttaatggccagt

SEQ ID NO: 20344 - DNA, 563 bp, Homo sapiens
  misc_feature 1, 563: n = A,T,C or G
ngtggaatacaggtgtcccatgagtacatcttgagccagttgtcacagctctgtgttaaagaacccaactaatggttcctagtttttaagaaggttaaggactaactagtctctagaccattatgagattaagataatcctgaaataaataataccgaagaagtaactttctaagaacatacagcccagaaatgactgttagaattctcgcctcagatgctattcatagcttataagtagccttgctcttctcaccatgaggatttccataacattatttttaaagtcaggcacttctaaaacaccatgtgtgaaaacaccctaggccaatgcatgtaagaaaaatgtggaaccatatttgatcatcagacttacatcacgtggagtgggcttctctctttctctttgttatatttaaagggctctttcaagtatagtaaaaacatattgaaatatagactcaaacttctgaatagctcataattggacatttaatttctaaggactgactagggtttacgtgactttcatgatgtctcatatttattacgtagtagatgtan

SEQ ID NO: 20345 - DNA, 697 bp, Homo sapiens
  misc_feature 688, 689, 690, 691, 692, 693, 694, 695, 696, 697: n = A,T,C or G
acatttcaggctgaagaaatggcaaatcctaaggccctaaagcaggagcaaaattgacatgtttgaagaagacgagtgtgactggacctctgtgattggggggaagcggcgcaggatgaaacgagggaggtatgtaaggaccaaaacatggaaggaaagcaagattcccagaaaaagtggatgggagaggcactatccatgaacatgatccagttgtccaagaaagttaatttagcagaaagaaatggaatgttaatgttggttcagatgcagaatctaatatgtgttttattttaaataagggagagttaagcatcgttaaagacataagaaaagagaaagctgactccttttcttccagtgaccattagtaacatattctcccacgaggcacacagccacccactcaatgctgtcattaatcccacacagataggctttgcctggggagtgaacatatggtatcccctgaagcttttgtcttttctgcttgaagctagtttgtaaaaatcaaaaatgatattgcatttactttggtatatttctaaagagtttttttttttttgaggcagagtcttgctctgtcacccaggctagagtgcagtggcgcaatctcggctcactgcaacctccgcctccagggttcaagcgattcccccgcgttaattaattctagaagacttccgannnnnnnnnn

SEQ ID NO: 20346 - DNA, 561 bp, Homo sapiens; identical to SEQ ID NO: 20209
  misc_feature 1, 2, 3, 4, 5, 6, 7, 8, 9, 147, 148, 149, 150, 151, 152,153, 154, 155, 156, 157, 158, 159, 160, 161, 162, 163, 164,165, 166, 167, 168, 169, 170: n = A,T,C or G

SEQ ID NO: 20347 - DNA, 466 bp, Homo sapiens; identical to SEQ ID NO: 20303
  misc_feature 1, 2, 3, 466: n = A,T,C or G

SEQ ID NO: 20348 - DNA, 833 bp, Homo sapiens
  misc_feature 1, 2, 833: n = A,T,C or G
nnacaaggagcagcaccgtgagttatgtgacgagaatctggttgaagacatctcgcggattcaaatcgaacaggtaatcagagcacagcattttgtttgggttaatcacctgggttagagaactgaggccagtgagactgcctgtgatgcacaggatcccaccccaccagccccttttcaaagcactttatcccgtgagtctcaagggaggagtctgagtgtgggggtaacaggtcctgtgtgcagccacagtatttcaagtccattcatggaagcttggcctttgcttcatattcactttctgcacaatgggaataataatatctatcttgtgggctcattgtgagatgtgaagcaccctttgggtgctggagagtagtgaattccttttcttcctctgctccttgtatctgttgtaccctgagattgcatgtgcgcacgccctttctaatcttctgactttgagtgtggctggtctgtagcttttgctcattcttcctaatgaccatgggaataagggagtggggtggggggcaagaatggctgcaggtagtggggagtagttgaaggtgtgcaaaactgtgtctgcacccagcctgacccccaagagtcctgggcaggccccatggtttgggtgtgagtcctggtgagtgtttgctcaaaatctgcttgactattgatggttttttactgagtgttaaatttgattaaactcttaagtcctcctaagtgccaggaagacactctgctttctctccctcttttttctccttgattcatagggggtaggtgagagacaagggcagcttttggaaagaaacatttatagatgn

SEQ ID NO: 20349 - DNA, 383 bp, Homo sapiens
  misc_feature 383: n = A,T,C or G
acttcagttgaaaagttgaccaaagccaaaaaatgtctatctggtggtcagtagtttgataggttcaaggagttgaaagaagcctaggatggctgggacatgtagatcatagtgctaagagatggaaagcaccttgtgctatttggccgtttcagttgtgatgttttttaagtagagtgttgtgatcagaagggccctttagaaagattgtggctagaatatggagaacaaagaggagaccaccagagtggatgtgggaggccaatatgtaggttattctagtagctttgcagtgacttacacaaaggcagttttagcggacttgttcatgagttacctaagagataaaattgacaggacttgagaatgagttagatgatggn

SEQ ID NO: 20350 - DNA, 683 bp, Homo sapiens
  misc_feature 683: n = A,T,C or G
gcgtccgatgggttggaattaatttttaactgtagtgggaaaccactgaagggctttcatgagaggcatgaactaatctgtcttctacatgagatcactctggctctcatctgggttgataaataaggctcatgtacttgtgtagggaagagaagactgtggcttggcttgggatcatagcagtggagttgatgaggagtgattggttttgggacagaatgccccagaatgagggaaagagaggatgaccaaggattttgggttgagtgatcaagctggaagattgaagaaggaatggggatggatttggagtcagcattgtattctggtcatggttaacttgccagtgtatataaatcatccaaatggacatggtgatgaggagttggacctgtagatctgaagcgtagagaggaaggcagagttggagatgtagatatgggagcctctggcctgtggagagagtgtatgatcaccatcctggactacacgtggagaagaaaagatgaccagcgacagagggctgggtagagccagcaaaggagacctcaaaaggatggcagacagggtgaggtaaggtcaggaatgtgtgctgtggcattactgaaacctaaagagaaaaaaatcgtgtttcaggaagaaatcaacttataaatgctgaggaagaaaggctagtagtgatn

SEQ ID NO: 20351 - DNA, 822 bp, Homo sapiens; identical to SEQ ID NO: 20132
  misc_feature 1, 2: n = A,T,C or G

SEQ ID NO: 20352 - DNA, 441 bp, Homo sapiens
  misc_feature 440, 441: n = A,T,C or G
cccgcgtaccttggccgcccgggcaggtactcaatggacaggtgttctgagcagaggctgcatagctcttagaactttaaatgaggcctccagggaagttgattacaatggaatgagccaaacaaggcccgcagagttcacctccacttaataactcactaatgctgtccttcaaaagtccgaagattacagctctgaaccagagcagcacacagagggaaaacacaaggtaatctctcatctaaatgagggagtcagaggctgcaatctcagccatctaagaacttgccatccactagcaagcaggtttgtccctgaaaattcctgagcagtggacttgaaattaaacacagacccagtaaaaaatgaatatcagtaacaaataaaggggaaaacaaggtctattttccagatatagaatctaggaagtgtttaaaacnn

SEQ ID NO: 20353 - DNA, 546 bp, Homo sapiens
actgttttagtagcttacttgtgttttttaaagttcatttctccacccacaggatagctccatatcttccagcaccactaatgagtaagtattagggccaagctggtatctgcagagtgctgactggccaagagtctgcctgtgactcatgccttaggctgtccagcattggggtgctggggggctgtagccataacatttgcaggatttggaaattccacctcaagctccaatcccagggtgttgattctggctaaccatgtttatgcaaagcaatccaagcactttgactcactttgggaatctggcattcttgggcttttgatattgagacagtggaacacttttgtatcagtttaggtcctgccaataattgctatccatttaagcacttgattttttacatatttaccagcaatttccaaggctttaatggatagagttagcactcttctgcaaggagaaattgctccacagtgctaatagtcgtggattcacaggcactcagtgagaatattttaggcataagcttagttttattattgt

SEQ ID NO: 20354 - DNA, 466 bp, Homo sapiens; identical to SEQ ID NO: 20303
  misc_feature 1, 2, 3, 466: n = A,T,C or G

SEQ ID NO: 20355 - DNA, 529 bp, Homo sapiens; identical to SEQ ID NO: 20275

SEQ ID NO: 20356 - DNA, 902 bp, Homo sapiens
  misc_feature 900, 901, 902: n = A,T,C or G
actggttcatgtgtaactcatacatcccacaagcatctactgtgtgcagaatgtctcgtatgtgaaggacacgtgtgggcatataactgtggcttagatgggcttgctaacccctgagaagataatatatcagcagagaacaaggaacatgtagtatgaactgccagtcacacaacctatccagaattccagcaagaagaagtatgggtccatagagctaggaggtgttgaaggaaagattacctgcaggagaggcaatgccgatgatgatagaagattctgagctatggagcgaggcggagccagatgggaattcaggttatctcgggatgtgggacccgtaaccaagcttcttatacttatccaagcaatccattttctcattttaaaaagggagataactatgtggtaagattgtcttaagaattatgtgagatactagttctcaatagtaatacgggtgatggtttccgcagcctggagcgatgttaaagccggccatgtgacttctgaactacgaagcatgcccaggtgcatgcagagattgtaatataacggtgtggggtgtgggtctagaaatgtcttgcaggcaggtggtgcatggtgaggatgccaaggagggagccgagtctattgggtaggaaggagaatgacaaggggggttctcatgaattggccggactaacggggaggatacagggtgtggctgtgttgtccaaacaattcagggtttgttaagaacatcttcgactgtttgtgctggtgtttcacaataggattaagctgttgggtggcggttttccccaacgtattgtgggtgtcaacttggggtaaaaaaggggtaatagtagagaaaagaaagggcttaaaagaaagggggtaacaaaaaacaggataggnnn

SEQ ID NO: 20357 - DNA, 533 bp, Homo sapiens
  misc_feature 386, 529, 530, 531, 532, 533: n = A,T,C or G
actagacaacagctgtttccctggtgtatgatggagccaacaccagtcaggggtatattattacatctgattatcagtcaggataaggtaggcaattctctggtaacaaaccatcctcaaatctcagtgcttatataggcactatttcttgctccactagatggttcatacttgctcacactacccatcatgggtcgttaggagatctctgcttatggtcactcaggaattcatctgacaaaggagccaccaccttgaatatcatgggtcactgtgcctcgagggactgaggcagctctctctgtgagattgctgatatgcaactgggcttggcctctttattcttcttggaccgacttgacttctcactttcctgtttctcctgngaacactcgtaaggaatggctcagtgaatttccttctcaaggtcggcatatggtgtgctggtcctggacctgtttgcactcagatccatccttctgctctgccttgttctggggtgaagaagttgatcctcggcagggtgacnnnnn

SEQ ID NO: 20358 - DNA, 554 bp, Homo sapiens
tatttggttttcaaaagaatcttatggagagcatttttgaaagtagatgtttggaaatctttccaacattatgtgatttttgtctctaaaaatgatgtatattgcttataaaaactcatatctgcacacttatcttagaaactgaaattcctaacctcttttagaaatcttccaaatggagaggttgagttttaaatatattgaggaattctaaggaggacagtggcgcagttctggcttacttaaggcgtgcgaagggaagagagtcagcagagctcgtccagaggcagcaagcctcatatgctcctcagccataccatcagggggttcgaaaaatctgtccacacttaattgttttctttgatactagttgtcctacccagaacgcccagactgatctctttatcagctgccaactgatttgtttaccccaaaaatatgcctgcaagattcacgattcccaggctgccagcaggtttttctctctcctatctgttatacatcctgttttgaattttgttccatgacaacagtctattgacctttcttcttgt

SEQ ID NO: 20359 - DNA, 517 bp, Homo sapiens
  misc_feature 1, 515, 516, 517: n = A,T,C or G
nagtttactgtttcttacatcctctattatttcccttttctcaatacattgtactattcttagccactgttttattacaaataaaaccttcacaggaaacagaaggttagaagaatctgaaaatcattctttcccttataattcttgacttttagatgataaatccagtttttctagcagtatgttaaaattagaagattcatctgaatatatttaggcttaaaacaaactttattcacaaaacacagctatatctatataaaaaaagctatcttcacctcaaaataattcagattatattctttttttttttcctgtttctccttcccttttttttccttttttttttaaagtgatggggtctcactctgttgcccaggctggacttgaattcctggtcttgacggatcctcctgcctatgcctcctaagtagctgggacttcacgtgtgcaccaccatgcccagccagattaccctttctgagtttgctcgtacgcgtgggcgtggtcgacannn

SEQ ID NO: 20360 - DNA, 604 bp, Homo sapiens
  misc_feature 596, 604: n = A,T,C or G
cacattcctgtccttcccagaagaatgtgacacagtgtatctgggtactaagttgccatttaagaacctcttcaggttccccgtctccttgagctatgaaagttttcatgaacacttcagttttaatggcatgccaaacattttgttccatgagcaacgcaacagttttaaaaattgccattgagtgttttaatagaatttagccagttgtttttaaatatatttctatgagccaaggcttacaaaaatgtataaagaggaagtgcccagatataaagaagctttgaaatggttgctgttgcctccttaaaaatcatcattaaacaatctttcaaacagtcagtgtttggctcagtaatttaatcaaaatttgtaagaagtagctagaatgaacaaaaggatgacatggctttgaacagaagaaaagcagggacccaagttatgcaaatactagttaggaatactgaataagataagcgatccaattatgtctgtgagactttcctcaataacctataactaaaagaaaaacaacttctttagccagatgaattttcatcattctaatgagcctttgtagcccgcgttaattaatnctagaagn

SEQ ID NO: 20361 - DNA, 567 bp, Homo sapiens
tccaccgcggtggccgagcggccgcccgggcaggtacatgcatcaggccatggtgaccaattgtctgtggagggtgaggcagaaggaattgttgaggatgactgaggtgtctgggtaacgctttcaactgaaactgggaaaggggatcaactgaaactgggaaagggtttggtgtggcaggtataagtaatgagttcaagttgtatattctgagatggaagtgtcatgaggacattcaggtggagaaatcctgtaggacactggaaacggatccagagttcacagaagacaggataaaggttagggctcattagcatctgggtgatgaacgaaggcttggagagaatggggtcccttatggggagtgtgttgaaggacaacaggccgaagatagaaacctgaagcaaggacagaactttctttcagagctggtagaagagaagtcccaaaagagagacaaaaactggttagggagatagaagaatcacggaggccaagagaagagagtgtttccgagagggtgccaggaagggacagctaagtctgctctggaggtcagggatgtgt

SEQ ID NO: 20362 - DNA, 455 bp, Homo sapiens
  misc_feature 455: n = A,T,C or G
ccggctgggtcccgcactcttgattcccttgcattcaatgccttaccactctacaactgtcttctaacagagctctattccttaatcaccagtgtaatctatccaccttctgcatccctgtcactgagtagctgggtgattctgggaaaaacaaatgctcagagttgtcttcccaaaacccagctgagctcccaacacaccttccaatccctctcagtttcttcagcaatcatcataccctaataccatgaaattcactatgcacaactctttcccctaactgcagcccaagaaaagctgaaaaactcaaaatcctgttatagcttcccactaacctcatctatatccacatctttccagacctctttcctgtcaggttcagaggatttttcctctgcttgctctttattctatccctagggagaccctctgcacctctgctcatccccgcgtan

SEQ ID NO: 20363 - DNA, 638 bp, Homo sapiens
acagcattattagctggggctttcactgaaaaccccagggtctctttctattgtccccatatggttggagtcacaagagtgggagagatggccaagctctctgcagaggatcctggcagcagcctgaaccctcttgctacttccatcaaaggaaaaaaaaaatcaaatatttacccccacgagcttataatattacagagaactccaccatcctgccctgcaaaatatcctgggatttgactaatactagagctgcttttctagtccttgagtgactaggaaggaagaaccaaaagcttgactcccctgcagcagtgagtctctggctttggtttgcacaggaaaccatagggtcacgtaaaatacacatattcgggtctgagaggttctaatgaagatgatctaaggtgtggagcccagaaatcaacattttaataagaatccaaagagatcctaatttacttgcttctattaaaagttttgaaaaccactgccttacacaactttggatacaacacatttagcctacacattatatccattttccaacattcttaggtggagatttcagaactttcagcaaaaaggacagatagttgtgtgatgatactattcccacatgttcatacagcacttgt

SEQ ID NO: 20364 - DNA, 447 bp, Homo sapiens
  misc_feature 443, 444, 445, 446, 447: n = A,T,C or G
gggcggcggccgaggtacatgagatgggagctcgacacattttatttggagaataaaagaaaatatgccgtcatcaaactagagcgtgttggggggcatctggtttacagaactaagtcaaggagaagaactctcaagcaatggtgacatctgccagctctgcaaagtgggccctgccttgtcacacaagtctccttgggcaaatgttttctatgtagattttagacactttcctgtgactttctcaaggtcttttggtgacacatgcagcttgaagcttttgcaaggggctggagtctaatctcttcttgcccagcttggctgcaggagaagaagggagatatgttaggacttggctttgactgaggtggtgtagcctggggttgcaagggctgttgccaaggctttctggtggcatcacatgcttcaggagttggatgaannnnn

SEQ ID NO: 20365 - DNA, 1529 bp, Homo sapiens
  misc_feature 1, 1485, 1495, 1500, 1527, 1528, 1529: n = A,T,C or G
nctgtttgtattcccgtgtcattcactgatttattctcctagcattgcccaagacgaaaattgttgtcctctgatttagactagttatttcctctttaggcaaagaggaactgcactttaacatattaaggcatctttttctttcatttgcgcacaatgctgatttttgcagtcctattttacgccttaatgtgacaacttcctggttttttttttttaaacccagaacttaactattacaacaaacctaggcaatttattttaattggcataaagagactgaataacaccagtaactgactgtggctttcatgtgaccctggtttgtgatgagctgtgctgtgttttgggaatagcattaatattttcttgcagtttgagtttaactatcaacggtttcctggcatcttttggttgatgtcagacagtaacattttagatatggcagcctgattgtcacctgcacatttagagacaattattagactagtggttttccttctaaagccaaagagttttttgataatcttcctatatatactgttacaccccccagttttgtgaacacacaataactagtcttatgacttgcggtaatgctgaataatacatctgttgtgttactttcctaatgtatgatctaagttgtattaccattgtcttatgttttccttaacattaaaacctttcttttgtttgtttaattttgtgtgtgtgtgttatggaatatactgttactaataaaaaattaaacaggaaacccacaggggacaaaagggtgtgtagatggttaagcttgatgtcacacatataaacaagagtatttatagcaaggtttatgtttaaaattgtgtttaaaatggataatttattaatgaacaggaaaataagtctaatttcttaattccacccaaagaaataaaaggttgatcctcttggattctaaaaaaaaagaaggtccatattctacctttttgcagttgattccagaagaaattggtttatagtgaatattcacagtacttgcaggtggtttggcctggaaaatctagatgagtggtttttaaatttagttgcttattagactcaagaaagaaatttaaaaaacaatactgattactgagaccagcttttctagattcttcattcagtaggagtaaggaaaggccaatgaatgtgtattgataaaaaggttcctggccgggtgcggtggctcacgcctgtaatcccagcactttgggaggccgaggcaggtggatcacctgaggtcaggagttcaagaccagcctggccaacatggtgaaaccccatctctactaaaaatagaaaaattagtcacgtgtggtggcaggggcctgtaatctcagctacttgggaggctgaggcaagagaattgctggaacctgggaggcagaggttgcagtgagccgaaatatcacacctttgcactccagcctgggcgacaacagcgaggctctgtctcanaacaaaacanaacanaacaaaaaaggcttttaggttgagtcnnn

SEQ ID NO: 20366 - DNA, 1189 bp, Homo sapiens; identical to SEQ ID NO: 20185
  misc_feature 1179, 1180, 1181, 1182, 1183, 1184, 1185, 1186, 1187, 1188,1189: n = A,T,C or G

SEQ ID NO: 20367 - DNA, 1098 bp, Homo sapiens
  misc_feature 1097, 1098: n = A,T,C or G
acgtataacaacatgaattcatctcaaagacattatgttgaagccagatttgacataactcattctttgtcattccatttatgtgaactttgggaatagtcaaaacttagctatggtgacagcagtcagggcagtaattatctatcgagtgtggagattgactgaaaagggcacaggagaactttctgaaataataaaaatgtcctatatcttgttttgcatcgtagttacacaggtgtagacagttgctaaaacgctaaaaactaaatgtgtaagatttatgcattttagtgtatttaaattataacccccagaaagcattgcctcattttttctggagggtaaatatgctcgttaggagcataaggggatgattttgagaaacccttgctctgtcattctgtcagtaaaccgccactaacttttctggtttcaaaaaagcaaggtccattgatgaaactcctttgtgccttagtgacaaataacattgataaggcctactgtcaacaagagtgtgtttgttatatcttttgtttttagtgactaaatttgtaggaatgatattttcatgggattactcaatctcacccaccattagttgcaggtgacaagaaagctaagttggcagatgtttgtgctagaagctgtgggtttacgtctcctttgtgcatgtgttccagacataccagtggcttggtatttaaacatcatgctcaggtgtgcagggtagtttttgagttataataggtatgcaggcgctgtgggattacttggttgtttatgtaaaaattattttgcactcacttctgaaatgagtgttagtagaatcatctttagaggaggttccaaggcattgaactgagatacctgcactgtttgctgtaaatttaagcttaaaattgaaaccaggttatcagcatttcatgccaggagagagtgggcatgaatgatttcaggaaatgaagagctagatttcagccttgaatttgcttccacccttctgtggcaaattagtgtgggctcactgagcactttatctgcccgtggtaatttattttaccagacagggtgtcactttgtcatccaggctggagtann

SEQ ID NO: 20368 - DNA, 571 bp, Homo sapiens; identical to SEQ ID NO: 20123
  misc_feature 1, 2, 3, 4, 5, 6, 7, 8, 9, 10, 11, 567, 568, 569, 570, 571: n = A,T,C or G

SEQ ID NO: 20369 - DNA, 617 bp, Homo sapiens; identical to SEQ ID NO: 20325

SEQ ID NO: 20370 - DNA, 562 bp, Homo sapiens
acccctcgtttggggttccaaaaaagagtcctctcactttaaaaaattaattaattaattaaaaaggcccagcctagaaactggaaggaaagaattctcatgtaatgtgtgtctatgatatgccaagcatagcagtgctctatttatatcatttatttaactcttatagtaaacccctgttttacagatgcaggggacgtaacttagtaggaagttacttatgcacagtataagtaggaaccaggaagagatggaacggaaattcaaattcaggtcagcctggcactaaaattcccatgtccttttctagtagattcctttacctctctcagagaatccttcaaaattcaaacctcagaagtagattcatttggttctcctacataagcaatatcgggcgtgaacacaggatactgactgggcttccggtggtcagctgggctcagctgaatcaaacggagtgttcattagatcctaatgacggcttcaaccctcattagcttcacagcgtttccacaaccagcatacctcatagctctgggctgctgcctcaaaaaggtgt

SEQ ID NO: 20371 - DNA, 1189 bp, Homo sapiens; identical to SEQ ID NO: 20185
  misc_feature 1179, 1180, 1181, 1182, 1183, 1184, 1185, 1186, 1187, 1188,1189: n = A,T,C or G

SEQ ID NO: 20372 - DNA, 527 bp, Homo sapiens
  misc_feature 1: n = A,T,C or G
nacctaacaaagaccccaatatatgaagcacaaatggcagaatggtagaagtagaaaattctcaatgtgaactgctgactttaatataccaactagacctaacggacaaattcagaaacacctaatcaaaaaccttgaaatgagcaaaaattgattgcattttcacattgttttcaagcaagcaatttaaccaccttgctattttatggcatgcttattttttaaaaaaaagttatgatgaaatatgcataacatcatactcaatacaaagtttctggtatatttataattatgcaactatagccatggtataactttaaaatatttccactatcaggactagacaatcattactgatttcccttttttggacattccattttatcacctttattgtttggtttggtttcgtttttgagatggagtctctgtcatgcaggcttgagtgcagtggtgcgatctcagctcactgcaacctctgcctgcctcgcgggttcaatagattctcctgactcagcttcctgagt

SEQ ID NO: 20373 - DNA, 1189 bp, Homo sapiens; identical to SEQ ID NO: 20185
  misc_feature 1179, 1180, 1181, 1182, 1183, 1184, 1185, 1186, 1187, 1188,1189: n = A,T,C or G

SEQ ID NO: 20374 - DNA, 529 bp, Homo sapiens; identical to SEQ ID NO: 20275

SEQ ID NO: 20375 - DNA, 532 bp, Homo sapiens
  misc_feature 1, 520, 521, 522, 523, 524, 525, 526, 527, 528, 529, 530,531, 532: n = A,T,C or G
ngaacctaacctaatacccattgactacctcctgagtttcttaggtttcaattatttttttgaaatgtcatccatggataatagcttcaattttaggaaagatttaaatgtataactttcctcattcagtgctgtgtcattccacagtacagatctgcgttaatttttgacagctcatatatacagatttttagaaatgtaatagaaaatgattttgcacatatggtgcaagtcttgctggtgtatgtttaatgtggcaacacgtgccagaactgtttggcaaaacatgtcaaatggagtgcttgagtcagaactctaatgtaaatgtgtctaaacagcagtatgtatcattatgatgtatttttgtaaacatagtgatggctgctttcagtcatgtaagtgctggataaaaataaccacttcagttggagtaatgtaggaaaacgtcacccagcagatgggtagtcctctgcaaagttacactgtcagccagtggcactggttctttatttatgtgggnnnnnnnnnnnnn

SEQ ID NO: 20376 - DNA, 406 bp, Homo sapiens
  misc_feature 406: n = A,T,C or G
acagcatggagatcaactaattgtattaaaaattattaggaagatcagttatcttttatctttactaggttaagttgatgaatttgaggaacaaagtttcttcgttattgatagtaggatggattcttgttggtttttaataatcttcttctgggattttagtagaatgttaatacaaaattgctttcatagaaccttttgaaaaaaataattctattcattggaacaccaaaggaattctaaatattcaaaattgttttaatcaaattctgttttaaaaacgactacagtggctcacacctgtaatcccaacactttgggaagccaaggcaggaggatcgcttgagctccggagttcaagacctgcttgggcaacatagcgagacaccatccctaaaatataaan

SEQ ID NO: 20377 - DNA, 811 bp, Homo sapiens
  misc_feature 804, 805, 806, 807, 808, 809, 810, 811: n = A,T,C or G
actttttttttttttttttttttgtttttgtttttttctgtcccctctgagccatggaagatactggagttaacaaaaattttataaactaaagaaagcaactttataatctaaaagaaagcaactttccctcctgtcttttgaattcttattcctgaaagaatggataatgaatcaggagatgagcaaaaacgtatcttttacaaagctctagtcttccaaaagcctctaaactcaaacgaaacctttttaaagtagttttgtaaaagctcaaggtatgccatttccagaaagttgcagatgagcaccattggcattacccaaattctgtcacacattgagcaatgaaattcaggaattggacaatgacctcttggcatatgaaagaattaaaagagggctagggcttagggcagggatctaatcggggaggatgtgctgtccgagcctccctccctcctcctttcctcgccttcaggtagatggaaagaaaggttcagtcatctgagagaatatccgattgtccttgaaatttttttccctattgacaaagcaaggcatgaatgaatattcagtctgattagatcttccacttgacaatgactgtcattacctggctaacaaaataatatacatctgtgtatgtgaaaccacaatggctgatgtttcaaattcttaatacattataatctggttggattgagtggctaacaatgccacaatcccatgaggtaaacaaaacattcatctctggatttcctcacctcagatctaagcatctcctgtccatgcagtacctgcccnnnnnnnn

SEQ ID NO: 20378 - DNA, 1108 bp, Homo sapiens; identical to SEQ ID NO: 20121
  misc_feature 1, 2, 1103, 1104, 1105, 1106, 1107, 1108: n = A,T,C or G

SEQ ID NO: 20379 - DNA, 401 bp, Homo sapiens
actaggaactgagtaatttggaaataacattaaccactttcatataccacacacctatcttgttaagtccaaaatgtcagtagtaataaggcttaatcattaagattaagaatattgttatatgtttggaatatgctaaatttatatgctcttctttgaccaaattcagtgtcaaacaaatgtcaatcacgtatctgatttattccctggtcggcattactgaaagaaaaatgtttatttaaatcagcatgtttcaatttattttattatttttttatactttaagttctgggatatatgtgcagaacttgcaggtttgttacataggtatgcatgtgccatggtggtttgctacactcatcaacctatcactacgttaggtatttatcctaatgctatcc

SEQ ID NO: 20380 - DNA, 1189 bp, Homo sapiens; identical to SEQ ID NO: 20185
  misc_feature 1179, 1180, 1181, 1182, 1183, 1184, 1185, 1186, 1187, 1188,1189: n = A,T,C or G

SEQ ID NO: 20381 - DNA, 619 bp, Homo sapiens
gtagagacagggtttcaccatgttagccaggatggtctggatctcctctgacctcatgatccacccacctcagcctcccaaagtgctgggattacaggcgtgagccaccgcgcctggccgggtcaggctctttctaatctgtttaaaaccatatcacccagaaggtattcagtatatacttatttaaatgaattgaaagtcatatgagcagcatggacttactactttaaaaaccacattattagaaacctaacaccttggaagctctgcatattctgaatgaagaatatactaaaccactcagagggaaatagttattaaccattttaccacagacgactaaacaactaccatggcccttcccttgtttcagctggtctgggtcttaaaaagactttggaaaacccaatctaccctcctctagcagcaaatcaattcccacagtcagccaggaggttctaaccactgccctacctctttcaccaaggaacaagccctagatttttgctgtttctaaaaatatgcagcttttaaatatatccatcatttcggtgctctctactgcagagcttaataaaagcaaagccactgaaattcaggagatgccacagctcaaagt

SEQ ID NO: 20382 - DNA, 401 bp, Homo sapiens
  misc_feature 400, 401: n = A,T,C or G
actttatcacaaggaaaacttattctacattatcctgaccatggggaaagacttgtattttggtaagccaattgttgcttacttattctctgacctaacacactctccttctagcaccccaagctggttccacagggctataatgcaaattcggatacatttctttatggaccttgaaatcagactgtttggcagagaacatagtccacattattttggaaagccagctgtatcaccggagtctacttttatttaatcttttacagccaagaaatctatggcatgtttttgccagtctccctgatatttacatggatgatgaaatgtccccaaatttcactgaaccacagcaaacactttgactactattgtggcaggactgtaataacattgagtgccnn

SEQ ID NO: 20383 - DNA, 417 bp, Homo sapiens
  misc_feature 415, 416, 417: n = A,T,C or G
acagttattatactgcatcttaaatagtggggtgatattaaatggttatattctggaagctcatgcccacactgcctttgaagttcaggctgcccagccacattcaggcattgattcaggaaactcccttggcctttcagtaagagagagctcccttatgccagaactgctttgaaatagaatccgaaacgtgttgtgcacgcgcttactgagctcgattccgatggggtcgcatcatcagcatagctttgtgatgggtaaccggaatgtacagagtgacccacctaaaacatttgcgagaccgtattcatctctcatctatagcattggaaaaaagcctcctaacaggcctccccaatttcatacttgcctacctaaaatatttcttacttgcacagtcagaatatttacatannn

SEQ ID NO: 20384 - DNA, 557 bp, Homo sapiens
  misc_feature 556, 557: n = A,T,C or G
acaaaattatctttattcagaagatcacatagcagcatgttcataatcaaaaacattttaccttagcaataaacaccagtcatttatgcaagagcttcccagggttggtagatatttttattgcttcattttgctctagttaaagaaatggaaaagatgcttttaacttattatcaatcctacatcaggtgtcaagaaatgcaaagcattagaaagagagagggaaagagggatcttcaatattctctgtaaaggagcaaattctgacatggtcatctcagacaccctcttttaattccaaagtctaaccttacaaaagcagagaaaggccgggcacggtggctcatgcctgtaatccaagcactttgcgagactgaggcaggcggatcatgaggtcaggaatttgagaccagcctggctaatatggtgaaaccctgtctctactaaaaataaaaaaattatctggacatggtggtgtgtacaatattttttgtctgtttccatgtgatatcaaatttattctttaatcctattgcatttacatgagtcaaggcann

SEQ ID NO: 20385 - DNA, 1641 bp, Homo sapiens
  misc_feature 1, 2, 1626, 1627, 1628, 1629, 1630, 1631, 1632, 1633, 1634,1635, 1636, 1637, 1638, 1639, 1640, 1641: n = A,T,C or G
nnatagggcgattggagctcaccgcggtggcggccgaggtacttacgttgcctcgtgtcaccaaaattggtgtggctgctgtggtgcggggggctgcactgatggcaccccttcctgtcttcatcaagcagctgcccttctgccgctccaatatcctttcccattcctactgcctacaccaagatgtcatgaagctggcctgtgatgatatccgggtcaatgtcgtctatggccttatcgtcatcatctccgccattggcctggactcacttctcatctccttctcatatctgcttattcttaagactgtgttgggcttgacacgtgaagcccaggccaaggcatttggcacttgcgtctctcatgtgtgtgctgtgttcatattctatgtacctggggaccgctgagctgggagaaagatggcggcagccgtgcgacaggattggccagctcatgaattcgagcggctctcataaagatctggactggcaagatatcggtcacgatccatgagaaacaagcacattccagttcatcatggcagccagcaaccaactcagcacagctttgcacacagctttctgtggcacagcacatggtcaacatgcagcaatgtcagtctcgtgatctcgcggcagtagctgcactgcatttttgccacacatcttcctcaacttgcctgatagcaccagccaacagaaatctcatcaacttcaccttggaaaagatccagcctcagcagatcagtttccattatgcaggcagacacggtatgcattaccatcaagcaccagccatccttgcgatcgtcatcatcatgcagcacacagcacagcaagcattggcagcaaatgcagcccaagtgttggtgggcaattcccttgtggcaacacaggcaccaacacaaccagtcacaatgtagcattcataaactggagcacttacttgaagattgctaggctatatctggaggatgatgatccagtccaggcagaggcttacataaatcgagcatcgttgcttcagaatgaatcaagcaatgaacaattacagatacattataaggtatgctatgcacgtgtacttgattatagaagaaaattcattgaagctgcacaaaggtacaatgagctctcttacaagacaatagtccacgaaagtgaaagactagaggccttaaaacatgctttgactgtacgatctttagcatccagcaggcagcagaggtctcggatgctagctaatctattaaggatgaaaggtggcagaaaattgtggcatatgggatcctagagaacatgtttaagataggatcatccagagagaattcacttccaagaaatcggtggcatggttgatgctcaaccaaaaagacatacagatggctggttcacgattgtgaagaagcgtgtattggacaaaatgtgggtaggaagaaaatactaaaagagtataatgtggagaaaggtgaggatataaagaaccggagaaaaagggaaaaaaggataagaaacagagggataaggatgaatgacaagtagatataattaaacgaacctatggtatagcacatttcagatattggaaataacgagtaaagggtgatatatgaaaggaatagtacannnnnnnnnnnnnnnn

SEQ ID NO: 20386 - DNA, 961 bp, Homo sapiens
  misc_feature 958, 959, 960, 961: n = A,T,C or G
gtccgtaagtactttaatgcattctcattttaatcctcacagctaccctatgaggctgttactgttcttatccccattgtattgataaggaaactgcccagggtactcagctaagaagaggattgctttgggcataggaagcagaatgacgagttcagtcttcctcagtagttggagcacagttctcaaagcccatcaacactttggaatggatttgttgttttatttatgccatcaagggagagttgatatttgtgtattgctaaaaactactaaagtatgtcgatgcttaggtaggaacatacaaaccatatatcctctgggatctgcccaggtttctgtataaggcttgacctacgtaagatcctatgatgaagaccagaaaactttttttaaaagtaggtaaattaaaattaaaatcacgagtttgttcacatttgtcccataggttcctagtgcaaaaatgcagggagataaaagcaaacatttgaactcagtgaagtgagagtctttgggaactcctagatgttagaaatagcaccggggcatcaggtagccaacgttcaattcacttttcacgtttgtgtctttgtagctttagagctgatgagtctgattggtttggaagagagagttaatttatgatgtcactgtgagaactgttgtgaaatcgtgttagacaatacagtaatctgtggattttccctgtagtttggctcaacatccctgtggatgtgtaaagttcaagagatgccaggcaatgaggcctggtggcccttcctgggaccaggcatgcacgagggccaatgagcccaggtcacgtccggccagcctgcgacacagatggcatagggccccccggactcacggcggcaacccgggcgtgcacaccaacgtccgggcctgggcaacggcaccccgccgatcacgggccgcggccagaaaccgaagaggaaannnn

SEQ ID NO: 20387 - DNA, 420 bp, Homo sapiens
  misc_feature 420: n = A,T,C or G
acatgaaaggagattgagggcagggagctcacagaaccaagacagcaggacccaggattcagacctggaaaatttttatttcctggctggtttgtgtgccctcatgcatgttatttacagtgccatgttctttcacatgggaacactgacacaggtgaaatgggaggttccataggatgatagtgcaaaaacattaaagacaatcctagcagatgcagtgagttcaagggagagtccttgtggagtaacacgaaaggcctggtggatgagatgtatgaagatctaaatgcctgcagatagtgagctgtctgcaactaccacaaagcaaaatcatgggcgataactccccagggtaggatctggcctgagcatccccactgggagatgggaggtgatgggctctgtagtgcttagctgaan

SEQ ID NO: 20388 - DNA, 571 bp, Homo sapiens; identical to SEQ ID NO: 20123
  misc_feature 1, 2, 3, 4, 5, 6, 7, 8, 9, 10, 11, 567, 568, 569, 570, 571: n = A,T,C or G

SEQ ID NO: 20389 - DNA, 642 bp, Homo sapiens
acaggttctttgaatgcagtatttattcacatagttttcattttctgtcctgacaaaaacttggtgatgtttgaatgattacagaacaaataggattgtggtttatgtttcctattatgcatatttggcagttgaattatgacattagattgggacatggtgagagggggcaggatacggggtaggaggaggggagcaagttacaaaaggccccagttccgggaagctgggctgagttgttctgtttaacttcttcttcctttattcctatggttttatgattgcaaattggcagtggcagggcagctctgactatatttgctagaagcagatgtccacattaatttagatgtttagggattaaaaatcatagagggtggcgctaggaaatatagaaaatgccaatgaaaatttttgtcaggcaaattaaatctttgcaagtcccccgacttttgaaaactatttacagaactggattttgaaagtgggacatctttttataacataaaatatttggggatttcaaggtttagatctaggacttttaagtcctgtgtttgatttgccaacccctccctctttcctccctccattaattaacctttttccctgaagttcctggaaagcaaataaacactcgtg

SEQ ID NO: 20390 - DNA, 1380 bp, Homo sapiens; identical to SEQ ID NO: 20118
  misc_feature 1380: n = A,T,C or G

SEQ ID NO: 20391 - DNA, 538 bp, Homo sapiens
  misc_feature 1, 2, 3, 4, 5, 6, 7, 8, 9, 10, 11, 12, 13, 536, 537, 538: n = A,T,C or G
nnnnnnnnnnnnncgaggtactactggcttcccagtggttgggttgagtataagcccccaaatatgagtaaaagaagaaaaagttaattcaatcaccaagtcttgctcgcatattaaaaattggatagatgaatgttcaatcatatgttttggctttggccagccagacgaggtcaatttttagatttgaactgcttagaattcttcaggcaagtcttgatggagcacttcttggacagttagaactttaccaggttcacaggagagctcagatgaagcgaacacctcatccacactggtttcctttggagacctttactgttgagaggtggttttcatagccgcaaaatgacaagtgcaagttgagtagatcagtgtttatcaaccaggtgccacattgtgccccaggagacatttgacaatgatggggtgttactggcatctagtagacagaggtcagggatgctgcttaacatcttacaatgcacaggacagttgccacagcaaagcattacccagactcaaatgccaatagnnn

SEQ ID NO: 20392 - DNA, 554 bp, Homo sapiens; identical to SEQ ID NO: 20358

SEQ ID NO: 20393 - DNA, 423 bp, Homo sapiens
accctttatgatctagataaaccattgtgttcttctatagtttttccaactatatttgaataggtgaagttaatatgtttaatcataaaatgctctcagatgcttgcaaaaacaattactccatcagataagaacacatcaaaaatttggaaaatttaaaaaaagtcattccagctatatgcaaataacttttagtatatgcatctgaaaagctaccaaacgtaacaatgaaactctaaacttgtagtagaaaggtaaatgcactgtgatcagctttcacatcacttcagagtatattctaaaacttcttagattctacattatttatagagtgaactctaaattcaaacatttctcaggaacaaaacgactcccatccaattatttaattagggaagaagagatcccaaattttcttgctaa

SEQ ID NO: 20394 - DNA, 466 bp, Homo sapiens; identical to SEQ ID NO: 20303
  misc_feature 1, 2, 3, 466: n = A,T,C or G

SEQ ID NO: 20395 - DNA, 409 bp, Homo sapiens
  misc_feature 409: n = A,T,C or G
acattgcttctgttctctgtcactctgtttctgtgccagaagacacattgcttctcctcattctcttatgcagtgctgtttaagtggtggtccacaaattgttgctggatggtgatgagatcgattaggagtttatacctcaatgtaaattaatgcacttccttccttccttaagaatgtcttgccatgaaaatatcagcatgcctgtggatgtcattgatttaaatgagggcacaagttccgtatttccttgcagatgggtccagactgtttgcagactggccatggtccttgggccacactggaagaagaactgggctaagtattttttatgcctgtgatttaacttctccaataaaccgcagctcttgtaggatatgatggtcgctgtcaggcaaggactagattn

SEQ ID NO: 20396 - DNA, 779 bp, Homo sapiens
  misc_feature 774, 775, 776, 777, 778, 779: n = A,T,C or G
actgcttgaatacactggccaccattgtttacctgttatgggacaggcaagatggggaagcaaaggaattattgccatcaaagagagaataacagcttacctggaaagttccactatttctaagaattacataatgttcatttgcctgatcatggaagagataccccccgtaagaatgggaatctgttcccctctactgatggctgctgggggcagaaagaatgatgttgcatttatctaggtttattagacaaagaaaagctacagcgttggtgagaacaacaaatccaggtaagactgcctaagaagagcctggccctgaaataatccttttcctcctttctgctcatcagactggacccttgtcgaaactcctcctggggaggaacaagccaagcagaatgccaactcccagctgtccatcttgttcattgaaaaacctcaaggaggaacagtgaaagttggtgaagatatcaccttcatagccaaagtcaaggctgaagatcttctgagaaaacccactatcaaatggttcaaaggaaaatggatggacctggccagcaaagccgggaagcaccttcagctgaaggaaacctttgagaggcaaactgggaggtgaaagtgatatatcaaggagtaaataccccgggacaaccagtctttctggaggggcagcaacagtcattgcacaataaaggatttttggaatgtataatatcatctataggtgggctctccttctggaagaatcctcttgcaaagcggacctgcccnnnnnn

SEQ ID NO: 20397 - DNA, 403 bp, Homo sapiens
  misc_feature 403: n = A,T,C or G
actgcttcaaaaggcatgtataactaagtcatatcaaaactaaaatgacaaatgggttattttcaacagaacactttgaaaggaaaaagaaaacaaacaagaactttaggatattctttttgaaggcaactgcatgatgctagattgtgtccacggactagatttctaaaaggccatctaaaatacatttttaaatacttattcctttcacaggtaatatcttacgaagtttgattatttttgaattgtcataatatggacttaatatgggaggaaggtagttccaaaatgacagaagtaatcgcttccacatcacttttgtttttctatttacatatacaaacacatttttctcttgtcacaatagtatctgaaacattaagaggtgctcataaatatttgn

SEQ ID NO: 20398 - DNA, 809 bp, Homo sapiens
  misc_feature 1, 2, 3, 4, 5, 6, 7, 8, 9, 10, 11, 12, 13, 14, 15, 16, 17,18, 19, 20, 21, 22, 23, 24, 25, 809: n = A,T,C or G
nnnnnnnnnnnnnnnnnnnnnnnnnggtctattttgttcattgatcttaaacaactagaacagggcatccaataaatatttatggaatgaagtgagaaagaaaaactaaaaagacctcccagaagtcaaccacacccagatggcccaacaatgcctatattgccctagcagaaccaatttggttcctgtgactaaatttatctcacctccacctgccatgcatcaccactagacccttgctgcaagttttctatcagctcggatgtatggaaccacagtacagtcatatgcagtaaaggcaacaaatgcttgtccttgaatctgaacaatttctcaaggcattcaccgtctgcctttttcctagtttattcaatttgggataaaatgtgttgaatggaagttacgttacttttgcataaaaagaagtctaaaaaaatcacaatttcttttttcaagaatcaagttctaattcaattcatcaagcattaattaagcataaagttatattcaaagaagcactgggctaagagtttacggaacagaggagacacaggtatctcacgagcttaaaatgagggatgaagaaaatatattcacaaataattacagttaaagacaacatgcggggctgggcgcggtggctcatgcctgtaatccaagcactttcggaggccaaggcaggtggatcacgaggtcaggagttcgagaccagcctggccaagatggtgaaactcaaccccgtctctactaaaatacaaaaattagccaggcgcggtggcgggcaactgaatcccagttactcgcggacn

SEQ ID NO: 20399 - DNA, 1361 bp, Homo sapiens; identical to SEQ ID NO: 20142
  misc_feature 1, 2, 3, 4, 5, 6, 7, 8, 9, 10, 11, 12, 13: n = A,T,C or G

SEQ ID NO: 20400 - DNA, 510 bp, Homo sapiens
  misc_feature 508, 509, 510: n = A,T,C or G
acagatttgctacatcatatagcattttttagaccataatttagatctttccatcctccaactaagatttacctttttatatgaagctttaattactttccgcaacacttttgtcaaaatctgaagtcttttaagaaccaagatgtttctgatgtttattttaatgttcagggattttggaggtgaggggctagaaacactgactcctgcccctgactcccgcccctgactcccgcatttattttcataaatgaaaatagtaaaataaattcattaagggtattatgtggagaatagaaacaagagtaaaggactgagagtatattagagaaaactatcataattttggcaagagataatggacatcgaagcttgagtgaaaataactgttagagaaaggagtagaggacctcgagatataaggagaaagtaaagtctaaacttgctaaatggactggatttgtgggatgagtgaaacggtgaagcaaggatgacttgaagtttgagnnn

SEQ ID NO: 20401 - DNA, 642 bp, Homo sapiens; identical to SEQ ID NO: 20389

SEQ ID NO: 20402 - DNA, 1361 bp, Homo sapiens; identical to SEQ ID NO: 20142
  misc_feature 1, 2, 3, 4, 5, 6, 7, 8, 9, 10, 11, 12, 13: n = A,T,C or G

SEQ ID NO: 20403 - DNA, 571 bp, Homo sapiens; identical to SEQ ID NO: 20123
  misc_feature 1, 2, 3, 4, 5, 6, 7, 8, 9, 10, 11, 567, 568, 569, 570, 571: n = A,T,C or G

SEQ ID NO: 20404 - DNA, 629 bp, Homo sapiens
  misc_feature 618, 619, 620, 621, 622, 623, 624, 625, 626, 627, 628, 629: n = A,T,C or G
aggcatgtgtgtgttagaatcaaacaggtcagaattggagtgggagctcctcaatatggtctttgtattatcaaagcaaacattttttggcacttactgtgtaccgggccttgtgccaaacaccttagatgggttatctctgaacttcacatcagtcatatgaggtgggtaatatcattatctacattttacaagtatggaaactggggattactgaggttatttgcccaaggtaacacagatggtagattctggagccagagttggaaactgggtagtttgctccagacccaatgatctagcatcctagatgtggtccattagggctctctcttttcatccgtttgtaaaagagaagttttcactttcttctcaaaccattgagaaacaacttggaactggaagtgcaaagggagaattctaaagaaagcgttttaaaaaggagaaagaacaagaaagcaggacaccatttcctacctttggtattctccaaatagttggcaccaattctcataaaaaaaaaatggcacaaaatggtgcatatttttacacacacacttttgtaatgttcatttaagatttgactacaatttaattaattctagaagtatttcgaannnnnnnnnnnn

SEQ ID NO: 20405 - DNA, 351 bp, Homo sapiens
  misc_feature 344, 345, 346, 347, 348, 349, 350, 351: n = A,T,C or G
acctaaggaggcaacatctaaactggccttgaggaacagccgaagatggcgaacgggacagttcctgaaaagggaatgtgagatttggcaatcaggatagctgtagcctttactacggaaaagtcagtggtggagacagcagacagattcagcgggctgaagagtaagcagaaggtgaggatgggtaggcaggagatagaaaccattattttttgaagtttgatactaaagagaaggaaaggctaatacttgaagggggaagttttctaaatgggtgggacttgagcatgtttactagcaaaaggagagggaggtgagaggccgaacgtaagagaggcagtagnnnnnnnn

SEQ ID NO: 20406 - DNA, 335 bp, Homo sapiens
acaaggacaatagggataccctggagctgtcccagtccagctgagaagggcattctccctacttgtgtttcatcttagggactctcactttgaccctgagtgtgataggaaccatggggaagtctcagctgaggttggacgtgaaaggtctcatgttttaacagggtcactctggccccctccactgagaacaggctgaaggtggcagggactgagtggagagacctcttgggagaccactgcagcaagtcaggtgagagctggaggtggcttggcccaatgggtagctgtgaggtcgagagcaatggctggagccaggaaacctctgagtacct

SEQ ID NO: 20407 - DNA, 393 bp, Homo sapiens
accatttggaacttatttttatttaagttttagctcaaggttctccagaatctgggagttgagaaaatgccaatggaaataggaaatatgaaatatccaggatcaatggtagacttttcttcttactgtaacagtgctctggggcacatttcttaccttgctatttttttggagaccaagaaaatattgcatctatgtccatccctacatagacctcacaaagcataggtcaaattctaataggcagccatgattctccaattttttgttcacaaataagtcgactgacttcctaattggagtcattgggggtaaggagcaacggacaatgtcagagaggaccacctcacaggtggacttgtgaggggctgggaaaagaaaagacatgttcat

SEQ ID NO: 20408 - DNA, 924 bp, Homo sapiens
acgctccagcattacctctaagcaaaccttcaaatatggctactgtagaagcacttctctcagcagcacccctcactctttcctcaatgagaaaagaagttgaggccccaattgcatcctctttactgatccacccaaaacaaactccctgcaggaaagtagagggataagatttccaaaggagatgctgaagagtaaaaagcaatcacacttcaaaataggactttacaaataattaacaacagctccagatccatcctgttctcttctctagaaccactagaaactctcagatctgaaactgtatcatagattacacacctacatatcccactccatgatacacatgttgaacttcctatgtccatatccatcctccacatcctcagagttagcaaacgagttagacatctaagactttgttccaagattcccatgtaaaaagttttcacatactatacaagtttacagtatacaatatactatgcactctcagtaaaaaggacaaattataatgtggtctcttattcaccagtaaaaaaatatctgctcttactggaagcacctaaaataatcaggcagcctacctcacaagactcttaaacagcaatcctgctagtctcagagcaatttataaacctaaatgagaaaacacaaacatgctccagagaaaggtttgctttataactaaaagattcataacattgttgttcatggatgtgaacaactccatgagtcctcagactgtgagtctttagagtttcactactcaaaaaaataaataaataaatagttaataatcttatatggcccttctcatatatgtccaagaagaatggaaacaaacattgactgagcacctattataagtcaccgcaatgctaaggtacctgcccgggcggccgctcgagccaccgcggtgga

SEQ ID NO: 20409 - DNA, 411 bp, Homo sapiens
accctgagaacagcaataatgcacaaacattactattccaacagctgcattgaaacacccttggtaggattgggaaaaagatggattattgccatttggacactccaggactgtccattaatactcctgactaatggaagatgataaagattgggcaagaaaaatgactgcagcaaacgccttggcatcttcaacttgtcacctttagcaagaggcctcttcaacagttcttggactgtgtttggcagccaggcactctcagaacggcaaggagacacagctaacatgatctttgcaatgcaacaaaacaagcgatcttgaggcgacagagtccaaaagatgacagaaaattcatccaactcctgaagcatgtgatgccaccagaaagccttggcaacagcccttgcaacc

SEQ ID NO: 20410 - DNA, 517 bp, Homo sapiens
acctactttgtggggttattctgagagttaaataagaaccaaggagatcctaaatatattcatccaaccaataggtatgtcatttttgtagttgcttaggagttatttctagatgaaacagacaaaactctgtgcttttatagaacttattttctagtggggcaataaatataaaaagttaccatgacttccacaatggcagcatgaggacctctgtagacctacttctcagtgaagtgagcataactgattaaaattatgtaggtctttgggatcccagagcacctttagtctcgggagacgctctgccagccagaaatgatggaagaattgcatagcctggacccacgacggcaggaattattggaggccaggtttactagagtaggtattagtaaggaaaactagaagaggaaaaaacaataaatatgcaagaagaaataaatacatgcaaaacagaatgggaaatattcaagagttggaaaatcaggaaacaaaaggcaaaatgaaggagagt

SEQ ID NO: 20411 - DNA, 421 bp, Homo sapiens
actttattattccgagagagaaaggctagcccgaaaaagctgttacctaagcagctttagcataattgctctctgcacagaagaaatctctagaaatccaattttctctttggataagactaaagaaccaattaagaaattgagctccaaaattcctgtgatcacagcccacatggcacacggggcagcccagtctgcattgctgagggctgaatatctgttttcccaatcacctttctttgcttctttctctttcttgagctgcttgccttttagctgctttattgctcattaatatgtccactggaaattgaaagagggaggaaagggggctcttaacttctgcatttctacttattagtggctttggttaatggtttcagagggaagaaagagtctgaacaattggcccaaatgacgt

SEQ ID NO: 20412 - DNA, 406 bp, Homo sapiens
  misc_feature 400, 401, 402, 403, 404, 405, 406: n = A,T,C or G
actagacctccctgtctcattctcattgaaacattttcttttggctttcataaacctttcagaccaatcttccctcctccttctacttgctccttaaatgtcaatgttttccagggttccattcctacattttgctcatttcttcatccaaccctcattcgctcttgactaaaatttgaccctctcagaatcaagaggagtttgagatcctctttgctacccacacttgttttcaaaccattacttcccctcatcttaaaaagccctctgggctgggcacagtggctcaacactttgggaggccaaggtggcagatcacttgaggcccggagtttgagacaagcctgggtgacagagcaagattctgtctcaaaaaaaaacaaaaaccaaaaacctctgnnnnnnn

SEQ ID NO: 20413 - DNA, 434 bp, Homo sapiens
aaaatttttcgaggaattaatacattagggtgtgactaatcttaactcaaagacatttcaaggtcaaattaactttaagacattagttttataacatttgattgtggttgaatcacaacatgttattggaaacaggctgcctgcttccttcttactccacagttagtgatcctcattcacccatagagttgttaatgacattggagacaggagatgatttgttcgttaggtgctgaacatgactgaggccacttaggtcgaaaaacctggactggcttcaaatgtgcatggaaggaattcactgaactttacaaaattcatctcactaaggttagagatttttcttgcatcattctttcagaaccattgatataaaatgaaaatgtgatgattttattcagccatttcatattgagatattttaaactaccagt

SEQ ID NO: 20414 - DNA, 424 bp, Homo sapiens
  misc_feature 421, 422, 423, 424: n = A,T,C or G
accctggagccttgagcaacgttcttttgcattatgccaggaagaactgctggcaaatgtaagtgggcttagaattcatgactgcagtcagcagcagttgtgtaaatctagggagagactggtatttgacacctgcaagtcctcaaggttaacagaagtctcaaaaagcccaagccccagaattttgtaaaatacatgggtttcacccccaacctaattcaatgtcaccaagaaaaacttgtaagttccaataaggacaaaccaatagtttaagtctgcagaaatattttccatatagaattttagaagtattatttaacctctttaattctctgcttttcaatatcaaatttgttttttgaagccctttttctttgggttaaaagtttaccgaaatgccttttttttcaaaagtaagtcnnnn

SEQ ID NO: 20415 - DNA, 457 bp, Homo sapiens
  misc_feature 456, 457: n = A,T,C or G
acacagttaatagtagtattgtataagtctcatgacagtgtagctccctttcattgttttaaacatgtctgtcttacttgagatcttcctatttaaagcgaaaaaagaaatttttttaatttccaaggataaaagctggggtgataatttttaaaaaacctgaccattaatttttgcgttattatttttcagtgaaacgaaaagccagcaattgtaataaatttccgttcatgaatgataactttagggctctttcaaatattggaagcccaaagttctaactaataacctttaataaaaaatattcatggtagcacattaaaacatttgttttaggatatattattgaaaatggcttttaacttttcttgcctcactgggggaagaggaaaatggaagttgaaagcacattatcctgtaaaaacagctaagcattcaattgtttgtctgttttcnn

SEQ ID NO: 20416 - DNA, 891 bp, Homo sapiens
ggtactatatgctagaaacttggctgaatgatttgacattatcctatttaatgttcatgacaatccaataacgtaaccactcatatctcccttttgtgcagataacaaactgaggcccagagaaatcaaatatgttgtcaaaatctacatcgttgaagagatgggtttcaaatccaggtcggcttggccctcgccacgacttcataatgaaattccatgggtgagtgttaccagtttctggtccatccttgcttatttcaagggtctcatcatcccatccactgtatcactttttttgttacaggctttactcttttctaccatggaaaagactaatgatatttttttcttcataagcttggaaatattatcaatcaccataaaattcagccttcctctggtaactttggagaccctcagagcttttcttatttccagagacaggcggtttggatgagaattattctctttttttcacacaaattggccagatgacatctttactggtatctatttgggaggctgaggctggagaatcacttgaacccaggaggcagaggttgcagtgagccgagatcacaccatttcacttcagcctgggtgacagagagaccctgtaaagactgcatcatcccagctactttcctgctgacttccacttgggtttactcaatgggtgacactcacaggacataagagattagaaagagggataaggttttttatatatctgctccctccttacttaaagccatggttttagcagaggcccaaggtcgtggcttttttgagcagcccctttatcaaaggtctggaaagagtctaccttccccctcacaactgagtaatgtggcttactactgttgctagttctgggtaactcccccgcgt

SEQ ID NO: 20417 - DNA, 685 bp, Homo sapiens
  misc_feature 1, 2, 3, 4, 5, 6: n = A,T,C or G
nnnnnnggactatgtctcagttgcatcaaagccccattaacattgccctttgggatcaaaaagtagtccacccgagaagaaagagtagagttttagagaactggggtgagaattctgggcagatggccaaggtgtgggctccaggctgagcttgctgacacatgacattgtatgtttcaggtactgggacaagttttcaatgtcaaaatctttgaagccaccagggccttttttgtttttgttttttggctaggtcttggcagtactccttcatatagtagtaggttcagaaactcaggctaaggaaagcatccagaaaacattgtctgcctctgcaacagtttgtggatagcttgtaattgtagttctgatcttgtcaatctgtcttataactctaaatgtgtggtctcacctggctagatacagaaaatacctatcttcttatagaagcaggcaatcctcaaccccattaaaaaagtatggtttcttggacattccatctaataggaatgccagtttgcctcctgatatgttgccagtctggccatttcagcagtcactattcagcactagaggaggacttcagtaaaagttcctttgtcagtaagtcttccacgcaacatatttgtttccaggtcctaatggcaattcctcaggatctggagaaaaaaaaaaaaaaaaaaaa

SEQ ID NO: 20418 - DNA, 1189 bp, Homo sapiens; identical to SEQ ID NO: 20185
  misc_feature 1179, 1180, 1181, 1182, 1183, 1184, 1185, 1186, 1187, 1188,1189: n = A,T,C or G

SEQ ID NO: 20419 - DNA, 1211 bp, Homo sapiens
  misc_feature 1207, 1208, 1209, 1210, 1211: n = A,T,C or G
accctgcacacactaggttctcaagaaatattcatgtaataagtgaataattgaatgaatgaatgactaagtgaaacttctctttacaacaagcaaatgtaatagccctttctaagctctcatcatcctcattgtccttggtggattcccaccacactcagaattccttttcacctttccatgcatatgaggccccacctaatcaggtgctggtcttcttagctttctgtctcctaccactttttgtcttgcttcgggaactccactgtcttttctgttataggaacatgctaaggttattcttcatagtcaagagcacaagctctgaacccagccaaatctgtttttgaactcaagttccacttattgctagctgtgtgatattgggaaattctttatgttctgtaaccctcacctccctcatgtgtaaaatggaagtaatgatggtacctgtctcatatgtggcaactacgtggggcagcacactcaaggaatgaaggaagtttcagtgaatgacaactttataaagacagtgttgaggcagcccagtgcagcggtttgggagccaggaacagcgtgtgggccggagtgtggctgcaggacaggaggtcaaaaataagggttgagggtggaataggaagaccccggaacgtcatcctgggagcttgagattttattctacatttctcttgttcttaactatttagggtgatggatctctgcagtaagtggaagagttcttcatggcccccaaggttatatccatctagaacttcagcacgtaatttcatctggaaatagtgcctttgcggatataagttaggtaaaactgaagatgagatcatactggattaggatgggatctaaatccaatgaaaatgtctccataaaaaacaggaaagaacccatagaaacacaaggaagaaggtcatgtgaagatggaggcagagattggagggatgcagccaccggcccaggaatgccagcagccacccagaagctggaaggaaatgagggattctctcctagaacctttagagagaacatggtcctgtgaacagcttgattttggacttgcccatagcttgtatactcttactttggatacaattttatccaaacttggctaaacagtttctcagctatggaaaatttaaaatggagaagattcaactcgatttttacagatcaaaagcaagaaaatgannnnn

SEQ ID NO: 20420 - DNA, 427 bp, Homo sapiens; identical to SEQ ID NO: 20085

SEQ ID NO: 20421 - DNA, 898 bp, Homo sapiens; identical to SEQ ID NO: 20210
  misc_feature 898: n = A,T,C or G

SEQ ID NO: 20422 - DNA, 470 bp, Homo sapiens
  misc_feature 469, 470: n = A,T,C or G
accctacctgtaatatttgtattaataatatcttattagcattttaattagaaatttaatattaatgatttggaatcagtagttttcaacaattttaatagtgcaaatttatttgtagtatttgatggggagatatggtgttttgtgactatatttacaactggatgtatctgggaatatctcaaagtttctcccaaaaggaaaacatttctattacaaatatgtgacttgtgaaaataatttgtaattcttttcaatatatctcatttttttttttttttttgagacagagtcttgctctatcacccaggctggagtgcagtggggcgatcttggctcactgcaacctccgcctcctgggttcaagcaattctcctgcctccgcctcccgagtagctgagattacaggcacccaccaccacgcctgtctaatttttgtatttttagtagagatggggtttcacgatgnn

SEQ ID NO: 20423 - DNA, 506 bp, Homo sapiens
  misc_feature 506: n = A,T,C or G
acgcggggacagagagaaggttaagagcaacaagatgggaggcagctgcatggaacctgtcccactgaggaagtaaaacagagttttactcttgttgcccaggctggagcgcaatggtgcgatctcggctcaccgcaatctctgcctcctgagttcaagcgaggagcaagtgagtagctgggacaacagccctacctgatggactggacttctgcctggattggagtttgatcatgcctccatatgggtgtttaccaggcgtatgcattgaacctgagtttgtcccttcaatacaaggaaaatctctgccgcttagtgattttccaagaaacatgagcttctgcctttcaatgaggaagatactcagaagtcatgttcgagcactccggaaaatgtccttggagtttcaacatttctttggtcttccacatttcattttgtcctgattaaagaggaagccagttgctgtttgtgtggccatgtgagcaggcagggagatggtggcn

SEQ ID NO: 20424 - DNA, 619 bp, Homo sapiens; identical to SEQ ID NO: 20381

SEQ ID NO: 20425 - DNA, 387 bp, Homo sapiens
  misc_feature 1: n = A,T,C or G
natttggtcatggaatgtgttacactgcccagctcagggaaatgctgctcagtttgggcttggatggtaacgtttattttccttggcagagaagctgatcgtcgaagggcatctaaccaaagcggtagaagaaacaaagctttcaaaaggtttgttttctgtttttctatgttttttgacagttcttttggataatgaaggttagtgtatattttcaaggttatagtattttaaccatcagtttacttcttatagctcacaaaatagcaagccagtaacagtatcagataatatataaaataatcagacttctgttttaagaagggtatcgtaactggaatgtgtctttttaagtggatgtatatttatggttttttgaatgttagt

SEQ ID NO: 20426 - DNA, 668 bp, Homo sapiens; identical to SEQ ID NO: 20192

SEQ ID NO: 20427 - DNA, 522 bp, Homo sapiens
  misc_feature 1, 2, 500, 518, 519, 520, 521, 522: n = A,T,C or G
nncagagccaaaccatatcagtggctgtaccataatttagttattgctcagtggttgaacatttaggttgcctctagatttttctatttattagaaacattcagggtttctagatttttcagttttataaggaacattccagtgaacactttcgtggaagacttttgcaggaatttcaacacctaattttgttacaaccctaactttctccatttgttttgatgagtagtaaatttttattttgaaaaagtcttaaggcaaaataaatgtaatgcacttatatttcaaaaatataattgccatatactacctataaaataggagtatttcaggaaatcaaacaaaaacaatgatttttctcaagcataaagaactatgcctggtatgacctgctccttttgaattattaaagtataaaaagttgaccagtatttactgaatgagatttattgcctgccttgattgtaaacacctttggctgatgctgggaattggcacanatgtgaggatggctgtgnnnnn

SEQ ID NO: 20428 - DNA, 757 bp, Homo sapiens
  misc_feature 1, 2, 3, 4, 5: n = A,T,C or G
nnnnnaacttgggcgacagcaaaagaccctgtctaaaaataaataaataaataaataaataaacaaatatgtacagccatccttgtcttcaagcactttgagaacattttagccattgatgtttacatgtggcacccacccatgcaagataggtttctgtatttatacattaaaataccaaaaaaaaaagtatgaaatgccttcaaaaatgttcaaagcttgagagaaaagcttttttcattagtcaaggtgttttgatatggtattaaaataatatctaacaaaatgaaaaaaaaattctcttttctccatgaatgctgacactggggagaatggcaattttaggctgtcaagagcatactaaataagtaaaatatctagaaatgcaatcgacttgcacgggatatgaaaattactggctttcagtcacttttggctatttcatactggcagaaagtaaaaattatggaacacacaagtaaggccttatattacattactattaaatgataaataaagctactatatcttttaagatacatctttactattgttaactataattcaaaaaaattccaattgcttcaatagctccaacatttataagtgaatcaggaaataaataatggaaacgaaaaaaacagttctactgttaaaaaaaaaaacaaaccaccaccaccatctcttggggccgtgcacggtgactcaacacctgtaatccttgcactttgggattgcaggtgtgagccatcgtgcc

SEQ ID NO: 20429 - DNA, 396 bp, Homo sapiens
  misc_feature 395, 396: n = A,T,C or G
acattacagagcatatgatctttcaaggttttgttccacatgtgttatgcatagtaactgctcatttctattaaaaatactcataaattgaatcacattacaaataagtgccatatacttaactgagcaatatacacacatacgcgttcctgataggtgatacaaaggcaagaaattctgagaaattctaagattgtgatctgtatcatttggatggtatagcaggagtggcagagggaggaacgttccctaagttcttcacttactggctcctgcacttaggtaggatcatgtcactagtgctggccaatgagcagaagtatggtgtgccattcctggagtaagggaaacgtatgtgcaattctctaatttattttttgtcttccatcgatacnn

SEQ ID NO: 20430 - DNA, 1128 bp, Homo sapiens; identical to SEQ ID NO: 20289
  misc_feature 1, 2, 1127, 1128: n = A,T,C or G

SEQ ID NO: 20431 - DNA, 381 bp, Homo sapiens
acccagacctgcaagagttgtctcaaacaataacaacagtatacaaatgttaacccaatcttaattcagaacagcttaaatgtaataaggtaaccttggaaactatggcgagctctcaggtagaagctagaactctgtttcacgtgacagaagcagacagattgttaagaatctgttatgagtggagtcccatgccagggcttaccctggccaccacttactagcggaagccttgagcaaattctgcagccgttgtgagcgtcacagagtggtgattgtaaagattatataacattatctatggtcagtgtctccgcatctagcaccctaaagaaaatccaaatgccaactgtttttgtgacagggacaagcactgggtgc

SEQ ID NO: 20432 - DNA, 379 bp, Homo sapiens
  misc_feature 379: n = A,T,C or G
acaataattagatcatggtatcaattcaaacaaagaaattgatgtcctgggaactggttatacaaatacattatttcttctctttgaaatgagtagaaggaaagggaactaataataaaatatcacattattgcctacccactaaaggcagcctgaaattttacaaaacagtcttcctggggtcgtctcgatggtgagatataactgcctttcataatactagaagtactgagacagaagaagaggctgggacccatctggattggctgtaggtaaatttgtttgtgctgggggctgcgttgggactgcttgacgcaaaaacacaacattggtctgagtccgaggtgtcccatttgatattggggcctgggactggccn

SEQ ID NO: 20433 - DNA, 394 bp, Homo sapiens
acataagcctgacgatatggtcttgaggggtcatcctaaggctgttagaccgaaattaaaacaaaccttaccagtagatctgtgtttgtaagacagctctatttagcaggaccatgctgattataccaagagataagccccacagaatgtaagggtgatcacttcaccaaacatgggcatggcattgcaatgttctagtttttcacctcacagaacagcacagatctcacaatcacttcgttaaatagcagcggattcctcaagacatacagtccgcggtatgcatgagcctgagtaagaggttgactttaattttttcagccttgaaaataagaaaagttaaatgctcacgtatataattggttcaattatcactaaaataaagcagtgctga

SEQ ID NO: 20434 - DNA, 631 bp, Homo sapiens
cggccgaggtacttgagggcatcattaaaatcagccagtgttcagtgagagacttgatgatggatttaatagtattaaatgggcaaaaatgcccttggcctttacatgctcatttaaaaacatacaaaagagcagtaattcaggcagttatacttctctcaaagattttgctctaaatcacagatggcagcgggaggccacggctgtgtgctggctcacaccccactcactccaaccgaagccagaagtgctcgttgggtcataattagcaaaccacccgcaaactcgactctttaaatcagaggccagtgactgccaggctggggcatagacgggagaaaacaagcagaaatggtcaaggtgctctctggagcctgccttcggatagctgtgacccccacgttaggcatcaagacagggttccacacctgcgccgccacccctgcagtgtgagcgctgtattttgctttctgagaaagcctcacggtttggctctttggtgcatgaggctttaaggcgatgtgccccctgcccagctgttgcccagctcccagcccttgccacagacagcatacatctctgttttagaaacaaatcatttagtcacttaatcatgaattcccgatgatgt

SEQ ID NO: 20435 - DNA, 895 bp, Homo sapiens
  misc_feature 1, 2, 3, 4, 5, 6, 7, 8, 9, 884, 895: n = A,T,C or G
nnnnnnnnnaaagtacatcgtgatagacatatgtacatggtgccctgggacagataagaagggagtacctggcttggacttgaaggagaaatgagagagcaactatccgcagtagaaggctgagcatttcaaatccctgtgaaacctagggttttgaaaacagtatgtttcggcaacagcaagtggttcagtgtgattggagccttaaggggacagtggaagatgaggctgagcatttagggaggtgccagattgccccaaaggcagtgttctcaatactaaactaatgttcttccaccataaatgagctccccctggcaacttctcatttctatcaatggaactttcgttcttcatatgtccaaaccctgaagtgccatcttcaggtctgcctcagcatttgtgatcagtgctcaagttttgtatcatttctatattcaaaacattcttctgtgcatcctattctgtttccactatctacacactacttatcacctaattagtagataatttcaaaactgtaaatatttgtgtttcttcttgctctctctctcccttttttttttcctggaagttaatttctaaaattcctcattttaccatgttgctgaccctgagcaaaagaggacagtgatattttatttcctacaagcttacatcctttccaagtgttttaaacccataatcctttttctttctttggagttgggagtcttgttctgcacccatgttggaatgcagtgacataatcatggtcccgagcctcgaattcttgggctcaagtgatccttctgcctgagcttcccaaatgtctggactataggtgtgtgccactatgaccagctattttttttttttttgagatggagtctcgctctgtcgcncaggctggagn

SEQ ID NO: 20436 - DNA, 2491 bp, Homo sapiens
gcagtagaaggtgagtttgagatgagaggaacaagtaggaaagagtgatcccctgaaccacctcttcgctttctcagctttcatccccacctaggttttgtgagcctggaacttgagagactgttctgtagcccaggtctcctaagattggctgctggacttgcctgagttgagggtgcagtgggttgaccctgggctgcccagcattcatgtggtagtgaaggaaggaggactggatcaatcccatttcaaagcatccctctctgcagcccgcactgtcctccaatgacactgtaaggaaaccgctttaagacgtatcaacggctttaagtaaatgtattttctggcatctgggagacctgacattctgtgtcataatgaaaatctgtcatgtttctttattttaaaaatgataaaactgcaggttcacagagtgtcatggcttacttgaggtcacacggggatgagttttcagcactgccaataaaagcaattacatgaattattcagtaattattcataggatccatataattcagtaaatattcacataattatttactagttgttcattgaccaattcgtacaaggcattttgctcaaaactgtgcttatatttggacattgtatcttcatcataatcctgtggtaatgctattatctataagtaacaggtaagaaacctgaagatgagggacagctaatcacgtatttggccatatttccattttttggtttttgtgatgctggaagaatgacccagaatgggtcacgggaagagtattcattcctgtattattttccaggacagaggtgtgcccttctagagtactgggaccaaaattcagaagtgtctgaaaccttgctttaacagtatgggaaataacctctatcacctggaatttccctggaactttggaatatacaagagaagtatgagacgtgggtcttcccttggctgtgtttaattcactcttctatggaataccaatgattctcactaagacttttgcctttttataaccacaatgtatgtcttatggagaagattttacactttgctctatttagaaagaataaatatgagcaatagttttaggttttatgccctggacttcatatttttctgatttctgttttgagattaaattctcatgtaaatagaaaaatacttattatttctcatcaggccaagtttgttatcagcttgagtttttgaagatgaagcacaaacttttgattttatctttgtcctcatcagcgccactcattgtctctcagtatggcctggacttgcccctgcatttaccctcatcctgctgagccatctccatgcactgcgcaattccatcagtgattcggggtcctcccaaggctccctgaaatgtgcacagggatcaggacgtcagacacattccagacacaaaggcaacccacactgtagagtgagcagctgtgttcccacttccctaatgttccagtgatgtcctcaaactgaagggaacactttccctttttaagggtctgttcttcatgtctcaatgcctctgatctagtgaacacaactgtcctgaaactgaaagaacctgctaaatttcgagtttctggttaggtggctagaataggtttataagacttccttacttacctatgactgctgaagtttgaattcttagcagtatgattccttttcttgtaagctgagcagcttaggaaagattggccatgttgctgtgcaaaaagaggtaaacttaatttatactcaaagcatgcttgaatttgaaactagggcttccactcttccaaagttggattgtcactacctcaggcatgtgtcccgaagggctcatgtctctgttgtactcaaagttcaaatggagcccagcaagccagatctcctttactcctaagttccctcaacagtttctcctctgctttagagactgccttgaaaatattcttgtcctgctgttgtgttttggctttggaatgatgtgatgcagctcaatgggtcctacccccaagttgatcagagtaagaaacagctgggaaagtcagtgcaaattcaagttcatcatcctccttacagggattctgattcagagggctcaggtggggcctggaatgtgtttgttaacatgactcagatgtgcagtcagtttggggacccgctgataccatcgaccttatagtttatgggatgattctgttttgctgatgaagaaactgaggcatagacagtctgtaacttgcccaagttccccttgctgtaagtcctggagccagatctcaggtggagcagcctcttccccatccccttcccacattttccaattcagctgggtcaattctttcaaagtacgtgtttctctccccctataactcatatctgaaacaaggagacttgtcattcacttctttcatctaatacaatttctcacaaaatgctgcgagcatcatattctgggctctcactattaaacggagatgc

SEQ ID NO: 20437 - DNA, 421 bp, Homo sapiens; identical to SEQ ID NO: 20411

SEQ ID NO: 20438 - DNA, 538 bp, Homo sapiens
acgcgggatgattaatcttcccttatccacaaacttaactgtggagaaacaggagaaagtgtgtgcctagaagctggattcagggacccatggttacccacttctacttatgattccgtcattactgttgttttaggaaaataaacagatcttgattctttcataaaagtcgattcttcaacaagcaaatgggaaaatcggcaggcccagatatgtgtgtatagcagctactggttggaaatttggacacaaaagtctttatctacccagcctgtgagccacaaatctggactgagtataaaaaagaataaaactaaataccacatgttctcacttataagtgggaactaaacattgagtatgcatgtacatatagatgggaacaatagacactggggaacatgagaagggagggagagaaaaaagggttgaaaaactaccaattgtgtgctatgctcactacctggatgatggatttgtttgtactccagccttaacattccacaatatctttttaacaaacttgcactttaccccc

SEQ ID NO: 20439 - DNA, 1189 bp, Homo sapiens; identical to SEQ ID NO: 20185
  misc_feature 1179, 1180, 1181, 1182, 1183, 1184, 1185, 1186, 1187, 1188,1189: n = A,T,C or G

SEQ ID NO: 20440 - DNA, 579 bp, Homo sapiens
  misc_feature 1, 2, 578, 579: n = A,T,C or G
nnactttctattttttttttttttttttgagatggagtcttgctcagtcgcccaggctggagtgctaacctctcctttcatgtggagatggacagggatggcaggagcactgagtgctcttgacaacaccattgaagatgatgctgacgatcagctaccctgtggagaaggcaggccaggctgggtgagaggggagctccttggaagtcagggggtctgtaaggacagcaaggatctctttgtcccaacctccagcagcctttatgggtgcttctgtgttggccttgtttctgggatggccatctcagtgctgttgctggctagcgatttcagaaaactagatttttctaggcctgagccctgttttgagaaagaagcttccctctggtttgtagctcaacattaatgagttttggttcctgttgtttctataattacaaaaccccagcacaggtatttaagagccaaaggccatgcttgtggaagtaagggaggatctttctaaatggatcctgcaaatcctccttacagatctgagtggatgatcaggcccagagcaaccctgagaccccaggtann

SEQ ID NO: 20441 - DNA, 727 bp, Homo sapiens
  misc_feature 1: n = A,T,C or G
ncgtccatcagtggaaacttttttttttaagttttttttttttctctgtatctaagtcaaccaaaaatgctggtctaattcaggtatagattaaaggtttgtcctcaccattaatggtgtgttattattcatgcagggcatcctaaaaccttgggcacatagtgtaatggaatgcacgctgggccagggagatgtggattcaggcttgagcagtgccaaaaattttcgttatggccttggtaaaggtgatttcccatctctgtgactttgtgtctccttctgttaaatgggcattcaaatcttttgtacctaacttattagggccctgataatcaaattagccaataagtaagaaaatgttttcttaaccacactgtaaattaagaggattcatattgaaatcacttttccattattgctgtcttagcctgctaaagttatatttagtgtagtgcaactaggcagggttgtgagagctgggaaggtagactgttgtattgggcagggtcagggcagataaaggaccaaaataatgcctgaaatgctgtattaacctgctctaccttgaactgctgtcttgaattggggggaaaaaatgaagctctgaggggatggtgcacagggagaaaagagagaatctcaggaattgaaagtctcgatggagaagaggtgggagaagaataggaggctagagtgagggcatgtgatcgtggagtaccgatctgga

SEQ ID NO: 20442 - DNA, 554 bp, Homo sapiens; identical to SEQ ID NO: 20358

SEQ ID NO: 20443 - DNA, 1189 bp, Homo sapiens; identical to SEQ ID NO: 20185
  misc_feature 1179, 1180, 1181, 1182, 1183, 1184, 1185, 1186, 1187, 1188,1189: n = A,T,C or G

SEQ ID NO: 20444 - DNA, 491 bp, Homo sapiens
  misc_feature 382, 489, 490, 491: n = A,T,C or G
acaaatatctatgagaagtcagattcagtggaaagtctgtgattatggttttgttttttaaatgaaattgaacatttaaactgcaaaacgtggggaatgaaaaagccatctgtcaggcactatatccacaaaagaatccacccaccttaccaaataatccctgaatgtcacccactcttctttctattcatcatcctggtgttgtaaatggaatactcacaataaagctgccattagcagagtatccctgtgatctatccttaccaaccatgttgatctaaagttggaggtcactgtgattagaaaactcaagacaccaccccctgccccaccagggttgaaagggactgaaaagtagatttttaactgatgcaaagcttgngctcaggctctggaagtccccatggtagtggggctctgccctagtcccccaactctttctttcgagcttcacaggattttaatgtcatttgccctctctttatgacnnn

SEQ ID NO: 20445 - DNA, 656 bp, Homo sapiens
  misc_feature 1, 2, 3, 4, 5, 6, 7, 8, 9, 10, 11, 12, 13, 14, 15, 16, 17: n = A,T,C or G
nnnnnnnnnnnnnnnnnggcgatgggaatacaggtgatatttatttcccttttgcagttgccctcctatttttttttctttttttgcaatggtcatgtttcatgttcttaatcaagaagatcaaaataaagcgattctttcagaatgacagataaaatgatagaggtttgaaggtaaatgtaacacagtaactttggaacccagagcccctaggaactcataggatatttggccactgttacacatgacaaacagaaacatgaccccctttcaaatcacatgactgaaatttgaatttcagtcttggttttcattacagtttttaaaaagttgtcaaatactttaaatgttggttttgcagaaatatagggctaaacaaccagcatattttttgtgtgcttttgcaataatcagaaataaaattggttttcttaaggtaagtaacaggtcgtttttttgtcttagccaaagttcccttagttagggtaagagaaacttaattctggtttgagcaagaaaattaatttaaaaatactggaggccaggcgtggtggctcacacctgtaatcccagcactttggcaggccgaggcgggtggatcacgaggtcaggagattgagaccatcctggctagcagagtgaaatcttgtctctac

SEQ ID NO: 20446 - DNA, 594 bp, Homo sapiens
  misc_feature 586, 587, 588, 589, 590, 591, 592, 593, 594: n = A,T,C or G
accctggcaaggtttgtcctgtcttggtagcagaaagaacttctcaaagtaagggcttcacactaggggagagttcaatggcccaacccagccatggccaccctgacaccatgccctgatgctagtccctgtggcctggcccacactgaaaatactgtggggacaacagaatggatttgcaagttaccactatctctcaccagctgtaagaccctgggcacattgttgatcctaagcctcagtttcctaatctgtaaaagggtgatattaattgttcttgctcacagaactgttatgagaattaacagaaatagcatattcagactatagcagagtgtctggcatgaaacagagactcaataaatacaggaacaatttggttattggaaacagtgaggcttggcatggtggctcacacctgtaatcccactatagcgcttctcatgtgaatgtttcattctcatagtgcccaactttagtttttaattttggaaacttcttatctatagaaaatttgaaagaataatgtaatgaatctcaatatatccttcttttagagccatgaattttaatatttttccatgcnnnnnnnnn

SEQ ID NO: 20447 - DNA, 538 bp, Homo sapiens; identical to SEQ ID NO: 20391
  misc_feature 1, 2, 3, 4, 5, 6, 7, 8, 9, 10, 11, 12, 13, 536, 537, 538: n = A,T,C or G

SEQ ID NO: 20448 - DNA, 619 bp, Homo sapiens; identical to SEQ ID NO: 20381

SEQ ID NO: 20449 - DNA, 583 bp, Homo sapiens
  misc_feature 569, 583: n = A,T,C or G
tccaccgcggtggcagcggccgcccgggcaggtacaggaactggcttagccataggcactgaagacttgagttttccaagctcagagagaaaaacagtcctcaagcacacattaacccttcctgcaccaaaggtggggtgcagccttctcaactctggcttctcctttattccagtctcttctgctttctatcccctagaattgcattaacatttcttttccatattggctgtaaacattagaggtaaacccatgaaatggtgtttaaatggaaatcggtcctgcaggcttgtaaagtgcttttgtgctttctctcttactgctagagattcaactgctgtaatttcctcagaaaaactgactctctctttaattctcaaagctaatttggttataacataattctttcctttaaaaatcatatttttgtttgctcttaaatataatagttcccttatttcccaattctttaatctatatttctgttacatgaatcatttgctatcatttttctgcaggacatttaaaaatagatgacctctagttgtattatactaaagataaattangacttgctacccan

SEQ ID NO: 20450 - DNA, 719 bp, Homo sapiens
  misc_feature 1, 2: n = A,T,C or G
nncgaccgcgcgtcctcagtggatcactcggctcgcgcgtcgatgaagaacgcagctagctgcgagaattaatgtgtactgatctcctgttggcctgcttcatttgtcctgcagttgtcaatccagaacaatatggaataatttccgatgctcctattaatgaagtagcacgatttaatctgatgcaggtaggccgccttttgcagcagttagcaatgactggctctgaagagggagatccccgaacaaagagcagccttggaaagtttgacaaaagctgtgttgccgctttccttgatgttgtgattgggggccgtgcagtggagacccctccattgtcttccgtcaatcttctggaaggattgagcagaactgtggtttatataacctacagtcagcttattactctggtgaattttatgaagagtgtgatgtctggagatcaactgagagaagatagaatggctcttgacaatttattggcaaacctacccccggccaagccaggaaaaagtagcagtttagaaatgactccctacaatacacctcagctatctccagcaaccactccagcaaataaaaagaatcgattacctatagcaactcggagcagaagccgcaccaatatgctaatggacctacatatggaccatgaaggatcatctcaagaaaccatccaggaggtgcaaccagaagaggtgttggtcatttccttaggt

SEQ ID NO: 20451 - DNA, 656 bp, Homo sapiens
acctaggggaatttctgagttcatgatatcgtaggtggtgtggaaacaagtcccagcataaacccacacagctggctgaatgaagttcaagtgaaggtcatgcagcatcaaagtagatgtgtgtcactgaaacttatggcagtggagtgagaataattttgaaattacttagattgtgagaaaatctggctgatgattagaagtgttgatataagaggtcagtttggagttccactcaaaattcatactaattttaatgttatggtattctaaactactagatgggtaaggggaagttataggattctgaacaataccattaagaattaggataggattttctactgtggtgtcacagaagaatcagagctagcaaattcataaaaagaaaatttgattccccaagcccagggtaaaaatccagagtgctgaggttttgaatcctaatatctcagttgccactttgcatctttacagtgctgaatgaaaggtgtgcaccaggaactgtctacccacaaagaacctgttttctgggccttaaaaaaaaaggcagtgcagagatagtattataaaagagaagcataaaaggaaatttgtgagggtggcttaatgagatgcactgaataggtggagaactagagggaatgtggctaggt

SEQ ID NO: 20452 - DNA, 367 bp, Homo sapiens
  misc_feature 365, 366, 367: n = A,T,C or G
acacaaaccataaggtcagtaaatatcacaaagagagtatgcctgtgtaaccaccatgcaatctctgtttatcattgtaggtgatagccacctctgcccaagttggctaatacttgaaaaaaagtggcccagaactcacgtgctgcacattttctgaaattactcttgacttctgatttcatggcaactcttcttattttccagtgttgcttaaaattttgtcttatttttggtattcatttatttcagaggtctttaaggagacattaaaacaaacaaacaaacatgggctcattattaaacctggaatcaggttgtggatgaaactgcttaaggagattataaatgagtaagaaaaatgcagnnn

SEQ ID NO: 20453 - DNA, 1380 bp, Homo sapiens; identical to SEQ ID NO: 20118
  misc_feature 1380: n = A,T,C or G

SEQ ID NO: 20454 - DNA, 1176 bp, Homo sapiens
  misc_feature 1, 503, 572, 588, 605, 609, 610, 618, 626, 633, 636, 651,655, 659, 679, 689, 723, 728, 745, 750, 756, 764, 770, 783,804, 808, 822, 823, 835, 837, 841, 848, 852, 882, 885, 897,905, 915, 918, 919, 927, 933, 934, 938, 942, 954, 958: n = A,T,C or G
  misc_feature 972, 983, 1005, 1035, 1045, 1057, 1072, 1077, 1086, 1094,1105, 1110, 1115, 1123, 1141, 1147, 1154, 1155, 1156, 1157,1158, 1159, 1160, 1161, 1162, 1163, 1164, 1165, 1166, 1167,1168, 1169, 1170, 1171, 1172, 1173, 1174, 1175, 1176: n = A,T,C or G
naagagttaaaatatctaatcccaaataaacttgtgtagcaaggaagctacaggatagagagcagagtttctatactcttccattaactcctctggaaatacaaaagacaggacacctggaacctcccagaatgaactaggtactgtcttgggggagtttgggggctttccatgcccacgacaaaatgtaacatctggatcaggagacaggaaaccaaataacaggttctcctctcagccccaaatgagttataactgtaagcccgtgcatacaactttagagtttgctcagcagaactgcccctagcagttggcactcatacatagaaattactttatagagattttggctaaggcctgacggtgttcagaagctcctgattgaggttgcgtaaacccaccgagtggtccaagaagcccaccagaaccagggccttcacattattcttacagggtacccgaagcttcgaaattccgtaaattcaatgggtcattaagctggntttccttggggtggaaaattgggttattcccgctttaccaaatttccaccaccaaacaattaccgaaancccgggaaagccattnaaaagtggttaaaaagncccnngggggggnggcccttnaatgganggngggaggcttaaaccntcanccanttttaaatttggggggtttngggggctttnaaatttgggccccgggtttttttcccaaattccnggggnaaaaaacccttgtttcntgggncccaanctttgggntttttnaaatgggaaattnggggcccaaaacccccccccngggnaaaaaaagggcccnnttttttgggggntntttngggggcngccnttttttccccgtttttccctttgggtttanaantgggaacttccnttttggcnccttcggggnccnntttccggnttttgnngggnaaanaccggggttttnaagntttaacttcaaaanggggggggganattaccgggtttttccccccanaaaattagggggggtttaacccccccgggnaaaaaaaacnttttgggggccnaaaaggggccccccnaaaanggccccggnaaaccctnaaaaaaagggnccccnttttnttttgggnttttttttccaatagggntcccgnccccccnnnnnnnnnnnnnnnnnnnnnnn

SEQ ID NO: 20455 - DNA, 668 bp, Homo sapiens; identical to SEQ ID NO: 20192

SEQ ID NO: 20456 - DNA, 668 bp, Homo sapiens; identical to SEQ ID NO: 20192

SEQ ID NO: 20457 - DNA, 389 bp, Homo sapiens
  misc_feature 389: n = A,T,C or G
acattattcatacactgtaatggcgtaaaagaaccctagacacatggactcccttgctaataagtgcaccttcaaagcgatagtcattatttagcatttatcggaagaggctggccccagctctggtgaagggcagagaaggtgtgggtggcctcacgtgttctcaatgtcacaaaatgatagcattaaacagacccactccctcatggaaggcaatttgacgaccttctattgatattgcaacatgtgtctctggcagcagatctcaatccttatgtaagggatatgggaagacttcctccacttcatgtatatgctttccctaagcagatctggcagatgcaaatttatccatatcttttcatttccattgaagttttagtatccan

SEQ ID NO: 20458 - DNA, 510 bp, Homo sapiens; identical to SEQ ID NO: 20400
  misc_feature 508, 509, 510: n = A,T,C or G

SEQ ID NO: 20459 - DNA, 471 bp, Homo sapiens
  misc_feature 469, 470, 471: n = A,T,C or G
acgcgggggcctcagggacgggtcttttgaagtgcctggtgtgacccatcttccgtgcttgaaatcgacgtagtggaccctggctagcatatttttccctgccaagattattgcaaaaagaccatgtggtggttaatatcggaaagaatgtgtggttaatatcaggaagaacacgtgaaatggagaatttcagggctaacatttcttgttttgtttctgaaaacatcggcatgtcctaaaaagtgtcgcctgtgcccatcatctctcaggcttgggagcaggacaccgccggctcactttaaagccaagggaaagaatttggacaaccaactacgtctggagaagacaccaatgtcagcagagctccgctttcatctgtgggcgaaggattacctagatgccaagctacctaaaagggaagcgccccctgtcctatgatcacgtgacttgcttcaccttgtcaatcacnnn

SEQ ID NO: 20460 - DNA, 668 bp, Homo sapiens; identical to SEQ ID NO: 20192

SEQ ID NO: 20461 - DNA, 546 bp, Homo sapiens
  misc_feature 546: n = A,T,C or G
acatctggcaaggggcacttttactctgatgtcgggtgttttagggatatgagttcagtgaataagtagctagagggaggagctagttaggtcttgattttaggcaaatgctaaatctacctcattttccatacctgtcttttgattgggatagctaaagaatttataccagatgaaccaagcaagccaccttcttacgacattaaatttggtggaccaagcccccagtagaagcgctggggcccagcacggccaggctctcaccttttagagcagcacccccgactaatccagcgaatggaatctggctatgaaagcagtgagaggaacagcagcagccctgtcagcctggatgcagccctgcctgagagctcaaatgtctacaggtattgtttggcctttgaacagcaacattgtctcttgcagcaatgtgagccacctacttggggctttcaggcatggctgagacaagtggagggatggcctttgctattatctctatgtgctctttcaacttcctataacaacagcaccctctgctggaan

SEQ ID NO: 20462 - DNA, 485 bp, Homo sapiens
  misc_feature 485: n = A,T,C or G
acaagaaaaaatcaaacaatcacatcaaaaagtgggcgaaggatatgaacagacacttatcaaaagaagacatttatgcagccaacagacacatgaaaaaatgttcatcatcactggtcatcagagaaatgcaaatcaaaaccacaatccgggaggtcttgccaaagaccacctgggctttccgggcaacgtgctagagcttctgggaagcagtcgtggccctttggagattccacggcttcggattcctactgcaggatgctccactgtgtctgccggcctctggcgttttgctgaggggtaacctcggaatggctagaaacaagaacactgagatggcccagtcgtgccccaggcattcccgcacacgtggtggcaaagaaaggcgcgcagacagagtgcccagtcagcttggtcagagttctttacaggttagtgacagacttggtcccacgcttgggtcctctcatgttttcagataaccn

SEQ ID NO: 20463 - DNA, 420 bp, Homo sapiens; identical to SEQ ID NO: 20387
  misc_feature 420: n = A,T,C or G

SEQ ID NO: 20464 - DNA, 667 bp, Homo sapiens
ccacgcgtccgtgattttatgcaatatgtttgcattaaaatctcttcagtagtaacttggttaaattattcacattgactcagcataatttctcccttgctaaatctcagactaaagcaatcaatttgttcctgcaagaaagtctgatggtaggctttccttgtaactgagccccatagaaagaggaagcagctgcaacaaagttgaaaaggatgcctgtcaccaaggttcttttaagggagccattgtgtgaagttctacttgtgaaatttctgcaagtactgtttgttctccaaaatccagctttccgttgaaagtcaatgaaacatctctaaaatgcagacatacccaggttcattgggaacacagtcactgtgagtatacatgattatgtcctgctaaccctattgggaaagaatgctgggcttggccctagtaagtagacttgggttaaagttcacctccgccactaactagctgggaagttcaacttccctgagctgagtttgtcacgttagagaatattaataaatatgaaaattgtggagcagtcttaagtttaaaaggaactttcatggacattagctcattttgctgtgcccaccctgggaaggaagcaggacaggcaggcagtggcatccctgtcgtcaagcagcctgaggactgc

SEQ ID NO: 20465 - DNA, 528 bp, Homo sapiens; identical to SEQ ID NO: 20160

SEQ ID NO: 20466 - DNA, 455 bp, Homo sapiens
  misc_feature 453, 454, 455: n = A,T,C or G
ggcggccgcccggccaggtacttcttggagtgccattttccttgtaacccttagattaattcagattgactgagttctgtgtcagtggaaattgccagaattacatcattgtgctttgcatctagtttcacttttccaaaagcctacacagatttcagatgtttagaaaatagctcttgttttccttctgggtaatctttttcatgtcaccactcttgtcagcatctgcactgggcaaatttcctaggacctcccttctgcttcttttaaaatacgaaaacaaaatcaatgtagcgcagcaagccagggaaagtctgctttgattgacttacgaccatagtcacccagcagttccttcagaggtggcttcccaagtcagacactgagtccacgcgctgtccgcctgcctgcagaagtggctctgagagctgtttgaggagaaaatgggggacnnn

SEQ ID NO: 20467 - DNA, 486 bp, Homo sapiens
  misc_feature 479, 480, 481, 482, 483, 484, 485, 486: n = A,T,C or G
acaagaaacagaaatcaatgaggcttacttaagcaggaaaggaatctattggaagaatgtccaacagaattgatggggagcccgcagacacaaaatctcatatacgataaaaacttgcagacagggctacttctatcatcaaatgtgttttctaactttataacacgtgtgaatagccaaccttaggccaagcctggagggtaggtatataaaaggagtaaaggtcctgacagtaggaaaatggattgaattaaaattaaagtccgggtgtggtggctcatgcctataatccctgcactgtggaaggccaaggtgggtggatcacctgaggtcaggagttcgagaccagcctggctgacatggtgaaaccctgtctctagcaaaaaaaaaaaaaaaaagtcccctggcccgtttaaaaattagggaacccccgggccggaagaattccaatttaacctttttgaatcccgccaccctannnnnnnn

SEQ ID NO: 20468 - DNA, 1380 bp, Homo sapiens; identical to SEQ ID NO: 20118
  misc_feature 1380: n = A,T,C or G

SEQ ID NO: 20469 - DNA, 470 bp, Homo sapiens; identical to SEQ ID NO: 20422
  misc_feature 469, 470: n = A,T,C or G

SEQ ID NO: 20470 - DNA, 642 bp, Homo sapiens; identical to SEQ ID NO: 20389

SEQ ID NO: 20471 - DNA, 1189 bp, Homo sapiens; identical to SEQ ID NO: 20185
  misc_feature 1179, 1180, 1181, 1182, 1183, 1184, 1185, 1186, 1187, 1188,1189: n = A,T,C or G

SEQ ID NO: 20472 - DNA, 1098 bp, Homo sapiens; identical to SEQ ID NO: 20367
  misc_feature 1097, 1098: n = A,T,C or G

SEQ ID NO: 20473 - DNA, 906 bp, Homo sapiens
  misc_feature 1, 2, 3, 4, 5, 6, 7, 8, 9, 10, 11, 12, 880, 881, 882, 883,884, 885, 886, 887, 888, 889, 890, 891, 892, 893, 894, 895,896, 897, 898, 899, 900, 901, 902, 903, 904, 905, 906: n = A,T,C or G
nnnnnnnnnnnnccgcccgtcatgggcgatatgttcttatatcttttattttcctgaaatgcattttgactcactgcaccttgaaatcatgtctttaaacaggttaacatgatctgtatttctgcaggtcaccattgaaccttctgaagagcctttatttcctgctgatgaattgtatggaatagttggtgctaaccttaagaggagctttgatgtccgagaggtatgtgaaagtggaactgtgagctttatgaccagctgtgagtctctttgtatgtgtatctatttgcaaagctaaagtttgttaagatatgttcatgcctagaaatagatgtggatctcagtaaggagtgacatatgtggcaatgatacctttccatactgtggatatcattggcacagagtaaatactaaaagaggggagtgggggacctcaatgattggaaagttttcattgcgcaaaaagtgtgatttggtcataagtaagactccatgtcctgtgcacattatgaatgatgtaaggcaacttaacaattgtcagctatttcttttcattgttcttattttgggaaatgggtgaaatgtcagtaagttgttggaagaaaaaacatacccttttagatcaatatgacatttgcaatgattagacctgattacagttgaaaatgttgctatggttacacattgtcgacatagtgttctgtaatttagatggacaacttttagggtttagagcatatagtcttttattttgttcagtatccatagttggcagagtagtttttaaattaggaaattatcttaatatcaaattctgtactggaagttttaatatttcaaattatattttccccttgactataaaatattatatattagnnnnnnnnnnnnnnnnnnnnnnnnnnn

SEQ ID NO: 20474 - DNA, 378 bp, Homo sapiens
acgagtagagtcagtagcttctcttgtcttatcccaaaggagatggtgcctgctcctgaagctgatcctggaatttggttggatttattaaactctgtgcccagagctggccttctgatgggcagacttgtgccgggcttgttattaagacagggttttatgtctctagtcgtttcattcccattttctgttctatttggccagtctccattttgtgggtcttacctctccatgctgactctagatatttgagagcaaggttaactaagaccacattttagttctagttcattgtgcctgacactcagttagaggttcaataaagaatgtatctacctgtccctaactgtgcagaactcacttctttgtaagcagtga

SEQ ID NO: 20475 - DNA, 619 bp, Homo sapiens
  misc_feature 619: n = A,T,C or G
acgcggggagaatcctttgcgctctcggtgcccccctccacgcccaggagcgtgggaaccctgcttaagggctttactagggaaaacggtgctggttcactggggcgcgtttccgggaaggtgaataccggtgaaagttatgctgagggtgaggtaggctctgacgacgcacttgcaggttgaatactggcacatcatttacttgttactcccgtgtggtgagtgcacctgtgggttttgatgccggatcaaattcctggaaagaggcgcgcattaagactgcggattgctgagctgcgcgacactccgtatttttccaaaacgtatttgtaatattctttcaacctgtttgcataatgggacatctcttaaatgcagcaagctttaatgcatttttgccaaataaactcaaaaactgacactcgattcagctattggaaagtttttttaatgtggttggaacaactgagccatgtgaaaacacaacaagaaggtaccatcctggaagcagagagcaaacccttatcagataccacacctgctgactcctttatgtgcagcctccagaactttaagaaataaatttttattatttataaaaaaaaaaaacctcgtgccn

SEQ ID NO: 20476 - DNA, 1076 bp, Homo sapiens; identical to SEQ ID NO: 20090
  misc_feature 1, 2, 3, 4, 5, 6, 7, 8, 9, 10, 11, 12, 13, 14, 15, 16, 17: n = A,T,C or G

SEQ ID NO: 20477 - DNA, 741 bp, Homo sapiens; identical to SEQ ID NO: 20131

SEQ ID NO: 20478 - DNA, 1189 bp, Homo sapiens; identical to SEQ ID NO: 20185
  misc_feature 1179, 1180, 1181, 1182, 1183, 1184, 1185, 1186, 1187, 1188,1189: n = A,T,C or G

SEQ ID NO: 20479 - DNA, 448 bp, Homo sapiens
  misc_feature 1, 2: n = A,T,C or G
nnagtaatctagtatagttagtgataactattcacttcataacattttcttaatatttatatgaataaaatatagctccttttcaaaactgttttcaaaatataacttgtgcatttcttccaaatttttaacaaactttattccaagtgataatatcttcagagttaaattgaaatattttgataaatatgataagcttatattttagctagaaaccagaaaatattcatgaataacttttctaaggaaagatcttaccctaaagggaatattttgttaagaaagtgtcctctggctggtcgtggtggctcacacctgtaatcccagcactttaggaggccgaggcgggcggatcacctgaggtcaggagttcgagaccagcctggccaacatggtgaaaccccatctctactgaaaatacaaaaattagccaggtgtggtggcaggt

SEQ ID NO: 20480 - DNA, 396 bp, Homo sapiens
acctcaattatctctcataacacacagggtcccatgttggccattgcctcagcacatagtcaggtagccagcctctctgaatgcctggtagccaggattaaaataaataccctaggtattatctgcatatctcagggtcaggatatatcccatgactaagcccacaatcacagtaaattctttgagccagaccacattttggactcacatttaatgtaaatccacatcactccaatcctgcatgatggcacaggtagatttttgggagctggacaataaacaactattgagtgcatccccacggaccccaaaattcaattttataagaagtatctcaaggcattaataagtgcatcaaagatggtcaatgtggcattatttggtaaatcagaagca

SEQ ID NO: 20481 - DNA, 533 bp, Homo sapiens
  misc_feature 533: n = A,T,C or G
actctgtgttccgcctgctcaagttctagacttctggtgtccatagcaacccagcagaaaacatctgcatagcctttgggctgacgtgagttaaacttgagcagtgaagcagcataagttttatggtgcaaggcacactacagatcctcccttacccctcacatctgatccctctgcctatgctcagagccactgctatttctacaaatctacaaggcccagactgaggtgatgaccgggccaatctctggaatagtgtcagacaattagatactctttcctgtcttcaggagcccatctggaataaagctacttatcaagtttcaaaaacaacagaaaagaaatgagattgaggtggaaaacaacccaagtgttcatcaacagatgaatggagatgcaaaatgtggtctctccatattacagaacatgattcagcctcgaacaagaaagcaatgttgatgcaagcgtcaacacagatgaaccatgaggatattatgctaagtgaaatgagccaatctcaaaaagcaattacn

SEQ ID NO: 20482 - DNA, 660 bp, Homo sapiens
  misc_feature 657, 658, 659, 660: n = A,T,C or G
gggtggcggccgcccgggcaggtaccctcattgtagccatgggaaaattgatgttcagtggggatcagtgaattaaatggggtcatacaagtataaaaattaaaaaaaaaagacttcatgcccaatctcatatgatgtggaagaactgttagagagaccaacagggtagtgggttagagatttccagagtcttacattttctagaggaggtatttaatttcttctcactcatccagtgttgtatttaggaatttcctggcaacagaactcatggctttaatcccactagctattgcttattgtcctggtccaattgccaattacctgtgtcttggaagaagtgatttctaggttcaccattatggaagattcttattcagaaagtctgcatagggcttatagcaagttatttatttttaaaagttccataggtgattctgataggcagtgaggttagggagccaccagttatgatgggaagtatggaatggcaggtcttgaagatagcattggccttttgagtgtgactcgtagctggaaagtgagggaatcttcaggaccatgctttatttggggctttgtgcagtatggaacagggactttgagaccaggaaagcaatctgacttaggcatgggaatcaggcattttgctttgannnn

SEQ ID NO: 20483 - DNA, 466 bp, Homo sapiens; identical to SEQ ID NO: 20303
  misc_feature 1, 2, 3, 466: n = A,T,C or G

SEQ ID NO: 20484 - DNA, 375 bp, Homo sapiens
  misc_feature 374, 375: n = A,T,C or G
actatagtccaagattgaaatctgtcttattaatcattttccccttctgtctcccctaattgccttactgtatggctcctaatgacttctagttattcttttgttttccttccattaacttaaaggatatgtgtatcctctttttatgtattcatagaagatacctaaaggagatattgtatacatatatataagatgttcatatgttcctaattttacaataattgttaaatgttatgtagatacataccctgtaatatgtatatgtaatatgtaatacagagaagtgcgatttacggggaaattacccatttagtaatcctttcaccagttggttttctgtctttctgtgctatgtctgtcttctctgaatnn

SEQ ID NO: 20485 - DNA, 549 bp, Homo sapiens
  misc_feature 1, 2, 3: n = A,T,C or G
nnnactatagggcaattgagctcaccgcgggggcggccgaggtactaaccttagctagtaagtaggaaggcttggaatcgaccccagctcttctggcttcaaagctcctatacatggtgccaggacatataatccagtcctcctatcttcccacccagtggctctttgctgttataatgtccatcatccctaccctgtctttccttctccaccttctacttaggctggattcagtcctaattatttaccaagcaacagtgatgatgaagctaataatcatcatacatgtttgtgtgtagcctagttcaacctttaattactgctctctccccagcacctagaatagtgcccagcccattattgggctgataaatatttgttgaataaatgaatacatgaatatattcgtatgccttttgcagacccctcttctcccccagtaggccttactcagaacaagaggagcggtagctaaattaggggaaggaatgccaagggctgaaaatcctctgggttggcaattgtaatcctgtggacattggtaatacc

SEQ ID NO: 20486 - DNA, 420 bp, Homo sapiens; identical to SEQ ID NO: 20387
  misc_feature 420: n = A,T,C or G

SEQ ID NO: 20487 - DNA, 427 bp, Homo sapiens
  misc_feature 418, 419, 420, 421, 422, 423, 424, 425, 426, 427: n = A,T,C or G
acttctagaatccacagctctgggagggctaccttaaattaacactggcagttctttgcaattagggtgccataaaagcagcacagttgactccaaaatggactgagttttggaaagatgtctgccagcaaaatcatatagactctcttgctgaagggatgaaaaattaataatgccttgaggtatattaatataaaaatatgtgaccaagcagtgtaattaattcccctttttcctcaaaatgtagccttttttttttgagatggagtttcactctgtcacccacgctggagtgcagtggtgcgatctcagctcactgcaacctcaacctcctgggttcaagcaattctcctgcctcagcctcccaagtagctgggactacaggtgtgtgccaccattcccagctaattggttgtannnnnnnnnn

SEQ ID NO: 20488 - DNA, 573 bp, Homo sapiens
  misc_feature 1, 2, 573: n = A,T,C or G
nncatagtgaattacattattttcatgcgtcactgaatcagatatgctaatatgttgtgaataatttttgcatcagtgtttgtgcaaacattgatgggatattgtatgatatttttcttttcttatcaagtttatgtcaggttttggtatcagggttgtactgaccttatacaataaattgggtagttttccttctccctttattttctgaaagtttgtataagagtgttagttcatttgttggtgttccattgatataaatatatcttaaagttttcatagaatttaccagtgaccttttgagtattataaaatgtccttttttgcctcttatactctttgtcttgaagtctatgtggtagcattaatatggtcacgaatcagctttcttatgcttattatttacatagtttatcttttctgtcttctggcttcaacctacttgtgttttatttaaagtacgtattggccgggcacggtggctcacgccttaatcccagcactctgtgaggccgaggagggtggatcacaaggccaggagatggagaccacggtgaaaccccacggacgcgn

SEQ ID NO: 20489 - DNA, 538 bp, Homo sapiens; identical to SEQ ID NO: 20391
  misc_feature 1, 2, 3, 4, 5, 6, 7, 8, 9, 10, 11, 12, 13, 536, 537, 538: n = A,T,C or G

SEQ ID NO: 20490 - DNA, 638 bp, Homo sapiens; identical to SEQ ID NO: 20363

SEQ ID NO: 20491 - DNA, 761 bp, Homo sapiens
  misc_feature 761: n = A,T,C or G
accaagaggagagagctgtccaaaagtggaagatatcgtttctggcttaaggtgcgatgaaacaaaacaggagacaccaaaaagaagtgcggaaaagctaggtctcagagtagggcggcaggctgaggagggccgcgctgaggaggaagtggatgggtgccagggggtgaactcacagggagaccctttagaaggggatgactgcctgatctgtttccatggactcttctatttttattaggattatccatttctcttcctacaagctcttttgctttttgtccacccttaagttataatgtatatactgtttaaaaacatttaagtgatacagaagtatatcaaggaaaaatgatgactattagtagtttggtaaattcctcccagtcttttttttatgcttatacatttatagacgttctgtcaatatctactgtgtgctacatgtgtgtatttcactcttgatccctaactgctaatagttttctggagtaaatatgacctaaccatatcttttaatcatcacaatgtcttctctctcggcagaaactttctaacacctatggctgtgattccaaacatgcttactaactacagcacactactttatgaagcaaaaacgttattctctgtgtgcataagaatgggagaatatctttgcttagtgtcacgcattattgttacttaatcgctgagtctgttttcttttctgtaaaatggagacatcatgagtccacttccagggttattttcggacgcgn

SEQ ID NO: 20492 - DNA, 842 bp, Homo sapiens
  misc_feature 1, 2, 3, 836, 837, 838, 839, 840, 841, 842: n = A,T,C or G
nnnacgccgttcctgaaaaaaaaaaaaaaatttaaattagccaagcatggtggcacacacctgtcctagatactcaggaggctaaggtgggaggatcacttaagcccaggaggttgaggcagctgcgagccatgattgcactgctgcacaccagccttggggacagagcgagctctgtccaaaaaaaaaaaaaaaaaaaaaagaggctatgaggctacatacttccaacagtgcaaagcaaggggctttgagatgtttcttgacatggtcccagtaaagtgttggacctaaaattcaaaccaaattagatttctttataactggtgagaagtcttaataaaatagttttccttaataaaatttaactatttcagtatgtctgcttactgaagtttggaaatgaaaatttcccatttgttttctctggcacatgagtttatcagcctgctttgcaagtgctttaaggcaaataaatgttaatttgattgctttttgttgatttgatagcttgtatgcttgggccacctgttagtaattttcttttacttgtaacacttgcctgctgctgaatactaggcagtgagtcttattgagttgatgatccagggtgtttttatttgtgaaattcctctgttgtacatggttacagtttaagacaagaattgtattaatataaatgaatataaatggtactttctccattttaatcctggaaattaggcaaccttctgggttaaagcaagcgttctccgccactgactaacagtgagtgtataatggatctgtttccccacagatagccagctgtctgcattaattacaggactgcattgcannnnnnn

SEQ ID NO: 20493 - DNA, 593 bp, Homo sapiens
  misc_feature 1, 589, 590, 591, 592, 593: n = A,T,C or G
naatttactctaaggtgaccttagaattatgattctatcctcccagtttccatgactttaacaaaatccctgacactgtgccgtctgcctcagggagtcagctactgcccatctcctggctatgtgaaagtcttgggcatacatacccctatccagcttggagcctccaataagtacctacctgcggtatctgatcagtttctgcctagtcagatgtgccctgttgctgagcctgcttgggtggggagcatgggaaaatggggcaagtgcttcatgagggagctgttctcagccgccccctctcccaactccccagctctctctccttgttctgtctcctgtttctgggctctaatcctggtcaggcccaatgccccttgcctgtgatgctgggtctgcagttttgctcgccgtcctcgctttgccttcttgcccgccacttccagcattcctcctctgctcagcttctgagctggtgtcaggtttctacctgcctggccactgagcccacctgaagatgtctggccaattccttttagcctctgccttctcaccatgccagggatgcttattcatggtgggaccacannnnn

SEQ ID NO: 20494 - DNA, 515 bp, Homo sapiens; identical to SEQ ID NO: 20177

SEQ ID NO: 20495 - DNA, 450 bp, Homo sapiens; identical to SEQ ID NO: 20208
  misc_feature 443, 444, 445, 446, 447, 448, 449, 450: n = A,T,C or G

SEQ ID NO: 20496 - DNA, 528 bp, Homo sapiens; identical to SEQ ID NO: 20160

SEQ ID NO: 20497 - DNA, 434 bp, Homo sapiens; identical to SEQ ID NO: 20413

SEQ ID NO: 20498 - DNA, 395 bp, Homo sapiens
acaaatattactataccaaggtgtagaggagtatgtctaagcctgtaatgatagcaggtggcaaggtggaggtagatggccttctgtggtagttcacggggaggaagacagtggatccaagcaaataagaaaggccacattttttttttttaattttgcatctcaaggtattttagtcaaaattttttttttagttttccacagcaaacgattacgtaaaatataaacctaatgtattctttaggactaagtgtgccttttctctatatgctaagaggtgtaagtagagaatagacgttatagtatcctagcaaatgaatattcacaagaaaggctacaaaacttcattatcttggcttattctaaatctacctaaagtcatcttgctctcctaa

SEQ ID NO: 20499 - DNA, 557 bp, Homo sapiens; identical to SEQ ID NO: 20384
  misc_feature 556, 557: n = A,T,C or G

SEQ ID NO: 20500 - DNA, 629 bp, Homo sapiens; identical to SEQ ID NO: 20144
  misc_feature 1, 2: n = A,T,C or G

SEQ ID NO: 20501 - DNA, 806 bp, Homo sapiens; identical to SEQ ID NO: 20267
  misc_feature 1: n = A,T,C or G

SEQ ID NO: 20502 - DNA, 1044 bp, Homo sapiens
  misc_feature 1, 2, 3, 4, 1043, 1044: n = A,T,C or G
nnnncaggttttctgaatagctgaaatatcaacatggttatctcttccgcttgccctagtatatcctagagcagtgttgtccccggctttatctttattccttcagtttaatgaactccgtgttttcatcactcacattttgttcccttccctcagtttccttcctttgccttcatttatgtatttaagtttacagaataacaaaagcactcgtgttacttttaaacaaggtaaaacttaaacagttttttcctccgtttctttttttatggaaataagaggcaagtgatagcaagtgggtaattcaatggcagtggtaactgaagcactgacctgttacaagagagacggaagcttctacttgagcagatacaaatactgtcatccgtggagatttgaaagaagtctttctatcactgggtagtttgagagctcattagtcttctttagaatgggtttaaacttggaaacatcaaagcaagttacaaggaaacttagttttactgtgttggcagcctaggcgccagaatttgttataaagtgtctgaaagtggcacaggtatcacttaacttttcttcaagaaggtctatgagttacattttactcggtatcccaggcatcaaggagtgtaactttcaatgaatcaaagagaaacagaatcattttaaattccagcctctgtttaaagaaggatcttatgaaggggagaaattaaccacctgacccagggaaggatcccgcctcctccagaaagtgaaatcgccgggtgtgggtggctcacgcctgtaatcccagcactttgggaggttgaggtgggccgatcacctgaggtcaggacttcgagaccagcctggcgaacatggtgaaaccccatctctactaaaatgcaaaaaattagccgggcacggtggtgcacccctgtaatcccagctactggggaggctgaggcaggataatcactcaaacctggaaggtggaggttgcagtcagctgagatcacgccactgcactccagcctggacgacagagtaaggctccgtcnn

SEQ ID NO: 20503 - DNA, 1108 bp, Homo sapiens; identical to SEQ ID NO: 20121
  misc_feature 1, 2, 1103, 1104, 1105, 1106, 1107, 1108: n = A,T,C or G

SEQ ID NO: 20504 - DNA, 546 bp, Homo sapiens; identical to SEQ ID NO: 20353

SEQ ID NO: 20505 - DNA, 675 bp, Homo sapiens; identical to SEQ ID NO: 20117
  misc_feature 645, 672, 673, 674, 675: n = A,T,C or G

SEQ ID NO: 20506 - DNA, 1529 bp, Homo sapiens; identical to SEQ ID NO: 20365
  misc_feature 1, 1485, 1495, 1500, 1527, 1528, 1529: n = A,T,C or G

SEQ ID NO: 20507 - DNA, 274 bp, Homo sapiens
gggactatgcgttgttaccactgcttcccgggactctgcttgttaccactgcttaactcgtgtttttcttccgagcatacaaatatttgcaatgaggttgcaccgcagactccacagccattgtggcacctggggctctgtgacttgggaggcagaggagatggaatgccggtgaggagaaggagattgtggtgtgaatgtgagggatgagggtgaattagcttcctacggcggctgctacaagtttaccacaagataaatgagttaaaacagt

SEQ ID NO: 20508 - DNA, 466 bp, Homo sapiens; identical to SEQ ID NO: 20303
  misc_feature 1, 2, 3, 466: n = A,T,C or G

SEQ ID NO: 20509 - DNA, 492 bp, Homo sapiens
  misc_feature 488, 489, 490, 491, 492: n = A,T,C or G
acatactcccattccacagcttagtctaacatgcaaaaagggcatgattagagattgttggtcattaagaagaacaggaggagacgttctggagccttggcactatgcctggggaagagaggatctcaacacccctcagccatctctgggccagaggaaagtcacctaggggttgtcctaaagagttccacgggagaagagattatgctgtctgatgaccccttaccgttttctccagtatgtccctactttttgggtgtccagctgaggctattaaactcgtcctgcttctgaggtcggtttcttttctaccatgcgaaggtttaaatctgctgtactgtctctgctctctgttcttacttttcccagagttcctacacttactacataactaaaaactggattttaagctgattgcactcttcaatgcgtttcatttctgagattgttctttcaaagccctaacaatagatttcggttcatatgannnnn

SEQ ID NO: 20510 - DNA, 540 bp, Homo sapiens
  misc_feature 1: n = A,T,C or G
natgctgtgcacgggctgtgtgacctgaagggccttgcggtgaggtctcttggtgataatccacacactgtcctgagccttggttttgcagcatttccaacttgggttgacagagtgagactgtgcaggactgccccgtacagtacggcttctatgtgtgaacaacacagaccactaagagatgtgacaaagctgttccatcagaggaaacatagtctgggggacaaatcctcccattcctgataggacaggagggagcggttggctggggaagacctgagtgagggagctttcttgaggacgggttttgtcggagtgtagttcatataccatgcacagcctgtcagcatacagcttgaatgaactcacgtgtgtaaccagatcaagaggcagaatattactagggtggcagttttgagtcccatgaaaacaaacacatttactctgtctagctccatctctagttaattctaatgcagtttaaatgctcacaaaatccttatttgaatggatgagtcagtggtttgaattgaatagttt

SEQ ID NO: 20511 - DNA, 405 bp, Homo sapiens
  misc_feature 404, 405: n = A,T,C or G
gcctcagaatgataaatcagaatctctgaggaatgggcccaggcatcagtatttttcacacgaacaagcagaggtggatcctttaccttctcctaaaaaactgtcacaagggacaggtcacttggaaggcagtttaagagagagccagaggagaaatctggtgacacatgtaacactgtgattaatctattgcttacgatgttttatatgttgaaagtctggaattctgaatattttattatgtaagagatccagttctccaatgtcacagcctctataatttgaataataataaaggagcacaacaattcacttatgatacccaacagaagactgcaaggatatgctggggcacagagcccaattagggtttaataagacagggtttatgggtgaagcaatcnn

SEQ ID NO: 20512 - DNA, 466 bp, Homo sapiens; identical to SEQ ID NO: 20303
  misc_feature 1, 2, 3, 466: n = A,T,C or G

SEQ ID NO: 20513 - DNA, 1214 bp, Homo sapiens; identical to SEQ ID NO: 20119

SEQ ID NO: 20514 - DNA, 424 bp, Homo sapiens
acagacgagggaacgtccagtctggcctgccaaagaagaaaagagtaagctcagatttgagaatggtaaaccctaacaacaaaccaaaagctgctctttcttgctgtgaagtcgcttacggctgtcttcacttggtcaaagtgggtgaattttgacacctgttcaaacctggacttgctttgtgatgaagggggtttgattttcctctaaactaccggcacaaggatgggacaaagaacaccatttggtagcttggtattctctaaagtcaggaggcaaggattacaaacagccggcctgtaacagcaacacagtctgcgcaccagccacaagaacacaggcatcttatctggctggtgacgcacagtaactgtgcggggcacagcagccagcaagcgggtcagacataggagagaccaacagg

SEQ ID NO: 20515 - DNA, 396 bp, Homo sapiens
  misc_feature 394, 395, 396: n = A,T,C or G
acagttttgtaagcaagatgattgaaagatctactgagtgccgtggagtcacagagaggaacaactaccctcaggctatggagttcagtgaaggctgcctaaagagaggatgagttgtcagctgagacttacagaatgaaagaaatgtcctagttgtttagcttgactgtaaacaaatggggcttattacaggattctgtatgcatttttaagtctgacgtatttttcctcaaaagatgaggatggtaaggatgatatggggggaagggcactaagcagaaggttccttattcttcttactgccctgtttctcccctgctgtcttatttataacctcttgtttaatgacaagaatttctattgaacaaattatttattttatataaatgtggannn

SEQ ID NO: 20516 - DNA, 822 bp, Homo sapiens; identical to SEQ ID NO: 20132
  misc_feature 1, 2: n = A,T,C or G

SEQ ID NO: 20517 - DNA, 402 bp, Homo sapiens
  misc_feature 1, 2: n = A,T,C or G
nnatactggcggagtgggagctccaccgcgggggctggcggccgaggtactttgttcttttactactcaatgagactgagagcctgctggattcactaagaccaggtgaacccagagggctctcggtctcattgactcaattgggtttgaatctcaattctgcaacctacgtggctttgggcaggtttcctcattttcaaaattatacaataatatttaccttttaaacttattgaaggattggaaagctgtaacacctagcatgctgtcgtggcataaggtgggggttaagtaaaaagtagctactattaacatttttgaaaagtgctccttcattttccctgctccctttcatactcttcatcctactttcctggtagttcatttcttcttagttggctg

SEQ ID NO: 20518 - DNA, 518 bp, Homo sapiens
  misc_feature 518: n = A,T,C or G
acccaaattaccttgatttaaaccccagctcgcccatttattggccgtatgaccttggacaagttatagaatctctttgggtctgttgtaacatggtaataataatacctacctacctaacacacagggtggttgtagattaaaggagttgccacatgttggaagcatgcttatgctaacaggcatactcatgaagtatcagctatttaaattatcatcctccctcaacaggattctataaactggttccaagataaggtaacctgggataataaagttttctgatttggttagaaatacacctagaaaacttagaaaccaggcaaatgtgaaacataaagagtagatatctgggaacaaaaaagtatattataaaatgccaatactgtcaattcatataaaaggcatcttaatcaatctcccactccccacaaatggaaagcggaggatggtacccgggattatcattattattattttttaagagacagggtcttactagttgcccctgttgggcn

SEQ ID NO: 20519 - DNA, 559 bp, Homo sapiens
accttcttggctatgtctgccagcaggaacaaagaggcatccaaagcatgtcctttgggccatggcattgtctttttccttctaagtctaggatgggtgtgtctgctgaagctacatcattgtgtggaacctgagctgtggtccagctttccagcctctagtgagcagtaaggcacactgcaaggggaatgtggcagaggtgagtggatccacatggagtatttactacatccacttcattggattctacctggatcactgtgttggaggtggaaggccatctgtgatttgtggtgcttctaaaacattctaaggacgtgccctatttcagttaagacacacatttgatttctagctatgcaacctttacaactgacctgatacttcctgaacttccatctgtaataatgagaaagataatgacgatgtcacatgttagtagaagataaagtgagcaaaaatacaccgaagctctgtctcagaggaaaatattagcttatttcttgggttactgtaggcttatttcttcccttttttaatcagccggtctaaatattgt

SEQ ID NO: 20520 - DNA, 470 bp, Homo sapiens; identical to SEQ ID NO: 20422
  misc_feature 469, 470: n = A,T,C or G

SEQ ID NO: 20521 - DNA, 494 bp, Homo sapiens
  misc_feature 492, 493, 494: n = A,T,C or G
actgggaactctggcaggatccttgatgtcctcttaatctcttttaattttcataatactgtgatgcaggtatcattatcccccctctccactaccttgttttatcccagagggaagtaaagctcagagaggctaagacactttctccaggtgacagactctggaaggggcaaggttaggatttgattgtctgtcagattccattatgctgtgtgcctcaaatgcctggtgatcctatacgctaccatgggcactatgtggggcagtgccactaagctctgctgtgacctcgaggttacctctgaagtttatgagccactgccagaggctcagggtggatgatccaagatagctgggctagggtattaaaagggccctatcagaacaaagatcattcacttttgaagtctaatctctttgggttctagatgggaaggaaacatattaaaggtggatgaaggagggaggtactcggccgccccgcggtggagnnn

SEQ ID NO: 20522 - DNA, 525 bp, Homo sapiens
  misc_feature 522, 523, 524, 525: n = A,T,C or G
acaaaatatgagagaattcatttccagtaggcctacactacaataaattgacaaagaaaatttgccaggccacagggtaataatatgagatggaagctcaaacctacaggaagaaaatatttataggaaataataaatatgtgggtaaatctttttttaattaatgtaagaatcaaaatattattttgtgggatttgtgatgtatgcagatgtaaaatatataacaaaatagcacaaacaataagggaaggcaagtggaattctacacaactgcaaagtttttacattttatgtgaagtgatatgacattaaatctaaatagactggggataagataaagatgtgtggtataatacccagagaaaccactaaaaacaaatatccaaaagcagcggagctaagaagtcattgtaggaattaaaataaaatactaaaaaatggattaacataaaagatggcgggaaggaaagaccagaaatgaaaaacagaaggtatcaatagaaaacaaattggaaaatagannnn

SEQ ID NO: 20523 - DNA, 785 bp, Homo sapiens
ctccaccgcggtggcggccgacgcggccgggtacacagtcattttggattcctgctgtcttatacaccaaataagtagttaaagtgacacagttcatagaataaaatgaatgaaaacacagacatggaaatggaaggaaagtgcagagctgctttctaaatcaaccaaattaattaaatcctgaccacaaatactgaaatgcagagatgcaaagtcctttttgagtagcctggatcaattgtttcctaagagcagatgggcactactttagctgtgttgtctacaaagaaatccagttggcgagaaaatatttcatccacagaactatgattcacagggttagttcctagaggtatctgccccaaggccacctgggatgattaccagagtcactttaaaccaagattctaagcctaatacccttgcccctggaatttgaagacaaggaagtgagtctattctgtttcccagaaaactgagcccgctcataatttcattccaaagagaataatctacatagagaacttattttcaggatagaaacagattttctgacacctgcaccttttccaaagggcctgtaagacttcatatctgagcatgaagtagtggcatgtcagcagagacctcagagctgccacgtgggcagattcttcctcacaacgggaatcagaccaagttccctgtttgagttaaagtgagtagcgggccatggaagaaggtatctgtgtttttcaaaactgcatttcacattgtacctgcccggcggccgccaccgcggtgga

SEQ ID NO: 20524 - DNA, 865 bp, Homo sapiens
acgcgggggggcatcacggacctaccaatatgtgatgtcacccctggtggcccagctgtgtcatggagaaactccagctgggcccagagattctgcagcgggaaaatccaaggcttatttatgccaggctgagtggatttggccagtcaggaagcttctgccggttagctggccacgatatcaactatttggctttgtcaggtggaaggaacagcatatttaagttcttttctgtggaaaactcagaaattgagtctgtgggaagcacctcgaggacagaacatgttggatggtggagcacctttctatacgacttacaggacagcagatggggaattcatggctgttggagcaatagaaccccagttctacgagctgctgatcaaaggacttggactaaagtctgatgaacttcccaatcagatgagcatggatgattggccagaaatgaggaagaagtttgcagatgtatttgcaaagaagacgaaggcagagtggtgtcaaatctttgacggcacagatgcctgtgtgactccggttctgacttttgaggaggttgttcatcatgatcacaacaaggaacggggctcgtttatcaccagtgaggagcaggacgtgagcccccgccctgcacctctgctgttaaacaccccagccatcccttctttcaaaagggatcctttcataggagaacacactgaggagatacttgaagaatttggattcagccgcgaagagatttatcagcttaactcagataaaatcattgaaagtaataaggtaaaagctagtctctaagcggccgctttcgaatctagagcctgcagtctcgacgcatgcggtaccaagcttgtcgagaagtact

SEQ ID NO: 20525 - DNA, 405 bp, Homo sapiens; identical to SEQ ID NO: 20511
  misc_feature 404, 405: n = A,T,C or G

SEQ ID NO: 20526 - DNA, 423 bp, Homo sapiens; identical to SEQ ID NO: 20393

SEQ ID NO: 20527 - DNA, 858 bp, Homo sapiens
  misc_feature 1, 2, 858: n = A,T,C or G
nnaccaggtatccaaaaagctcctgtggagacccgactttgccccactctgctgaaaaaacctctcctcagagccctgggctgtgcaacgacaactatgaaaatatttgtttctcacttagggaaatttcccaggaatcctgctaagtccagaggggttttctttctcttccttattcataggttccccttgcctttaaaaggaactaaataaacaagcataaaaacaaaacaagaaaatctcccctgctcccttggcttttatctgaccctgaaatgaccccttgcctggcttgcttcatacaggtctttgaaaggcgttctctgcagaatggtgtgggcacaactttgaagtccaggcttcagtagtggccaaaaattccaaatacttggagtatccaggctgcccagagctctccagggtagactggaagtgtgaaggtgtcataggaaattcttagcgacaataggaattcttagggcccgatcttgtgctaggcatggttacaacagtgtcaaataatagtgcactctgactctaaggtggatatcattgtccttgctgtgtatgtgaagcaagtgagcctctaagtgatgtgctgtgaggacaggaagattgctcaccttctcaaggtgagtgagtggtggggacaggatccaaacctcagctgtcagctctggattcaggctctctcctctggaccacggtgcatgtgggtattcaaaggggtgtacagtggccagtccgcccttgtcctctcccttggccctgcactcagggagtcctccctggtagacctgactcctcactgccttccttctcctactatattcctattcctttctgcccttggaaccn

SEQ ID NO: 20528 - DNA, 1409 bp, Homo sapiens; identical to SEQ ID NO: 20290
  misc_feature 1, 2, 3, 4, 5, 6, 7, 1409: n = A,T,C or G

SEQ ID NO: 20529 - DNA, 731 bp, Homo sapiens
  misc_feature 1, 2, 3, 4: n = A,T,C or G
nnnnacgcgtccgggcttgggggacacagagaaatctcagatgatgtacaggtttccaggttgtacactagtatttaacctagacgtgaggaaggagtaggaaattttctggtgaatacagaagagcaaagaacagcaggtcagcaggaatgactaatgtttttctatgcatgtttaatggaatattcgtgtaggatattttgagtaggtaattggataatcagcatttgtaacttgcatcctagtagtctgactctcactaataagacttgtcaaagttccaagaatctgaaagtggatgataaatgtccatgtgtatcaccatccatgaccgaaagtcagcatccacagaacacagaattgggacagatgaacttaatagataaagatgaatatcggagttgttcctcttagggaatgatactctccatgacctgtgtgagtcacagctgccagaaaagaaagagcaaggagcgtatgaaggcagcacagcaaattcagtcctagagtgccctgcttgacttcatgtcatagttctgacttctaataaatcattttctgcaaaatatgctctgtgattttttccctcttgctgcctgcagccaaacagaatccctttagcagggcatttttgtgttcttcctttaaacaaggcaacatataaataatgaaaacaagagaaagagtggtttttgtatgggatagtatttaacgtaaacttgagagtgagt

SEQ ID NO: 20530 - DNA, 1409 bp, Homo sapiens; identical to SEQ ID NO: 20290
  misc_feature 1, 2, 3, 4, 5, 6, 7, 1409: n = A,T,C or G

SEQ ID NO: 20531 - DNA, 466 bp, Homo sapiens; identical to SEQ ID NO: 20303
  misc_feature 1, 2, 3, 466: n = A,T,C or G

SEQ ID NO: 20532 - DNA, 830 bp, Homo sapiens
acctgaagcttgaattcctgaacttttttttttttttttttgtatttttagtagagacagggtttcaccaaattgaccaggttggtctcgaactcctgacctaaagtgatccgcccaccttggccccgcaaagcgctgagattacagacctgaaccactgtgcctaacctccctgaacttctcaacattctgagttagtcactttccctttggtttaagccagctcgggttacttgcaaccctagttatacagccacttttctacaacacaaacaaaccacctagaataaaattcattttcctccttttttttttttttttttaatggaaggtggggaattcagagagcagaaatctgtcctgaccagagaagagttcttaacaggttccactggtatccaggcaagctaccctccagactcaaggtgtgaggcttacatagctgctcctcctcgctgaaacccatgattgccatggcctccacggtttcctggaacatctcatcatcctgggctgctgggatgggcacaaagccattggagaggaaggtgtagttgttgaagccctccaaaagcaagtcacttctcatcttctccttggctccagcaatcatgtagtaaaagatgtggaatgtcctctcgtctctggcttggcgaattgcccgtgatttttctagcagataggtctcaatgttggctcccacgatgtaacccgtgacgtcgaagttgatgcggatgaatttgccctgccaacaggaaaacacagttcaggctttgctgcccaacttcagccgttaaccccatgctgtgggcaagcaggaggcagatggt

SEQ ID NO: 20533 - DNA, 895 bp, Homo sapiens; identical to SEQ ID NO: 20435
  misc_feature 1, 2, 3, 4, 5, 6, 7, 8, 9, 884, 895: n = A,T,C or G

SEQ ID NO: 20534 - DNA, 582 bp, Homo sapiens; identical to SEQ ID NO: 20314
  misc_feature 582: n = A,T,C or G

SEQ ID NO: 20535 - DNA, 493 bp, Homo sapiens
accatactcttttggttgctgtaattctgtggtataatatgaagtcagaaaatataattcctcccaaagtgctgggactacaggcgtgagccagcgcgccaggccaagaatttctttccatctcctgtgtcattgctttggcagtggaaaccgcacgtggcctctaaagagtgggtcccaaggtcatgaaggcctgtggggtggagggcaaggtctctccttccaggctggaatggcggaagacgcggcggcagaggggctgcatgtcctcctcacagcaggcccctgaggacctttatcctcctgagccatgaatgtccctcaggagtgtctaaagcacccggtggggcagggggacccctataggccttaggagctctggccaattagtggtcagtaaaacgcagaggtgaacaccatagaaccacaggtccagggcagaggaccaacagctctgaggatgcccttttttgttctcccactgcaaaattgt

SEQ ID NO: 20536 - DNA, 631 bp, Homo sapiens; identical to SEQ ID NO: 20434

SEQ ID NO: 20537 - DNA, 1044 bp, Homo sapiens; identical to SEQ ID NO: 20502
  misc_feature 1, 2, 3, 4, 1043, 1044: n = A,T,C or G

SEQ ID NO: 20538 - DNA, 416 bp, Homo sapiens
acaaagcgcaaataggcaatttggttcaatatctcccaacttaaacccactgctttttcaacagaaatgttttttacatcaagtgttgcctctgttctcactctccctccttcttgatcttttaatctaaccctgtcttcttgacttctttctagcccctgccccattgccattggtttataggtcaaattgcttgagttaaatgcatagaagatgcaactatttcagacctcactttaaacaatgtggtaagtgttaagacagaataaaagataaaccaaaatattgtagaagatgattctaatggcatatccaggagctaacctgctctgcattgatgagtttagctatcataattccaaaggaacactatgattgagaacaaccaagagcactactaactccagcatcaccaa

SEQ ID NO: 20539 - DNA, 375 bp, Homo sapiens
actttttaaatgacaaagagtaatttcaacaaaaccaaatgctgcagtgtggcactcagctataacagtgtattttctttatccaaataaacacaataaaagctttgctttgcattgttcattataaaaaactgaatttttcttttgcaactatttatttttaaatgaggaagtaaaattctcaaaatgatacagttgctgctgcaaagtatgaataataagactgagggaggtaagagagaaaggactagtgcaagccctaacaaaagccctgtaccagatggaaaatgtttttggtgatctggctgctgcttaaagccagttttccctaagaactccaaaggctaaagtctactaggggcagagtgtgaggat

SEQ ID NO: 20540 - DNA, 668 bp, Homo sapiens; identical to SEQ ID NO: 20192

SEQ ID NO: 20541 - DNA, 571 bp, Homo sapiens; identical to SEQ ID NO: 20123
  misc_feature 1, 2, 3, 4, 5, 6, 7, 8, 9, 10, 11, 567, 568, 569, 570, 571: n = A,T,C or G

SEQ ID NO: 20542 - DNA, 707 bp, Homo sapiens
acctcagttggaaatgcagaaatcacctgcctactgcattgatctcgctgggagctgcagaccggagctgttcctattcagccatcttgccagcaggtatttctttatagcaacacaagaacagcctaatacaatttccagtatcaacgggctgttacaagttccccctaccccttcccagtgggatggagacagtggagtgtctaaactttcaacatcgtccagaagtaaagaggccactcgctccctcttccctctggtgtcaatggaggccatgtggagaacagtaatgagacactcctattctttccaactaggatgggatcagtagaggcctagtggggagccaaaactcctagtcccaccatgcagtaacaaggaggcccccatccctggtgccagtaaaggctgagtgggaacctagacttctacctccagttggtagtaacaggggaagtgcctccctgcgctgcctcttttagagcagcgtcagagaaagccagctaaaacagaaagtcaaagtaatatccagactctcataatatccaaaatgtccatgttttaatagaaaatcactcattatgccaagatccagaaacatctcaatttgaaagaaaaaaaaagacaattaatagatgccaaagtcaagatgacagagatgttggaattatctaacaaagattttacagcagttcctctaccaaagt

SEQ ID NO: 20543 - DNA, 513 bp, Homo sapiens
tctaacctcaccaactgtatattatccttccacctcccaatgctatagacatgctgtcttccttgcttttcctagaacacagcaagcatgcttttgcctcagggactttgtacctcgaccgcccgggcaggtacctttatctctttacctcttcctttctttctacctgaaggttacagtaagtcagccatcatgtgactatgaagcagcaagcatttgccaaggcaggttaagcagaaagataaaaggaacctggggctttgatatcataaaggcaacaacattattgtcagctgtatgaggagaaagataaagtcttccattgattcaagctactgttttcagctttttattacaaatagctaaatattatttctaactgatataccatcagaaacttacctggacaactttctattaatgactgaaaaagcgtgtgtctttccagtttcctttactttggttagagttgaggactagactctggatataagaaacaaaacaatgtgtacc

SEQ ID NO: 20544 - DNA, 375 bp, Homo sapiens; identical to SEQ ID NO: 20484
  misc_feature 374, 375: n = A,T,C or G

SEQ ID NO: 20545 - DNA, 383 bp, Homo sapiens; identical to SEQ ID NO: 20349
  misc_feature 383: n = A,T,C or G

SEQ ID NO: 20546 - DNA, 1380 bp, Homo sapiens; identical to SEQ ID NO: 20118
  misc_feature 1380: n = A,T,C or G

SEQ ID NO: 20547 - DNA, 1214 bp, Homo sapiens; identical to SEQ ID NO: 20119

SEQ ID NO: 20548 - DNA, 961 bp, Homo sapiens; identical to SEQ ID NO: 20386
  misc_feature 958, 959, 960, 961: n = A,T,C or G

SEQ ID NO: 20549 - DNA, 844 bp, Homo sapiens
actctagaaccaaagttaaagtgagtctcaatttctcacctgaataaaacttcatttttccacttttcttatcagtccttaaaaaacgatgagcagtctgccaaaactgatgttcagaaacttctggaattaggacagaaacaaagagaagaaatgaagtctcttcaggaggccctgcaaaatcagcttaaggagacatcagagaaagcagaaaaacaccaggctactattaattttttaaagactgaagttgaaagaaagagcaaaatgatccgagacctccagaatgagaataaaaacttgaaaaacaaactcttgtcaggaaacaagctctgtggcattcacgcagaagagtcaaaaaaaatccaagcccagctgaaggagcttcgttatgggaagaaggatttattatttaaggcgcagcagcttactgatctggaacaaaaattagctgtagccaaaaatgaactggagaaagcagctcttgacagggagtcacagatgaaagcaatgaaagagactgtgcagctctgcttgacatctgttttccgtgatcagcctcctccccctttgagtttaatcacatcaaatccaactcggatgttactcccacccaggaatattgcctctaagcttccagatgcagcggccaaaagcaagcctcaacaaagtgcttctggaaacaatgagagctctcaagttgagtcaacaaaggaaggaaatccaagtaccactgcctgtgactctcaagatgcacgtcactcaaggaacagaatatgcctagcccttctcccagcatgatggcccttgaaacatttgatagtatgtcttaattctccatttg

SEQ ID NO: 20550 - DNA, 575 bp, Homo sapiens
  misc_feature 1, 2, 3, 4, 5: n = A,T,C or G
nnnnngcggtggcggccgaggtacttgtaggttgtgatttttttttgtcaacctgattctgtctgttttttcttaggaactcatcaaaatttccagcctactgataacactccattattttctagcacagcagcactgttaggaaatttttcttaaatatgcacgtagtaaaagtatatatataatgtatatatacacttaaggacatatattacatatggacacacaggtgtatatgtgtgtatacacacatgtatatattcccagtgactttcaggtggagatgagctagatatacacgttcagcattttaatgcaatacttaattataattcataagtgaccaccactgtatgcaagccattattatgatgcttgcagtagtagggatacattgatgaataacatactggggccctgtccttcaagtgttttataacctagagggcatatatttgtattatattatttttattcattacattataataatttatgctcataatgacaataccaaatcattaagtaaaagttaaatgaaaatcaatggattctatttaattcagcagagaagt

SEQ ID NO: 20551 - DNA, 372 bp, Homo sapiens
  misc_feature 1, 2, 3, 4, 5: n = A,T,C or G
nnnnncacaattaactgtttaaatccctttaaacttcactgacataaatatagtttatctcaaagatcagctgtatttaaagttacttaccagggaatgtctttttacatgttctcttcgagtaaacagttttccacaaatatcacagctaaatgatctcactcctgtgtgaatgagcaagtgcctttttagtgttcgtctgtatttggctacatagctacaatgagggcattttaacttgttcatgattagagatgattcacctatgagaattaaaaaaagagaaagtgcttattacacattaaacagaaaacttgctatcaaaacttcttatctctatatctgagaacagcaattatgtggagcccgcgt

SEQ ID NO: 20552 - DNA, 375 bp, Homo sapiens
agaacactacaactcagcattaatcctaaaactgttggggttatctcttttactagtgggaaacatgcagtttactgtgcaactagccaagggcctgctaatgctgatgggaccattagcctcaaccatggttctactgcagaaatgaagaccaccttaccaaagccaactttttgggcattaaaatttcaaagcatctcaatgctgttcagagggcaaataggctatattagacattaagaaagaaattatcagttgaaattaagaatatatatgtgagagattacagaaaagcttaagacaaactagaaattcttaaattcaaactgccactaaaatggaaggcagtgcatcagtagttcctgagctatgtgt

SEQ ID NO: 20553 - DNA, 379 bp, Homo sapiens
acggttgctatttatagccactatcataacatactgctgcctctaactcctggcctcaagcgatcctcccacctcagcctcctcggtagctgggactataagcacatgccatcacacctgaattaaggacactttttgttgttagtattaatgcattggttcagctgagcaaatatttaacaaaattctactaagcaccaggctttcttttctaatatacaggtattaatagtcattagcctgaggcacatataatacacagactatttgaatgaatcagactgatgatacaaagtataattgatgagagacatgtagtccaaccagaagattgaggacaatcatcctgatgtagattttcattgactttagtcttgga

SEQ ID NO: 20554 - DNA, 629 bp, Homo sapiens; identical to SEQ ID NO: 20404
  misc_feature 618, 619, 620, 621, 622, 623, 624, 625, 626, 627, 628, 629: n = A,T,C or G

SEQ ID NO: 20555 - DNA, 1608 bp, Homo sapiens
  misc_feature 1, 1594, 1595, 1596, 1597, 1598, 1599, 1600, 1601, 1602,1603, 1604, 1605, 1606, 1607, 1608: n = A,T,C or G
ngaatttaggtgacactatagaagagctatgacgtcgcatgcacgcgtacgtaagcttggatcctctagagcggccgcctactactactaaattcgcggccgcgtcgacttttttttttttttttttggtagggacagagtctcactatgtttcctaggctggtctcaaactcctggactcaagcaatcctcctgcctcggcctcccaaagtgctgggattacacatataaaccaccatgcccagccaccacagaacttttaataaaagagggaaatcagtactacaggaaaataacacagctgtaactgcaagcatgactgacatttaggtttgggcaacacagccatcaggatcccagcaggaaacagatagcacccccaaactgggtaatttaaggagagtttaagaaagggactatttacaaggtgtgaagggtgtgggcacagtcaaaagatagtgcaacctcctgaagctgctatcatctacaggcttggaaagacaaagagggccccatgatatgagccatgccctctgggagagccaacatgacatgatcttgcaggaggaaaccaggaaaataaacacagcaactctactctcctcctgccagtgctatccattgtccaaacccatctagaagccagtctcaggctcctgagactgagggcagggaaggcaatgacagaaagcaggtccacagggtcaatggaagataagcagaaccaggagggaacagaaggtaaagccagttggggtctcagtagggagctgaaacctaaaagtgagtaattcaagatagattaacaaaggggctatttatagagtctatattaagactacatattaagaacattgggttttattctgtgggtaacaaggagacacaattccaatctgtgtgctaatggaggggctatgaaaagagctgtgtaaagaaaaaaaacagtgtgaagacagaaatactagtgtatattagagatgttaagggcctgaaacaaagaaataacagtgggaacaggaaaaagaggtagatcctaaagatgtttaggaagttattcctacacaactgtggatcgtgtctctgtgtacctcggccggtgtatctaaaacacacacacacacacacacctcttcagcctttgttgtatctgcaaaatataatttccatttttccctttccctaattaccacctaataacatgccctgcataatcttgcttacagtaagcatttcaaggaatatttatgaaatgaatgaataaacaagtgagcaaagcttctgaaacatataaacaataatcttatgtaaccataaacttagatcctgaaaagctgtatgtgacttgtcacaccaaagggctcaagttcaaacaaacaaaccaagaagggacaaaaaaaaaaaaaagggggaaaaatttaaaatccaaaaaccccctggggaaacctttaaaatttttttttttaaacacttttttcaacccttttttcctttgggaaaaaaaactggtaaaaaaaaaaaaacaaccgaattcccccctgttaaccggcaaaaaaattttttaaaaccaaaacctcgggaattttgaagggannnnnnnnnnnnnnn

SEQ ID NO: 20556 - DNA, 485 bp, Homo sapiens; identical to SEQ ID NO: 20462
  misc_feature 485: n = A,T,C or G

SEQ ID NO: 20557 - DNA, 546 bp, Homo sapiens; identical to SEQ ID NO: 20461
  misc_feature 546: n = A,T,C or G

SEQ ID NO: 20558 - DNA, 597 bp, Homo sapiens
ttacgtgctgctttgaatttacatataggaacttatattgaggttccatattccaggggaagagacggacaatagtgattagcacaccatgcctggcctaggaaatgctttctaagtactggaggtctggcacaatatttaccattccataactcccattacctttgggttttctcctcaggatgatatatcttcattcagaaaggctttgggtacagttgtaggttatctgcatagattatatctaccaagttagacccaataaagagtaatatacagaatgactatttaaaagactatagggaaaagtgggattttttttttttttacgctagattacccaaagttaaatttggccagagtggatatcaattcctagacttgggttttaacttaaatggatttatttatggcctctaagacaatcattttattctcactgcattcatgaaataattcactaacacatttctcccagagttgctaatgcaatgctctttccctcagtggagtcatctgattgttttagcgcaggcactatcatctcaccatcagaatatataagaaatgtttgaccttcaattaaagttgcagaat

SEQ ID NO: 20559 - DNA, 513 bp, Homo sapiens; identical to SEQ ID NO: 20543

SEQ ID NO: 20560 - DNA, 2843 bp, Homo sapiens; identical to SEQ ID NO: 20339
  misc_feature 1, 2, 3, 4, 2815, 2816, 2817, 2818, 2819, 2820, 2821, 2822,2823, 2824, 2825, 2826, 2827, 2828, 2829, 2830, 2831, 2832,2833, 2834, 2835, 2836, 2837, 2838, 2839, 2840, 2841, 2842,2843: n = A,T,C or G

SEQ ID NO: 20561 - DNA, 379 bp, Homo sapiens; identical to SEQ ID NO: 20553

SEQ ID NO: 20562 - DNA, 1214 bp, Homo sapiens; identical to SEQ ID NO: 20119

SEQ ID NO: 20563 - DNA, 411 bp, Homo sapiens; identical to SEQ ID NO: 20409

SEQ ID NO: 20564 - DNA, 1108 bp, Homo sapiens; identical to SEQ ID NO: 20121
  misc_feature 1, 2, 1103, 1104, 1105, 1106, 1107, 1108: n = A,T,C or G

SEQ ID NO: 20565 - DNA, 939 bp, Homo sapiens
  misc_feature 1, 937, 938, 939: n = A,T,C or G
nctgtatattagatgattgtttacacttattaagaacagcgatctttgaatcttattcaagtacagtatgccttaaatgtataggaccactgagattcaggaagaaaagcataggtattctgtaggtgaattacactaacaaaatcacaactgcagaatgtgatctgatacttttgttggacagtaaagctaatacattttatatacacagtcatacctttttttttagtaatgtgtttcgttaacgtaagcacacagtcatcacagactgagacaggactttgttagaccagatcttgtgagctaaatatttaagagcttaacatatataaatgattttaattggtattgggcgaaggaaacctaaaaatgcttaaattgacagatcttacaatttgcttactgaaaattcagaaagcttttatgaaaactttgtatttcctcaaaaatatttgtggctcaatactgaaattagaagtaagatccctttaaagagggtctcactcctatacaaaatataggctatgaagaactcaatcagtggcaactaactagtgttatatttgaaccacaggatgggacattattttttgaccactttacatgaaggcattgtctaatcaccaaagtaaccttaaagttgtcttacactcgcggaaccttatcacaatctctggagacctgactaaggtgccaaactcgcgctgcagggctcaagcagggaggataatagatcggggctcagttccaacatctggcggggccggatatcattacacccctagggaaatcctgggccaacatatgcaccgtaccgcgtcgagcagatcagacggagagcagagttcgcggcgacaagagcacggaacaccgaggcaccgccaaaagacgcagcacgaaggaggagagctcagtaaagacacgacaaaatctaacnnn

SEQ ID NO: 20566 - DNA, 939 bp, Homo sapiens; identical to SEQ ID NO: 20565
  misc_feature 1, 937, 938, 939: n = A,T,C or G

SEQ ID NO: 20567 - DNA, 745 bp, Homo sapiens
  misc_feature 745: n = A,T,C or G
acaagcagtgttctgagtagtgagacaagacctctctactaaggtcatcctttcaatagagcccctgcagggaatgagggggtgagccacacgtgtatctggggtaggcttggggtgtggtgattgtgcaacaacagtccaggcaaaatgaacagcaaggggacaagactggtggaccctcactgggccattggtggaacagcaaggaagctagtgtggctgggatggactgatgaggagtgtggtagaaatgaagtcaaagaggcaggatttaatccctgatttcccaagagagaagcaaagacacaggtgttaatttcaatcagtcctggaacccagactcaaacccaggtctcctggttcttcatgcacagacttgttcctgatgtctcagtcccacagtcgtgtgcttctcatagtttatttgatccacaagttaagtaattttatctgcattttaccaagtaggataatgactaaaagatcttactaaagttactgcacctacttagtgttaagagattggggccaggtgcggtggctcacacctgtaatcctagcactttgggaggctgaggtgggcagatcacaaggtcaggagatcgagaccatcctggctaacacggtgaaaccccgtctccactaaaaaatacaaaaaaattagctggacgtggtggcgggtgcctgtagtcccagctacttcggaggctgaggcaggagaatggtgtgaacccaggaggcagan

SEQ ID NO: 20568 - DNA, 396 bp, Homo sapiens; identical to SEQ ID NO: 20480

SEQ ID NO: 20569 - DNA, 512 bp, Homo sapiens
  misc_feature 511, 512: n = A,T,C or G
cgctcgcaaacctaaaaccttgagctgtgtggtaccatctggtactgaggtgggtctagaggattagtctgtgaattgcagcctggattctgcagttgtggggtctgcctggtgctgagttttactgtggtggactcagtgttgggatccagcggaaaatcctgtgcttactttcctctcttcctgccaagtggagagtatgtcttttcatgctctgctgcctggaattggaaaagaggtgatttggataatgtaaaactgtccttcctatcctcttcaacgtatcttttattattattgtgctacaaccagacactgtgatctttcatctggttttcttagatgttgtaaagatattgtgtgcatggaccaggtatggtggctcatgcctgtaatcccattttgggaggccaaggcaggaggattgtttgagctcaacagtttgagaccagcctgggcaatatactggaccccacctctataaaaaaaaaaaaaaaaaaaaaaaaaaaann

SEQ ID NO: 20570 - DNA, 1231 bp, Homo sapiens
  misc_feature 791, 1228, 1229, 1230, 1231: n = A,T,C or G
actttaaaataatagaccttacaaagttttctagactgacttcctgtgaagaacaaggagcagggggaaaggggaaggggtagaatttaccaatctgaatatttcagcaagggagaatgcatgagttttactataaaaccacactgaacattgcaacaatactaaattccatacatatataataatcactgagctataaggttgctgatgtatttgttcttgaaagtgaattagagttactttatgcagaatcagctagtttttatgtttcataatgtctttcccttttttgaacttttttttaagtctaaagtagggggaaccaagcctgctggtggtgattttggagaagtcttgaattcggctgcaaatgctagtgccaccaccacggagcctcttccagaaaagacacaggagagcctgtgagattcctacctttgttctgctacccactgccagatgctgcaagcgaggtccaagcacatcttgtcaacatgcattgccatgaatttctaccagatgtgcttttatttagctttacatattcctttgaccaaatagtttgtgggttaaacaaaatgaaaatatcttcacctctattcttgggaaacaccctttagtgtacatttatgttcctttatttaggaaacaccattataaaaacacttatagtaaatggggacattcactataatgatctaagaagctacagattgtcatagttgttttcctgctttacaaaattgctccagatctggaatgccagtttgacctttgtcttctataatatntcctttttttcccctctttgaatctctgtatatttgattcttaactaaaattgttctcttaaatattctgaatcctggtaattaaaagttcgggtgtattttctttaactccaaggaaagaactactagctacaaagaatatttcggaattagcatcgttcggtattaggtacatatttcggctcgaagaccccagatcgaagtaaacagctgttgcattccaattattatagtctcgtacgtaacacttgtatccaacttctaggtgacttgcgagtggacctctatatcctattctgcccgttgtcgccgtacccttccggggatggcatttaccctcttgtccccctctttcccgggtcacactcccgcctcccctacctttcggtccccccggtttcccacgtgcccttcccgcgtcagtgtctcaaccgcannnn

SEQ ID NO: 20571 - DNA, 1522 bp, Homo sapiens
  misc_feature 1, 2, 440, 1404, 1459, 1467, 1520, 1521, 1522: n = A,T,C or G
nnaggaatttgtttaaaacctgagaataatacatcagatgttcttagatatgtttttatatcatttattgtagttttagaagctgtaaatcttccattactggtttctgcgttattagaaagctatagggaatttgggtggagaggacatctaccctccgccaccaagtgtaagaaagctgtgagggaatttgaatttatgtaatttcaaaggagacattcactttcagagaataactcattaggctcgaaatttaatagtttcagctactgaagaggctgaggtagaaggattgattgagcccaaagggtgacagtcaggtatgatgaggccactgctctccagcctgggtaagagagcaagactctgtctcaaacaaacaaacaaacaaacaaaaaagaaagtctatatatcttttaactgttatttatttatctatntataagcctgcagtggtttctggtgtgcataagaaaatgaacattagcctatggaaggcggaaatcaatagtcttgattttggagaccaccaagctgatctcctgaactgcaaagatagcatcatttcaaatgccaatgttaaggaattctggggatggttttgaagaagtttcaaaacggcagaaaaacaagagtggagaaacagttgttttaaaattgaaagattggccttcaggagaagacttcaagactatgatgccagcaagatacgaagatcttttaaaaagtctgccattgccagaatattgtaatccagaaggaaaattcaatttggcctctcatttgccaggattttttgtacgtcctgatctaggacccaggttgtgcagtgcctatggaattctcaagaaatttgaggaagaagatttggatgacattttaaggaaaagattgaaggactcaagtgaaatacctggtgctctgtggcatatttatgctgggaaagatgttgacaagataagggaatttcttcaaaaggtataagttagtttgcaaataatatctcttcccctcaagcaaggacttattcattgttgccgtaccttcacttggcattcaacaatataagaccattacataatttttacttcaaagtagatgggagtttttgttgaaagtcaaaaccctgtttctcttgctcctctttgaaagtctgttaacattttgagggttttggaatggtgatttgttcccagttggtagtgtgcctccattccctgttaataaaagactgatctgttcttgagccagatattagttgggtggcgaaaagtagctatctggagtcgcgggatgtaaaaacaaatatttcatggaaacgtctaaagaaggtaggatctttattttctttgaatctgatagatatttttggctgctgacctaggggaatgattctactctatncacatctggatactatggatacttactgagtaggactccaggatttttgagtaantcataccntggactgttaggttgtccatatactctggaaagaaatttatattatccacccnnn

SEQ ID NO: 20572 - DNA, 411 bp, Homo sapiens; identical to SEQ ID NO: 20409

SEQ ID NO: 20573 - DNA, 546 bp, Homo sapiens; identical to SEQ ID NO: 20353

SEQ ID NO: 20574 - DNA, 510 bp, Homo sapiens; identical to SEQ ID NO: 20400
  misc_feature 508, 509, 510: n = A,T,C or G

SEQ ID NO: 20575 - DNA, 642 bp, Homo sapiens; identical to SEQ ID NO: 20389

SEQ ID NO: 20576 - DNA, 552 bp, Homo sapiens
  misc_feature 1: n = A,T,C or G
ngtctccttaatgcttctattcactaaagaatcttgctcaaaccctggacactgcagattctagaacagtatagattgtaggtgtctggtgaaacagtaggcactataacttagagaaatcacggttaaattcatcttgcgccgagcttaagaacttaaccctatcaacacggactcagtacaacccagaatatgtcccacagggggttatgtggggcacagtatatataacagggggatatgtgtggtccaggaggtgagagaagcagggagagaagcaattgttgcattcctttgcttctgctgggcgctctgtgatgctatatataaaataaggtaagtgtgcagttgagtgggtagggagaaaagtgaggcatcttaaggcctggtggagggtgactgatttcatcctgtctttgttatgtatctgagaagcaggtttataaccacccgcggtcagtgttcaatatttaacaaactccagttacacaggtaagaggtcagcagtagcttataggtctcacttatattatccacgtgcccaactgcagc

SEQ ID NO: 20577 - DNA, 469 bp, Homo sapiens
  misc_feature 446, 455, 456, 457, 458, 459, 460, 461, 462, 463, 464, 465,466, 467, 468, 469: n = A,T,C or G
acactctaaaagccaaaaacagcatgagctgaggcaatacagagcataagctggtatcaccaatgcatcctggaaataaaacctgtgctacctactatcttgggaatttcactgagagtatagcacattctaaatgaaaaaaagaaacgaaaaggaatggttataaattgtttaaatgtgtaaacaaacacaatagatgtaagttacaaaaatgttcagagtaacagaatgcactgataacatttaaattaaatataaagaaaagcagatctacttccaacaaatacatggatacatctttgtttcatacagcagatgcagaaatgtagcttctattttaaaaagtctgaatgtccataaactgttcccaagatttgtctttaacttatatattaaaggaaaatttcttctcttgcatattcagaaaaggtaaaggttattatatntagagagannnnnnnnnnnnnnn

SEQ ID NO: 20578 - DNA, 961 bp, Homo sapiens; identical to SEQ ID NO: 20386
  misc_feature 958, 959, 960, 961: n = A,T,C or G

SEQ ID NO: 20579 - DNA, 378 bp, Homo sapiens; identical to SEQ ID NO: 20259
  misc_feature 378: n = A,T,C or G

SEQ ID NO: 20580 - DNA, 656 bp, Homo sapiens; identical to SEQ ID NO: 20451

SEQ ID NO: 20581 - DNA, 494 bp, Homo sapiens; identical to SEQ ID NO: 20521
  misc_feature 492, 493, 494: n = A,T,C or G

SEQ ID NO: 20582 - DNA, 381 bp, Homo sapiens; identical to SEQ ID NO: 20431

SEQ ID NO: 20583 - DNA, 572 bp, Homo sapiens
  misc_feature 571, 572: n = A,T,C or G
acaatccccagattttttcatgtgtagcttcttatcacatagggagtccaaacatcactttctctgtgagggctttctctccaaagcactgttctgcggtccaaccctaccactgtcactgtcaactcatacacaggcatacacatacacaacgcatacacatgatcactattcaaaatgaccattttccttatttattgtttatcatctacctctcccacctcgccacaccttccccccaaggcgaaggtaggcttcgtgaaatcttaaccttgcctgtcttattcactgctgtattctggtatagcgtctccaacatacttactgatgaataaatatctgtttaacaaataaactctctctcctctactgaaactattgttggcagtcaccaaggacctattcaaaacagaatctttggccaggcactgtgggtcacgcctgtaatcccagcactttgggaggccgaagtgggcaaatcacttgaggtcgggagttcaagaccggcctgaccaacatggtgaaacctcgtctctactaaaaatacaaaattatctgggcatggtggcann

SEQ ID NO: 20584 - DNA, 1060 bp, Homo sapiens
  misc_feature 1, 2: n = A,T,C or G
nnaagggatgaggtcaaggtgagaatgcatatcacccacgtgtacccaacagccatggctcttgcgactcacctgggcagctgtgtggctgcgcacctgactcactctttctagagggtgccttgaacagcatcagcgtggcccggcgttccctacaaatagcccttgcaattgctgaccccaaacaatgttgggaataacagaagggacaagggaacaaagaaaaggccaggaaggtaataattaaccacttactgagttcaaagccatcttgctgttatcaacagcatcgagtaatgataggtatctggaatgttcaatatgacctagaagaaagaattacaggactgtaatatttccataccagttagtttttagaagataaatctggaaagaactagaagaatctctagatgaaggttacctacaacaaagaccagtgttgcctgctgacctttggcctgcatcttcaccactgcttccccacatccctccatatttaaggactttgggacccacttgtgccttagaggttacagcagaagcactctcctctgggatcagagtgggtaggaggatggggtgcaattgtaagtgcagcggccaggacagcctgaccagaaagaagaaggaacacactcagtgactcaaacatccatcgggaagggctctcaggggactgcctggggctcaaggccacccacaactccagtgccactaagcccaggcatcctgctggacttaacccagttctcaccaggaagctgtgatatcccctatacagaacatctactcaagggagactgtatggcataaaacactgaagaaacacgacaaggtaactaaacccatcaatgtcagcagagattaaggacaagatgggcccaggagggaaagacctgggccagttcctggcaacacagctccctggaagtgtcgatgtgtgagttactgaaccttgttgaaatctcagggtcctcatgggaaaacggacaaagcaatcaccacagttgtgttaagctgagggttgtgggagagtggggaaagagtgcctcacagt

SEQ ID NO: 20585 - DNA, 396 bp, Homo sapiens
accatactcttttggttgctataattctgtggtataatatgaagtcagaaaatataattcctccagttttatttatttatttatttttgcttaggatagtattatttcttatagtgaaagcattctatgttatttattattagtctaattttgtagttttacaatgctatcctcttttacaaagctatgatcaactcagtgtgtccagatcaggatcatttgtagctatttgcaaaagtagcaatattctggctgggcatggtggctcatgcttatattcccagcactttgggaggccaagacaggcagatcacctgaggtgatctggtcaacatggtgaaaccctgtctccaataaaaatacaaaaattagccggggatgatggcagatgcctgt

SEQ ID NO: 20586 - DNA, 387 bp, Homo sapiens
acccagtgtctcatttcaggccctcctcatctttattggaccattgcagcagtctcctaactgggcttaatgctctagtctctccttccttcagtgtgccctctacactgcagccagtttcaggaacactaattgagtcatccccctgtttaaaatcattcagtgaccaggtgctgtggctcacacctgtaaccccagaactttgggaggccgaggagggcaaatcgcatgagtccaggagttcaagaccagcctggtcaacatggcaaaccccatctctacaaaaaaattagccaggcatggtggcatgcacctgtagtcccagccactcaggaggctgaaatgggaggatcacttgagctggtgaggtggagattgctgtgagct

SEQ ID NO: 20587 - DNA, 901 bp, Homo sapiens
  misc_feature 1, 886, 887, 888, 889, 890, 891, 892, 893, 894, 895, 896,897, 898, 899, 900, 901: n = A,T,C or G
nagttcctcttttaataccatgaagctttcaagttcatagctcataaaatgttatgtagctttgaattttttaatgtaaatgaaaatcagattcattttcgttattaataaaaatttcaatagtattcacatttagataagagatgcacagaattttggtctacttttaaattaatattacagttcttaaagtaccctaggtgatgcctgttcttttgaaacagcagagattttattttaaaaatacgtttttgtgtttattacctaaaggagctattctgaaatttttatgtagaaaaatcttcttctgctccatccacagaagattttttatccatagatatttttgccatctcctttctcctctttcctttgttgtagatgatatgaaaagactgcttttttcaaaaattgtgtttttaaattggtgaattttgccatgcctaaagtgatctctgagatatcctccttttgggtataaacatttctgttaaatgttgtaaagagctttctataatagacacagtagactgtatttaatttttttctcccttcttggtagatctctttgggttaaaagaaaatgcgtcattgctcctattatagaaggcttgtatgagcaggcaggggtgcactctgcgggagggcttggcattgcagtgaggcttgtcactgtagatgctagctcttctctttcagatgagagtggtgaggcaaaattgaatagtggggggcatcctctgtgggcatttggggcaactaggcattttctaatttgagaggacatctcgggaaacggtgtgcctaaaaaggaatcggaattttgagttagccaaaggggacaacaagtttttgttcagagaaagtttgtttttgcaccattgannnnnnnnnnnnnnnn

SEQ ID NO: 20588 - DNA, 491 bp, Homo sapiens; identical to SEQ ID NO: 20444
  misc_feature 382, 489, 490, 491: n = A,T,C or G

SEQ ID NO: 20589 - DNA, 566 bp, Homo sapiens
  misc_feature 561, 562, 563, 564, 565, 566: n = A,T,C or G
accagcttttgcactttcctcactgtaaagatgttgtatgggttacttaaccagttggggtttaatttccttggctgtatagtggacttagtgtcacatgcctacctcaggatttctgtgacaattaaatatgatattttaaggcttctaacttactggatctaaataaattattcctggaaaaaaaaagtttgctgtgtaataaagcacctaaacaggaatgaaaaagcaggtatagaacttcaggtgttttgtcaccctccctcccccagtggtgtgtgtaggaaaactttgcttctttctgtaaatctgatgtctaatctcttctgactttacgttcaatcagttgattattttcattcagcagatgtgatcggtttgcagggttctcagtcaagtaggattgagaaaacatgaagatacacaactaaataaaatgctatgtataaaatgatgtcttatgcaataattatagctatgctatgttacttcagcaattattgctgctttggggaaatgagaaggctttgaggaggaggtagtatttcaaaatgatgaggnnnnnn

SEQ ID NO: 20590 - DNA, 447 bp, Homo sapiens; identical to SEQ ID NO: 20364
  misc_feature 443, 444, 445, 446, 447: n = A,T,C or G

SEQ ID NO: 20591 - DNA, 423 bp, Homo sapiens; identical to SEQ ID NO: 20393

SEQ ID NO: 20592 - DNA, 455 bp, Homo sapiens; identical to SEQ ID NO: 20362
  misc_feature 455: n = A,T,C or G

SEQ ID NO: 20593 - DNA, 1641 bp, Homo sapiens; identical to SEQ ID NO: 20385
  misc_feature 1, 2, 1626, 1627, 1628, 1629, 1630, 1631, 1632, 1633, 1634,1635, 1636, 1637, 1638, 1639, 1640, 1641: n = A,T,C or G

SEQ ID NO: 20594 - DNA, 403 bp, Homo sapiens; identical to SEQ ID NO: 20397
  misc_feature 403: n = A,T,C or G

SEQ ID NO: 20595 - DNA, 545 bp, Homo sapiens
  misc_feature 524, 543, 544, 545: n = A,T,C or G
acttttctcttcttggccaagttctcctcttatgggtatggagatgacatgctctaaatgctttgggagcaagcactcattagagaagacttttgatgtatccttatcttgttagtagtttaagcttgtcagatccttaaagaatgacaggcttaggaccatatcccctagacttaagaggattctcattgaccatttgttcagtgtccatcactgaatcacttaccaaatacagtcgacactctgtatccacaggttccacacccatagattcaaccaaatgctgattggacatattcaggaaaaaaatgcattaacactgcaacaataaaaaataatacaggccaggagtggtggcttactctgtagtcccaacattttgggaggcccaggtgggaggattgcttgaggccgggagtttgagaccagcctgggcaacacagggagaccccatctctacaaaaaataaaagtgaaaaaattagccaagtgtggtggctatcaacttgggaggctgagatgagnagattacttgagtctggannn

SEQ ID NO: 20596 - DNA, 1380 bp, Homo sapiens; identical to SEQ ID NO: 20118
  misc_feature 1380: n = A,T,C or G

SEQ ID NO: 20597 - DNA, 758 bp, Homo sapiens
acacaaatcaaaggaataccatatttagcaccataggtgactaattaggcaaatgagcaagttttaagagtctggcccaatttttaaagtgtgtgtgtgtgtatcacaatctctctaatgctatatgtagtctaggcaatctggcaacagattcctaactattgttaggaaaatgcaagtatgatcctgttattgctactgctttcaacccagaggtaatgaggaaaagtccaagttccttaacatagacttcataggcctgcatgatttaggactggttatcaccaccacctcagagaaactcctgacctttaatcaaaatgtgccttgtggtaaactacttttcatttaagccatgattgcgatttataattccctatcttgtgataaatgtccatcagaatgagtattaagagggcaggaaccatccattttgctcacaattgtatcccacatttaacacattattggacatgtaaaagattttcactgaaggccgggtgcagtggctcacgcctgtaatcccagcactttgggaggctgaggcgggtggatcacttgaggtcaggagttcaagatcagcctggccaacatggtgaaaccccgtctctactaaaatacaaaaattagctgggcgtggtggcaggcgcctgtaatcccagctacttgagaggctaaggcacgagaatcgctggaacctgggaggcggaggttgcagtgagcctagatggcgccactgcactctagcctggcgaaag

SEQ ID NO: 20598 - DNA, 466 bp, Homo sapiens; identical to SEQ ID NO: 20303
  misc_feature 1, 2, 3, 466: n = A,T,C or G

SEQ ID NO: 20599 - DNA, 538 bp, Homo sapiens; identical to SEQ ID NO: 20391
  misc_feature 1, 2, 3, 4, 5, 6, 7, 8, 9, 10, 11, 12, 13, 536, 537, 538: n = A,T,C or G

SEQ ID NO: 20600 - DNA, 965 bp, Homo sapiens
  misc_feature 964, 965: n = A,T,C or G
gcgtccgaaaaaaaagactcatggactctcagtctcctgaagaccatgcgtttcaatgacttttaacttttttattttatgcttttaaaatgatttcacgtacaagtacctttgatcttatagatactggggagtggtaggtggtagataatgtcaagtaacgccctcatggtgtgggtgaggaagtgaggccttagtgttgtttggactgtgctcagccacacattcttcttattgcccacactccccaaacagtggagggttcttttatctttgggacagttctcagatcaataaagcctttgaccagagagctaaatttaaggctttgggaaatataaaaatagatctgaaactgttagtcctgagttctagccattagtggctaggtgattgtggtcaaatcacttaaattgtgtgttcttatccttaaaattggcaatactaaaacctaccttatggggtggtcacaaggttagatgaaatcatgtatttgaaatttctatgtgaattttaaattactataaagatgggaaatgctgtttcaactttggttctacatccctattcccagtggggcagtcctagttatcataaaatgatatttttctcttgttgaaattaaacttgctcttatgacctttcacttttgcacaactgagaaccattaaaatagatttcctggatacagtgattgtcaaactatgggtaaagggcactggataattgtaggttggttcgttggtttgttttaaggaatatttttatttttcaaagcactattaaacaaattttcttagaaggtgtggaatatgaaaatcatagccatgaacatttgtatgcttacaaagctgccaaatgaagcatggctagtgagtctcagagtatttcgctcatgctcaaatgctgcttgtccatttatttgccttctatatgcattaggaaacagataagctataagtann

SEQ ID NO: 20601 - DNA, 785 bp, Homo sapiens; identical to SEQ ID NO: 20523

SEQ ID NO: 20602 - DNA, 593 bp, Homo sapiens
  misc_feature 1, 2, 3, 4, 588, 589, 590, 591, 592, 593: n = A,T,C or G
nnnngtagagagttttagacctctgtgtatgtatggtgtacaagtgacaatattcagatctgtaaactgtaacacagtctgggagcaaagaagatatagaaaaatgacttttacttcctgcttgagtagtaaaattgagattcaaattttgcatatagaagtactatatggctaacttatttggggagcaaaactgacttaccataagtctacctgaaatagaaatgaaacactcaatttgtgaaatatgctgagttttaatgtgtgtgggggcaaggtgaattaacatttgtgatgcaaggagaggagcaatctatacttaccagtgtctatttgacattgtttggggactactgttacactctaagtcactttaccttataacgcagagttgtaacacgctactctgagcagctcatgacatctgcttgaaatttaagttgggcccctaatatgtgtttattataaggactttgatgctgcttttccgagttgggtaacctactttacccccctaagctaatgtttcccaaatacacccaaacccacagaaaggaaaactatttcttattaactcacagccaacannnnnn

SEQ ID NO: 20603 - DNA, 1641 bp, Homo sapiens; identical to SEQ ID NO: 20385
  misc_feature 1, 2, 1626, 1627, 1628, 1629, 1630, 1631, 1632, 1633, 1634,1635, 1636, 1637, 1638, 1639, 1640, 1641: n = A,T,C or G

SEQ ID NO: 20604 - DNA, 588 bp, Homo sapiens
accactgcactccagccagggcgacaatgagactccgtctcaaaaaaaaagattattaatttaaaaatattttaagtgatcagctgttactctaccccaatctcattggagaataagattctactgcggttctaagtcattgtgtgctgagtaaagtggttaactagtgatttgaaagaatacaggagagagggtaggagagtgagtaacaggtggagcctctgttttctttatagaaaaaagtaaacaactctttgtttagttagagagcacttaattttaggatgggcttcactggagggtaaatggctcattacccacctccatgattctggaggcgaaggcacttgtagctccaccgttagccagctggataacaggcccatgtctgtcctggccaagcctgttttgctgtctggttgcttcggccaagaagccttcccagaaccgtgccctccttacctcatgcctgtgctttctgtgttgtatttctttgcattttctttttgcttataattttctccccccactgtaagccccatcaggacaaggaacatgattggttttgctcactgccgtatcttccgt

SEQ ID NO: 20605 - DNA, 411 bp, Homo sapiens; identical to SEQ ID NO: 20409

SEQ ID NO: 20606 - DNA, 668 bp, Homo sapiens; identical to SEQ ID NO: 20192

SEQ ID NO: 20607 - DNA, 668 bp, Homo sapiens; identical to SEQ ID NO: 20192

SEQ ID NO: 20608 - DNA, 1128 bp, Homo sapiens; identical to SEQ ID NO: 20289
  misc_feature 1, 2, 1127, 1128: n = A,T,C or G

SEQ ID NO: 20609 - DNA, 652 bp, Homo sapiens
  misc_feature 547, 548, 549, 550, 551, 552, 553, 554, 555, 556, 557, 558,559, 560, 561, 562, 563, 564, 565, 566, 567, 568, 569, 570,571, 572, 573, 574: n = A,T,C or G
tatagggagtcgacccacgcgtccgaaattgtgatacattaagatagcaaaactggttctttgctttgatttcttatatatgtagttgaggaagagctgtttctgcctggtctgaaaaattaaaggaaagaaaaatttacaaaatggaaatatttttgtgaagtatacccagttggtttgtttttttttttcagtaatttcaaaacttatgtaccccattgatgaagagagatttaatactagatttcctggaaccttttgggatcatagatgtcttcatgtacattccagctttgacctacttcccaagctgtatttgaattggcttttatagagagttaactgttggcaatatttttgcaatgtgagctttgctgcttaatcctgatactatttattctttaatgatgaattcactaaaaaaaattgagtgccagacagtgttgagaacaatagaaatgtggcagtgaacaaagtccctgccttcatgagcttaccttccagtaaatatgaataaaaatctttcccttactttacttagaaattnnnnnnnnnnnnnnnnnnnnnnnnnnnnagacggagtctcactctgtcacccaggctagagtgcacaatcttggcttgctgcaacctccacctcccaggttcatgc

SEQ ID NO: 20610 - DNA, 902 bp, Homo sapiens; identical to SEQ ID NO: 20356
  misc_feature 900, 901, 902: n = A,T,C or G

SEQ ID NO: 20611 - DNA, 604 bp, Homo sapiens; identical to SEQ ID NO: 20360
  misc_feature 596, 604: n = A,T,C or G

SEQ ID NO: 20612 - DNA, 370 bp, Homo sapiens
actctggcttcttctgaaatcagattccagctcctagtcaccataaagtatgcctgacccttactttatcattggaaactaggtattccagagcaagaaattcatgtattcattatttattatgcactgtatctgattcctaaattactcctttttttgcaaaaaaaggaaaaaaaattatttttccatcacatgtgcactctcataaaactgaggttatatttttaaacactgtatgtattcaagaaaaatatatcatttataaacctcatgttttatatatttcatgaaattcagggtcctgtgcttgaactctgacaagtagggaaatactgctcgtataaaagctatggaatttaatttaaaacag

SEQ ID NO: 20613 - DNA, 501 bp, Homo sapiens
  misc_feature 1: n = A,T,C or G
natatttcatgccttctaccttaacctccttgagataacaacattcatttctgatgttttctgtgctacagggttcatgccttaactgggagttcaagctaattcttgatttctttctcaaaagacgatttaaatataaggcaaaaaaaaaaaaaaaatttccgatactgtaactaccttaactgtttgagtatatagaaatgagtatgttttatgagttaacaatgaatcatagaaggcaatttatgaagaactagaatgattctgtctagctgccttcagggatcagaaattcaaattaaacttctggcagacatttaaagaatgctagcatacaaaactgaatttaaaaaaacgcacacagttaacactcctcagtggagtttcaagaggaaatcatgaattaaaaaaacacacggcatgatacactgttgactgataccaactgggtgtggtcgatcccaggtgcacccaaacctgcgggaatggcagaaatacagc

SEQ ID NO: 20614 - DNA, 1189 bp, Homo sapiens; identical to SEQ ID NO: 20185
  misc_feature 1179, 1180, 1181, 1182, 1183, 1184, 1185, 1186, 1187, 1188,1189: n = A,T,C or G

SEQ ID NO: 20615 - DNA, 758 bp, Homo sapiens; identical to SEQ ID NO: 20597

SEQ ID NO: 20616 - DNA, 396 bp, Homo sapiens; identical to SEQ ID NO: 20585

SEQ ID NO: 20617 - DNA, 668 bp, Homo sapiens; identical to SEQ ID NO: 20192

SEQ ID NO: 20618 - DNA, 903 bp, Homo sapiens
  misc_feature 1, 2, 3, 4, 5, 6, 7, 8, 9, 10, 11, 12, 13, 14, 15, 899, 900,901, 902, 903: n = A,T,C or G
nnnnnnnnnnnnnnnatggacaaagtataataatattgagggacctttctagggagcctttggtcctttgtccccattttccaaagggagggaactttcctcttaaaagagacagtgggaacttttagccaggtttttggaaaaggcctgtgggctattaatgagagtgagctgcaaaaggaggaagggtttgtttgggtactttgaagtacttagctaggtgttttctacagtatcttatataattgcatcttacagcatctttacatgcgaaatagtttatcagttatcttcaattgcatattacaaaattctgattaaatttttcttaaataagaaaactatcatttcatatgacaagaaatcctattttaatgttactccaaggttggttaattcagtggctcagtgataacaccaaagactcagtttcttgaaatttttttgctctgccatcctccatgtttatcctcacgccagttcgcctcatggtcccaatatggctactgtaattctgggaaggaaatgctgacagaaccgtgtctggcaaaagagagacagatttttctgtgtccttctaaagcaaggaagtcttcccctggaagctccagcagatacggcctcatggctttgctagaaatgggtcatctcactcctgtcattggcaaagcaagtaagatcatccatcaggagtggcttagattaatgaattatcctttgagtcgtgtagactagaaagttcagtcatgtctactagcaagaaaggagataagggctgttggataagcagcatctggtctcaaaggtacttcaacttttacagatgagaaacatgaatcagagtgactttcccaggctcacagcaagtaagagagggcctccagtgtagctgtgtctgnnnnn

SEQ ID NO: 20619 - DNA, 631 bp, Homo sapiens
  misc_feature 629, 630, 631: n = A,T,C or G
actttttttttgtttttttatttttcctttagtgtgagtgtatatttcatgctacctaagttattaatttttttgtaatattagttatttttcaaatacctaagaattgcaaaacatttcccaggcacaaaagaaacatacaaacaaaactcagcagccttttcaactatgaacaagaaagaaagaaagaaagaaagaaagaaagaaaggggacatgcattctttcctatttacccagctcagatttcaaattcagcatgggtatttagcatctgtagaggatatgtataatcaggagtaaaatgtttcacctctcaggctttgctgatcattttccaggtaaggggataactgcgaaattcaaatgttgactttaaaaggaagatgattttattagtgtaaaggaacatcccatagtatataactcctggggagtttatttctccttaggtatttttattcgactattcaagatgggtctgtctgcctttagttttttgttgtttgtgattgtgggcatgatgttttaactttgatgaaatagaagccattagcaagatgtatctggagaaaatttaggaatggaattaggatttagaatacagttgagacatcttcctgtcttctgnnn

SEQ ID NO: 20620 - DNA, 416 bp, Homo sapiens; identical to SEQ ID NO: 20538

SEQ ID NO: 20621 - DNA, 668 bp, Homo sapiens; identical to SEQ ID NO: 20192

SEQ ID NO: 20622 - DNA, 1189 bp, Homo sapiens; identical to SEQ ID NO: 20185
  misc_feature 1179, 1180, 1181, 1182, 1183, 1184, 1185, 1186, 1187, 1188,1189: n = A,T,C or G

SEQ ID NO: 20623 - DNA, 870 bp, Homo sapiens
  misc_feature 1, 2, 3, 4, 867, 868, 869, 870: n = A,T,C or G
nnnnacgccatgaaagcgtgctcgataaaacctgtgttggccccgccgaaaatgtcgccatttttaacaacctgcgcagttgccagtaatgcttccaaagctgattccttttaaaaaggccttgtccactgattaagggaggcttatattatttatggaccccctattcagcgttgaaatttggttcaattcgaagaataaagatctatgtgtcttgttacatgcaatggacagtacccatgtaacaggtaatcatcaaggagaactggatgacaaagcacattccagcatgatcgagtgtgtcccttaacctttgacacaatggtatgttacttagagaaaaggaatttgtttactttcaacagatactacatctcattgtcttgacctgtcctcacacattaattgtaaagtgattaatgaagtttgaatggaggctctgcttacaccaaagacactatacacctctgcacatgttttaattaacagctgacacttcacaattagtttgttgttgccacagtaattacctgattcacatgactgcatggaggaagcatttttatgagatatttttagtgcttggtccttgagtgttccattttgtttgtgaccagcacaggccttctgggaacagtctcagcccttaaaattgagcacacacacatacactttaccatggccaaagttagtcgcctggtgtaagtttttcaatatttaaaataaccaagagcccagtgccagcgaatactttctatccatactttcttatttcatttgtaaccataggttatagatgaccagaccaagaagttggtcttaacttgtaatcttggtacagaatcagataatttattgagctagtannnn

SEQ ID NO: 20624 - DNA, 512 bp, Homo sapiens; identical to SEQ ID NO: 20569
  misc_feature 511, 512: n = A,T,C or G

SEQ ID NO: 20625 - DNA, 515 bp, Homo sapiens; identical to SEQ ID NO: 20177

SEQ ID NO: 20626 - DNA, 387 bp, Homo sapiens
acaaatctaaaacacaaacatcacctttacaaaacaaaattgttgattaataattatctttttcataactatctcataactttatgactacaggcccaccatttaacaactacaaccttcacataaactaacatgtgcttttaatgctgaccttagtttaaaaagcctgccagtatggaatgacattcaaataaaataaaaccaaatttaaaaagaacagaaatgcaaactcaacaatattcccatcttttgaatcctgacaatgtagaagtcaaattcataatcatcctaaaaaccaagggagtcatacgaccactgtatgtctcttcagtctaggaataatgcaaacagcagaagttactcaatgaggctttacaggaaaggatc

SEQ ID NO: 20627 - DNA, 349 bp, Homo sapiens
  misc_feature 342, 343, 344, 345, 346, 347, 348, 349: n = A,T,C or G
actttaaaagttataatgctgatgaacaaaaaggtatgtaaaaactcaggatttaattaattagatatattttccaccattagaacatttctgctcagaggtcttattacaaagctacatttctgatagtctactacggtgcagcttctgccaaagccactcaatactaacctcttacatagcaactctacttacatgactaaaatgtatatcatactttacatagccaaaaagataaagaaccacctgatttctatttccaagctactcaaccctagtaaatggccttatcatttaccctacccaggcactgatgtaaaaaatctgggagttaatcataannnnnnnn

SEQ ID NO: 20628 - DNA, 486 bp, Homo sapiens; identical to SEQ ID NO: 20467
  misc_feature 479, 480, 481, 482, 483, 484, 485, 486: n = A,T,C or G

SEQ ID NO: 20629 - DNA, 404 bp, Homo sapiens
  misc_feature 404: n = A,T,C or G
acagttaaatagtgcatcttaaatagtggggtgatattaaatggttatattctggaggctcatgcccacactgcctttgaagttcaggctgcccagccacattcaggcattgattcaggaaactcccttggcctttcagtaagagagagctcccttatgccagaactgctttgaaatagaatgtggcagagctgtaaagtgggtccaattctacaagtcagcacactctgtggattttccattgtgaatagttctcagatctatatcttcagaccctccaccaatagtatatttcagcccttaggtatctctcatctatagcattggaaaaaagcctcctaacaggcctccccaattccatacttgcctacgtaaaatatttcttacttgcacagtcagaatan

SEQ ID NO: 20630 - DNA, 369 bp, Homo sapiens
  misc_feature 364, 365, 366, 367, 368, 369: n = A,T,C or G
gctgaattgtttctgactaccattatgcaagtagggggggagatacatatacaggagtttctgagtgttctttcctaaaacttgtgcacattatgtttgtatttgaaatagaggcagtgtttagaatgaacgtggctgtgctatacttcttgatttcagtgttacaacaaagattagattaaaggaacaacaaacagcatgttacaagaagcattccaattttccagtaagaactgagtcatgcaagagagaccatacaggttccacaattaatctaatgcaaattttaaaagaatataggactcccagacatgaagaaacttgagccacagatttagtccaatgacttcagaaatatttccannnnnn

SEQ ID NO: 20631 - DNA, 376 bp, Homo sapiens; identical to SEQ ID NO: 20342
  misc_feature 376: n = A,T,C or G

SEQ ID NO: 20632 - DNA, 446 bp, Homo sapiens
  misc_feature 441, 442, 443, 444, 445, 446: n = A,T,C or G
accttctgctgttccctgggtcttcaatgactcaatttcccaccagcagtatcctttaaagccatcctgcatcctgagacaagagattgacaattcattgataagtagtcttaattgtcactattacagggctgtaggtcctttgccagccatgcctttcagtcctaaatggtcttcaaggttgggctgtgttgtccaagagctgaggaccttacatttattgttccaatatttattggctataatgatttctgtggagcagtcagctgtcagaaaattttgtctcctttgtaggtaacctgtcattggtctttggatttttttatagtctccctttgtatctggtgtaatttagtttcaatctgttgtgcctacgtgtagacttcttgcttgaaaaggtgttggatttcttgagtttgaattttggagtgtttaatcagnnnnnn

SEQ ID NO: 20633 - DNA, 460 bp, Homo sapiens
  misc_feature 1, 460: n = A,T,C or G
ngcggccgaggtacgtttgaaggtgtctacaaggcaccaccttagacctttctgaattcttaaaaggttgtgcagtttcaccctgggtttgatttttgctctgaaaccatttcttggctcaagaattgtttgatgtgtggagagattgggaatgagaaacaggtttatatttaacagtttattctttagctcatctctctctgctcacatcttataggcagtgagcagaacccaggtgtcactttaagtggctgcctggaaatctctttagatagatcattgagttcattaggtgcatttccgcttcccactttactgtagatgtcagtgttgctaaactctctgtcactgcccaacagggtcctcctttcctctagcttccaggaacatttccctcacttttctttaagccctcactgacaaccttcttaaaacaacagtcatttcattatctcgcacn

SEQ ID NO: 20634 - DNA, 1380 bp, Homo sapiens; identical to SEQ ID NO: 20118
  misc_feature 1380: n = A,T,C or G

SEQ ID NO: 20635 - DNA, 285 bp, Homo sapiens
  misc_feature 261, 282, 283, 284, 285: n = A,T,C or G
acacacatgagaactgaaatggcccaaacccagaaagaaagcccaactagatcctcagaagacgcttctagggacaataaccgatgaggaaaagatggcctccttgtgccaccgtctgttatgatttctctccattgggaccaaaaggccgttctttctaagcagacagcaaggtgaatgatgggccaaaatgagaccacaccttcatttggcattcttttgaacaattgtctttggggatccattgtgatgacatctggnctttattggaggaaagaaaannnn

SEQ ID NO: 20636 - DNA, 891 bp, Homo sapiens; identical to SEQ ID NO: 20416

SEQ ID NO: 20637 - DNA, 471 bp, Homo sapiens
  misc_feature 469, 470, 471: n = A,T,C or G
accaaacacaattcctgctctcagggaaacatggataagacttaaacaagtgaaatgttaaatagccctgtgagacaggagggaatgcatatcaagcaagacagtgtggtcattgggttttgagggggaaaatgagggaaaggcctttgtgtgtgaggtagggtaaagtggatgaatttgaatcacattttgaaaggcattgcaggtgggatggatgagcagatgttcccaataggaacgcctgtagactgttcagaagaaattgcccaaatgagccagatgagaaggctgagggcagggctgcttttggctctgaggactatagatttatcctctaggtgatgagggactattaacggctggtgagtctggagaactgaacagtggaagctctattttagattcacgtggcagtagaggatagaggtgtttggaagcggtgggcagttgcaagctatatgggagacannn

SEQ ID NO: 20638 - DNA, 759 bp, Homo sapiens
  misc_feature 749, 750, 751, 752, 753, 754, 755, 756, 757, 758, 759: n = A,T,C or G
acctatagaaatgccttcctcaggaaccccgccattgttaaacaagagtgagcgcctagtgggcagaaatgtagtgattgtggaacaaccttttccaagaaatcaagcctttgtagttaatcaggaatttgaacagagaataagcctcacaaatgaagtgaatgtggccccatcagtaataaattatatcttgtatcttacagatattgtatcagaataaatcttctgataccagaaaggtgggaaaatctttagtaggaatcctccagccattatatcccagagagctcatttagggctgaaacactgtggaggcagtggttgtggaggacatttctgtgagaagtcaaacctgttaaacaccattgaaatcatgttgggtagaaatgcagctgttatgaggaagtctttacctggagatgatatctcaattggtatcaaaagaattcttacaggaatatttatgaaagattgtgatggtgcttttagcgctaaattgtgcctcgtgtgccaaagaaacatagacaactgtagaggcaatggatatggaaaacatttttcgtaaaatatgggagaatttgtagaaaagaaaaactcttgaaagtaagaaatgatggcaactcaccaaattaactcatgtatcatacttttatgtcttgagagtcttggagggacgtgtttaatgaaatcttgaaccccaggaatagtattatgtaatgaaaacctatgaatataacaaatatggaagnnnnnnnnnnn

SEQ ID NO: 20639 - DNA, 362 bp, Homo sapiens
  misc_feature 362: n = A,T,C or G
actggacttgcctaatttctaggcatggagttggggcttgtaacaatggtgggagatgggcagtgctttgggaatgtagctgaccactgcatgggtgctaactagcccagggatcttaaagaatttgtgtaggccatgaggatccactccagccactgaatagtcatagaattgaatctaggacatcaccgtatgctactaccatgcagttttatcccttctaagaatccaaatgccctagtttaatttctaaatttttgttttgtttattttcactaaagcaacatgttagtggactgcggagggaagtgaatttcatggctggtcctcatcttgatatcttttaataggatcatgaggcn

SEQ ID NO: 20640 - DNA, 589 bp, Homo sapiens
  misc_feature 522, 589: n = A,T,C or G
ggtggcggccgcccgggcaggtatcttctatctaaatctcatttttattaatagtttcattttattaaatttcttgactcatgtttcatgcattaactggattcctcctcaaaggacgtgtgcacttgatccacatcatcgtaatgcctgtgccatcttaactacatttttctagcttgaaggtcaggattagggggaggaacaccttccgagttgtattaaccgggttggtgaggtggttcgtcatgatatccatcctgtgtttcaaaatcaagaaaaaatgaaaatctctttccacaagcagtagcagaagatattgtcagggcagggctgtcgcaggagtgtccacctgctgtgagctcatcacagataaccgtcacctctgctccatctccagcctactgttcagtctggagagctgagcagagttaggagtggatgctggtcactgatgcaagcagattcttccagaaagagatttggaaaggcggcaagcagattcttccagaaagagatttgganaggcagtaaagaaaagcaaagttgaaaggagctctagatattgaatgggctctggctaccaggggcn

SEQ ID NO: 20641 - DNA, 642 bp, Homo sapiens; identical to SEQ ID NO: 20389

SEQ ID NO: 20642 - DNA, 617 bp, Homo sapiens; identical to SEQ ID NO: 20325

SEQ ID NO: 20643 - DNA, 896 bp, Homo sapiens
  misc_feature 891, 892, 893, 894, 895, 896: n = A,T,C or G
acagactttcattcaacaaatatttatgcatcagctacatgccaggatctgtaatagattctgggtgtgcagtagtgattactgcagaatgcagacatggtccctgcattcttgagagggagacagcaaccaaataaacaattacaaaaaagtatgtaactaattaacaagtgggagaagggagtgggattacacagcagaagtggaaggaagggcccacttagagtggtcaaaggcttcttgaaggtaacatgtaagctgagacctgaagaaggatgcaaaagggccagcatgtaaggaacagagaataaacatcccagaaatagaaaataacacacaaaaacctaaagtcattaaagaacatgatcatctttcaagaactaacccttgagatcagagtagtttgattatagaggaaaagggtgagtgcaatgaaacgttaaaaatagccagatcacgtagagctctctagcctttggtaagaaaagtgttttctgttctacgtgacactgaaagtcatgaaaggttttaagcaggtgaataacacaatcttatttgagtttttaaaatctcgtgctgactaaaattcaaaaaactagaagagaacaggaaagaagggaaacctgtaaggcagctatagcaatattccagctgatagatggtggtggcactagggacaagtagtagttagactaaagaaatatttaggaggtagaaacaacaggcgctgttgatgtgatgaactggatatagtagatgagaaaaattaaataacaggaataaagatgactcctacctatctggcttgcacaattagattgtgatactaaatgtagtgccatgtaagaaaaacaggagtttctaaaactgtacctcggccagccacccgcnnnnnn

SEQ ID NO: 20644 - DNA, 387 bp, Homo sapiens; identical to SEQ ID NO: 20148
  misc_feature 380, 381, 382, 383, 384, 385, 386, 387: n = A,T,C or G

SEQ ID NO: 20645 - DNA, 515 bp, Homo sapiens; identical to SEQ ID NO: 20177

SEQ ID NO: 20646 - DNA, 420 bp, Homo sapiens; identical to SEQ ID NO: 20387
  misc_feature 420: n = A,T,C or G

SEQ ID NO: 20647 - DNA, 1020 bp, Homo sapiens
  misc_feature 1, 2, 3, 14, 20, 35, 42, 48, 81, 1019, 1020: n = A,T,C or G
nnncaaggtgcacntaatcngaatgccgcggactncagcagnaccggncactggccctcacttcattcccccgggaggaangacccaaagtgaaataaacagcttccaagtgcccaaggaaatgcttgctagacagctgtgattctcaactttaaagaattacttttcaaaaagattctagggttaaattgctatagaactttattatctaacaacattattattattgagaagagcaagataagatatttgccagttctgcttgaatctttgcctggaggaggaaaaatgtttcattgtgcaggaaatgtataaggaagccttacctcccttttctcatctcttgaggacttaaaagtggaaataacaatggttagggaaagatttcagctgtaaagaatggttttctagttttcttgaaatttgtcctgaacattaccttcacagagtaaaactgtgctactgtcaatcttagaccatttgattgttgtcactgaatttgccataatctgtagactaaaactcacataccacccttctcttaccacagaggtatcactattacaaagaatcctttccctactcattcatattcatcaaagaactactttaattttagtagcgttcaaaatctggtttgagtggctctcttactttggttctccttaatgattgcatggtaatcttgttggctactgcatttgttagtacttgttcttagggagccatgtaacttgttttcattattagatcttagtactgttcactacacacttaaaaaatgagtgtcaagtgcctttaggggaagaacactctgcctgcatgaaaatgtcttaaaactgaaggaaaatttcaagaacgctcttgatcagaagtccagactgtaaacataatcgctgggtcatgtcacttggaaccagtactcacatgaggcaccaaataaaggagatgatttaccttggcttccgcctcctcttcagcaaccagggcatccatccccaagcgctgtcttaactccnn

SEQ ID NO: 20648 - DNA, 901 bp, Homo sapiens; identical to SEQ ID NO: 20587
  misc_feature 1, 886, 887, 888, 889, 890, 891, 892, 893, 894, 895, 896,897, 898, 899, 900, 901: n = A,T,C or G

SEQ ID NO: 20649 - DNA, 2012 bp, Homo sapiens; identical to SEQ ID NO: 20122

SEQ ID NO: 20650 - DNA, 466 bp, Homo sapiens; identical to SEQ ID NO: 20303
  misc_feature 1, 2, 3, 466: n = A,T,C or G

SEQ ID NO: 20651 - DNA, 367 bp, Homo sapiens
  misc_feature 367: n = A,T,C or G
acactgacagagatcgaccactaaaatcttctgaggcgcatttatctttctctttgagagagaaaccccattttcctcaagaaaaggcaaagctgttccagcacatgttttaaatgattcatattatctgacaatggaaagggtaattctctcccaggatttagggtataattctcagccatctgagaattctgtttatcccaccttgtctccttgctcagagaattacaattagatggaaacatctaatgtcaaggcatctgatagctccagcataggatactgtgactgctccagatagattttctccatgaaaaccaaagttgatggttaattaccatgtccccttctcattatggcactatcn

SEQ ID NO: 20652 - DNA, 1380 bp, Homo sapiens; identical to SEQ ID NO: 20118
  misc_feature 1380: n = A,T,C or G

SEQ ID NO: 20653 - DNA, 594 bp, Homo sapiens; identical to SEQ ID NO: 20446
  misc_feature 586, 587, 588, 589, 590, 591, 592, 593, 594: n = A,T,C or G

SEQ ID NO: 20654 - DNA, 1098 bp, Homo sapiens; identical to SEQ ID NO: 20367
  misc_feature 1097, 1098: n = A,T,C or G

SEQ ID NO: 20655 - DNA, 586 bp, Homo sapiens
  misc_feature 1, 2, 3, 4, 5, 6, 7, 8, 9, 10, 11, 12: n = A,T,C or G
nnnnnnnnnnnncggaagtcttctagaattaattaacgcgggcttcctttcacctatttgtacaataattagatcatggtatcaattcaaacaaagaaattgatgtcctgggaactggttatacaaatacattatttcttctctttgaaatgagtagaaggaaagggaactaataataaaatatcacattattgctctacccactaaaggcagccctgaaattttacaaaacagtcttcctggggtcgtctcgatggtgagatataactgcctttcataatactagaagtacagacatcctcatatttttaaaaaatgcttaataagatcttcatctgttgtatttttcagttgagatcttttatgctttatattgtatctaataggcctattcacaaatgaagagtatatgagggaaaagatgaatatcacttcataacaagacattgaaataaactatcctaaattatgaaagcttcccaatgcatgtggcttttttcttcacggcttttctattcaaatatcaaagtgcttcaagtggctttgatggcatacttatgaattcatgaaagtgtttttcataatc

SEQ ID NO: 20656 - DNA, 686 bp, Homo sapiens
  misc_feature 1, 2, 3: n = A,T,C or G
nnngcttggtacctcttggttgaatgaatggaagcaaagagagtatggtgtgagcagcctgcctctgaggctggaatgtcctactgggttcaaggacaccaaggacttctgctgcagaaggtgtggcagaagagggctagacaccacatagggaaagagttcactcacatttgttctttcacaatgaacaacaaaaacgaaggaaaaaatcacatctcagaggattccatggagcacacccagagaccaaaggccgattgctagaaaacagcaaaacaggcatagttctgagatggaatgacttgaaaggctggtggattgttcaagaaatcagtgttttgttatcagattccctaatcataaatcctaggtcttaacctgtggtttagggaagacaggttttatttgggtagaagtgcagtcatgcagtttagtgatgtggaaaagaggcggaaagatttacaagtaaatgtttccttgatcattggatttagaaaaaaaaaaaaaaaagcaccactgccacacacctgtggtgatgaatctgaaagtgctttctggctgaatgacatcctgctatagtggttgcgtgggggcagcataagatctaagtgcttctcccctccctagctttcaaagattgtaagctcactgagtcaagatgctttatcttggtccctgctttttgt

SEQ ID NO: 20657 - DNA, 592 bp, Homo sapiens
  misc_feature 569, 592: n = A,T,C or G
gcgtccggtcactctctacctgcctcccatctgtggttccttttggagataggccgagtgggccactcaccctttaattttctcttagtttcctttctgtacaccagtttgaaccttagtattatcactaatgcaaatatgagcctaggctcaatttttccagttatgaaatggggctggcattattccgtgatgtgcatgttaagagaggggaaagctcacatttttgaggtcctcttgtgggttctatcttgggtaggaactcacgctttgtttattcagcaatcattcctccagaaataaccttaatagcaacaagaaaaaagaataggtgttttttgagctctatctgccagtttctctatatatggacattatatattgcaacataacactcacaatgcctttaaacatcatccccgttatacagattagaaaacagaatttcaaagaaggtaggggacttgcccagggatacatagctagcaagtggcagcgctggattgagtctgggccttgtctgaggctcgggtcctgtcatgctctgcggttgctatgttgacatgcanagggagagggcagctgctggagn

SEQ ID NO: 20658 - DNA, 396 bp, Homo sapiens
  misc_feature 396: n = A,T,C or G
acaaattcaatcacatttattgggtaaatattgcactggctccaagagacagcaatgtaataagtcccaagcctactcctcctaacactctaatggaggtgggagacacccccgcaatcatccctaactcatacttaataaagatcagcagtgcacatggtgccagagattggcgccactgctgtaattatctccagggaacttgagtttctttatgaggggagtaatcagaagggttgttgaatgagtctcctgattttgagaagtcacttatttgagctttagtttccacatttgtcaaattaaattgctagagtcagtagatgatccccaagctctcttccagttctgagagtcatagaacatgcacattaacagagatggctgcagacaatn

SEQ ID NO: 20659 - DNA, 450 bp, Homo sapiens
  misc_feature 448, 449, 450: n = A,T,C or G
acttgcccccaggcccagataatttatttaaaaactttttttgtagagacagggtctcactatgttgcccaggctggtctcaaactcctggcctcaaacaatcctctacctcaacccccctaagtgctggcattacaggcatcagctgccatgcctggctacaaatcttaatgttttccccatggcttctttttctggcgttcttttctcaggtaatggaagtgggcagagaatgatcctttccctaggctccagtgtgtaagaattaaagaaagaggaaagaaacacaatggcttgatggtcgaggacaggtttattttaaagaaaacaaacccaagagtggcttctggctgagttagatcagaggcatgctctcttacagactaagagtttttaaggattcagggtgggagaatttaccagaggcttggactgcttctgtgtctcnnn

SEQ ID NO: 20660 - DNA, 4515 bp, Homo sapiens
ggagccccagcatccctgcttgaggtccaggagcggagcccgcggccaccgccgcctgatcagcgcgaccccggcccgcgcccgccccgcccggcaagatgctgcccgtgtaccaggaggtgaagcccaacccgctgcaggacgcgaacctctgctcacgcgtgttcttctggtggctcaatcccttgtttaaaattggccataaacggagattagaggaagatgatatgtattcagtgctgccagaagaccgctcacagcaccttggagaggagttgcaagggttctgggataaagaagttttaagagctgagaatgacgcacagaagccttctttaacaagagcaatcataaagtgttactggaaatcttatttagttttgggaatttttacgttaattgaggaaagtgccaaagtaatccagcccatatttttgggaaaaattattaattattttgaaaattatgatcccatggattctgtggctttgaacacagcgtacgcctatgccacggtgctgactttttgcacgctcattttggctatactgcatcacttatatttttatcacgttcagtgtgctgggatgaggttacgagtagccatgtgccatatgatttatcggaaggcacttcgtcttagtaacatggccatggggaagacaaccacaggccagatagtcaatctgctgtccaatgatgtgaacaagtttgatcaggtgacagtgttcttacacttcctgtgggcaggaccactgcaggcgatcgcagtgactgccctactctggatggagataggaatatcgtgccttgctgggatggcagttctaatcattctcctgcccttgcaaagctgttttgggaagttgttctcatcactgaggagtaaaactgcaactttcacggatgccaggatcaggaccatgaatgaagttataactggtataaggataataaaaatgtacgcctgggaaaagtcattttcaaatcttattaccaatttgagaaagaaggagatttccaagattctgagaagttcctgcctcagggggatgaatttggcttcgtttttcagtgcaagcaaaatcatcgtgtttgtgaccttcaccacctacgtgctcctcggcagtgtgatcacagccagccgcgtgttcgtggcagtgacgctgtatggggctgtgcggctgacggttaccctcttcttcccctcagccattgagagggtgtcagaggcaatcgtcagcatccgaagaatccagacctttttgctacttgatgagatatcacagcgcaaccgtcagctgccgtcagatggtaaaaagatggtgcatgtgcaggattttactgctttttgggataaggcatcagagaccccaactctacaaggcctttcctttactgtcagacctggcgaattgttagctgtggtcggccccgtgggagcagggaagtcatcactgttaagtgccgtgctcggggaattggccccaagtcacgggctggtcagcgtgcatggaagaattgcctatgtgtctcagcagccctgggtgttctcgggaactctgaggagtaatattttatttgggaagaaatacgaaaaggaacgatatgaaaaagtcataaaggcttgtgctctgaaaaaggatttacagctgttggaggatggtgatctgactgtgataggagatcggggaaccacgctgagtggagggcagaaagcacgggtaaaccttgcaagagcagtgtatcaagatgctgacatctatctcctggacgatcctctcagtgcagtagatgcggaagttagcagacacttgttcgaactgtgtatttgtcaaattttgcatgagaagatcacaattttagtgactcatcagttgcagtacctcaaagctgcaagtcagattctgatattgaaagatggtaaaatggtgcagaaggggacttacactgagttcctaaaatctggtatagattttggctcccttttaaagaaggataatgaggaaagtgaacaacctccagttccaggaactcccacactaaggaatcgtaccttctcagagtcttcggtttggtctcaacaatcttctagaccctccttgaaagatggtgctctggagagccaagatacagagaatgtcccagttacactatcagaggagaaccgttctgaaggaaaagttggttttcaggcctataagaattacttcagagctggtgctcactggattgtcttcattttccttattctcctaaacactgcagctcaggttgcctatgtgcttcaagattggtggctttcatactgggcaaacaaacaaagtatgctaaatgtcactgtaaatggaggaggaaatgtaaccgagaagctagatcttaactggtacttaggaatttattcaggtttaactgtagctaccgttctttttggcatagcaagatctctattggtattctacgtccttgttaactcttcacaaactttgcacaacaaaatgtttgagtcaattctgaaagctccggtattattctttgatagaaatccaataggaagaattttaaatcgtttctccaaagacattggacacttggatgatttgctgccgctgacgtttttagatttcatccagacattgctacaagtggttggtgtggtctctgtggctgtggccgtgattccttggatcgcaatacccttggttccccttggaatcattttcatttttcttcggcgatattttttggaaacgtcaagagatgtgaagcgcctggaatctacaactcggagtccagtgttttcccacttgtcatcttctctccaggggctctggaccatccgggcatacaaagcagaagagaggtgtcaggaactgtttgatgcacacgcaggatttacattcagaggcttggttcttgtttttgacaacgtcccgctggttcgccgtccgtctggatgccatctgtgccatgtttgtcatcatcgttgcctttgggtccctgattctggcaaaaactctggatgccgggcaggttggtttggcactgtcctatgccctcacgctcatggggatgtttcagtggtgtgttcgacaaagtgctgaagttgagaatatgatgatctcagtagaaagggtcattgaatacacagaccttgaaaaagaagcaccttgggaatatcagaaacgcccaccaccagcctggccccatgaaggagtgataatctttgacaatgtgaacttcatgtacagtccaggtgggcctctggtactgaagcatctgacagcactcattaaatcacaagaaaaggttggcattgtgggaagaaccggagctggaaaaagttccctcatctcagccctttttagattgtcagaacccgaaggtaaaatttggattgataagatcttgacaactgaaattggacttcacgatttaaggaagaaaatgtcaatcatacctcaggaacctgttttgttcactggaacaatgaggaaaaacctggatccctttaatgagcacacggatgaggaactgtggaatgccttacaagaggcacaacttaaagaaaccattgaagatcttcctggtaaaatggatactgaattagcagaatcaggatccaattttagtgttggacaaagacaactggtgtgccttgccagggcaattctcaggaaaaatcagatattgattattgatgaagcgacggcaaatgtggatccaagaactgatgagttaatacaaaaaaaaatccgggagaaatttgcccactgcaccgtgctaaccattgcacacagattgaacaccattattgacagcgacaagataatggttttagattcaggaagactgaaagaatatgatgagccgtatgttttgctgcaaaataaagagagcctattttacaagatggtgcaacaactgggcaaggcagaagccgctgccctcactgaaacagcaaaacaggtatacttcaaaagaaattatccacatattggtcacactgaccacatggttacaaacacttccaatggacagccctcgaccttaactattttcgagacagcactgtgaatccaaccaaaatgtcaagtccgttccgaaggcattttccactagtttttggactatgtaaaccacattgtacttttttttactttggcaacaaatatttatacatacaagatgctagttcatttgaatatttctcccaacttatccaaggatctccagctctaacaaaatggtttatttttatttaaatgtcaatagttgttttttaaaatccaaatcagaggtgcaggccaccagttaaatgccgtctatcaggttttgtgccttaagagactacagagtcaaagctcatttttaaaggagtaggacaaagttgtcaacaggtttttgttgttgtttttattgcccccaaaattacatgttaatttccatttatatcagggattctatttacttgaagactgtgaaagtgccattttgtctcattggtttctttga

SEQ ID NO: 20661 - DNA, 662 bp, Homo sapiens
  misc_feature 656, 657, 658, 659, 660, 661, 662: n = A,T,C or G
actttgcatacagaaacatttttcatcacttactaagtgagaataggaccctggcctagggggaaaaacaaccacagacaaaccatacttccctgagaagcaggagcatagtgctggctagtgaattgctttcacaaaccgacctcataactctgtgccttagaaaaattagaaatgggaacatttggagatcacttgggaaaacttgaaattatgaatgttaatctgtgattgctaagggaacgtggtatttcctgcctattttggctgtagtttgtctctttctcttctaattcatttttaaaaactctgctagattaaattttgctaaaataacgttttgcactcctcatttcctgtttaaaaacatgtagtgactcaccatcagttttagaaatcgatttaaaggacttcatgaaactggtttcaggccacccacagtttggcccatacctatctcctgttctccttcataaacctttcaaatctagccaaattgctttgttctttgtccctggagtatggctttctctttcttctttctttcttttttttttgagacacagtttcgcttgaacccaggaggtggaggttgcagtgagccgagattgcaccactgcactccagcttgggtgacagagtgagactccaatcannnnnnn

SEQ ID NO: 20662 - DNA, 421 bp, Homo sapiens
  misc_feature 1, 2, 3, 4, 5: n = A,T,C or G
nnnnntccatgatgttgaggagagactctcctatcctcaccacaccagagagtaggtatgcaggttgccaccagtgttctcctccctacccactccctcacttttcttttcattggttcagtagaaggaggggctgtgcagtaaggctgccgcttgagcacagggacagccgtcactgcagtgctggtctcctgttcttggaggcacctcagtctccttgacctcttagacaccctcctacccccaaggtggggaaggagcaagcagaggcaaaatcccagccctccttgttaagactacagtgactttcctcctctcccttctccgtgtccgtaatgcatagctggaaggaagtgtctgggtggtgatgccagtagctgtgctggtgccatgccaggtgctcttcatgagcaccaaagga

SEQ ID NO: 20663 - DNA, 404 bp, Homo sapiens
  misc_feature 404: n = A,T,C or G
actaaaaatacaaaaaattggccaggcatggtggcacatgcctgtaatctcagctactcaggaggctgaggcaggagaatcgcttgaacccaggaagcggaggtggcagtgagccgagatcgcgccattgcactccagactgggccaccaggagtgaaactccatgaaaaaaaaaccaaaaaacaaaaaaaaatgtgtatcttattacagttgagtccttttgtgagacgaacattcagtgtttgctagattattctaattagctacctttgtatggttaggttagcatggagctgaagataaatgtcccgtttgaaaaaatgacagcccttcagaaaactctggcagtttacagaagaaatacaaatggccaataggtatataaaagttcctaacaagtgaan

SEQ ID NO: 20664 - DNA, 411 bp, Homo sapiens; identical to SEQ ID NO: 20409

SEQ ID NO: 20665 - DNA, 416 bp, Homo sapiens
  misc_feature 1, 2, 3, 4, 5, 6, 7, 8, 9, 10, 11, 12, 13, 14, 15, 16, 17,18, 19, 20, 407, 408, 409, 410, 411, 412, 413, 414, 415,416: n = A,T,C or G
nnnnnnnnnnnnnnnnnnnnaaatagagatggggtctcactttgttgcccaggctggtcctgaactactgggatcaagcaatcttgctacctcggcctcccaaaatgctaggaccacaggggatgaactactgtgcctggctaatcaactattttttgtcaatcaactctttgagttattgaagataacctcatatgaagattatccaaaaccatctacatgttctgatgcctgctccaagcatccagtgcaatcccctcccttctggagactgaattccctttttaaacagaagcaaagcatgcacagccatccccctgtttctaaccccccacagagcttcttcctccaggtgaaagatggggagctggatctcaatgtgaaaaactttgaaccattctaagaannnnnnnnnn

SEQ ID NO: 20666 - DNA, 1409 bp, Homo sapiens; identical to SEQ ID NO: 20290
  misc_feature 1, 2, 3, 4, 5, 6, 7, 1409: n = A,T,C or G

SEQ ID NO: 20667 - DNA, 556 bp, Homo sapiens; identical to SEQ ID NO: 20162
  misc_feature 555, 556: n = A,T,C or G

SEQ ID NO: 20668 - DNA, 379 bp, Homo sapiens; identical to SEQ ID NO: 20432
  misc_feature 379: n = A,T,C or G

SEQ ID NO: 20669 - DNA, 727 bp, Homo sapiens; identical to SEQ ID NO: 20324

SEQ ID NO: 20670 - DNA, 409 bp, Homo sapiens
  misc_feature 409: n = A,T,C or G
acattttacactgtcagctatgggttcagtcagatatgcccataaattcatttatgaagaagagctccctaaacttctaatgattttttcctggtggttttatttagctccaaaaacttatgtttttttttcttaaaaaaatcccataaaaatattcattatcaatacatcatattgatgatatcactcaagaaggagatgtctcactctaagcattattataaaaattcacaggccagtccacttttctacgaaaaatatcgccccagtgatccttctagcctttttgcatttcctgggattactttaaaccaggctgctgagcagccttgacacctgctctgtgaccaatgctccaggctgtttattttggcctataaactctcaaagttgatgggccctgccctcn

SEQ ID NO: 20671 - DNA, 475 bp, Homo sapiens
  misc_feature 475: n = A,T,C or G
ggtcacccacgcgtccggaagtgttctgcaaagacatattcttaattgcttaagacatctcaataggatcttcaccccttactgaactttttgtttttgtttataaacattcagtaacttcagtttaagcacaaaacatttcatagatatgaaagtgctagcataattatttcctagtttgaagtatcaatgaggtgctacattggctaacaaatatgctgaaagtctccctgtaaagtaaggacatgtatgtgtacagttaaacctgcaacctgtgtggtgtttttgtttgtaaaacacataaagaaaattttcatgtacttaagacccagaaaatctggattaaaatgccttaaaatatccagaatctcttgctggtattgttttcagatttttttttctgaaggacttttatttttaatgtgattttaattaattactcattttgtttaggaaatatttgaaagcctacagn

SEQ ID NO: 20672 - DNA, 1189 bp, Homo sapiens; identical to SEQ ID NO: 20185
  misc_feature 1179, 1180, 1181, 1182, 1183, 1184, 1185, 1186, 1187, 1188,1189: n = A,T,C or G

SEQ ID NO: 20673 - DNA, 520 bp, Homo sapiens
  misc_feature 520: n = A,T,C or G
gagacaatatgaaaataaaatggtgtatctagaatgagtttctcccttattttaagtattctcggaaattggaaccacctggtaagcagttggcaattctgtttaaaagacctggagtaggtgacctcaggttgcttcatttttatgagtcattccagtcttctagccagaagccagatggactcagaagaacccacgaccaggctgttttggaggcattacttactcatcctgagtgactgtgaatgaatttatataatgttgagatgaacgtggaaaaattatccagggaaacctaaattattccaaaataaatttagcttaactactatttaaattttaaattgtaaatcttttcccaccattgcatgtttgaggtaggattctaatgatgtactaatatgtaggaacaaacattgtctctaaatattttatcttgtcttataattttgagtaggaattaatattgaatttatatgacaggacataatgtaaacaaacatgctgtttgttaggagcn

SEQ ID NO: 20674 - DNA, 1096 bp, Homo sapiens
  misc_feature 1, 2, 3, 4, 5, 6, 7: n = A,T,C or G
nnnnnnnactctatggtctgttagtgtttctctgtgttttcctattgtgctgatgtgagcttgcactgcttttgtaattaaggataaattttatttatgcatttatgtatttatgtatgtatgtatttaaaaaaattaacggttgtatataaaaatagttattaagtggagacacttaagaataatacacacttctctaaataaaacggaaaagcctacttgctgcttgcttgttgcaggtagaattgacccgatcccctgcagaaatccctgccctctcctctctgtcccaggaatgccacgctgcccttcacgctggcatgctgcctgtcggttctgtgctattccttagtgacctgtagattcattatctgtgtcgccacaaccttgtccttttagatttgcatatgcgttaagtccaatcattaaatccagtgatttttcaaaatagcaaaagtaggtgtataagtttccaacatgtgtataatttgaagctgaggaatgactaagaatgaaagaaactcagtttgttccactcagtgggctgcatgtgcctatggagtttcacttgaagcaaactctctcgaggcaaacctgctggcctcaccacctcagaccccgcctgaatgttcatgggagagacttggtgttgggtccagttttgagcttttttgaagggacagggagagcctggaatatgacttcctttaaaaacaaaaggtagttgtaggcaaggtcgggttttttttttttgtattttctagaataaaaatttatattttttttagagtatggacttgcttctccctggagggccacacagtgactcatctgactgcttctgcaagctggtgcatagatcatgccagaccagcttgggtctgctagttaagctgcaggagattgcatcataggatttactgcacgcgtctttaatggaagtgttgtcgccaacgtgaacttctttgcttatcaacctatccaagaagcatccacagcagggaacaaaaagtacctgatgggaacttgctggggaaactggcctcccagagtcactgaagttgccaacattgcattaggaaaaaaaaaaaaaaaa

SEQ ID NO: 20675 - DNA, 218 bp, Homo sapiens
actacgtcaggtgctaaggttaagatagtattttccttcactgactcctcactccgagaatccattttacagcttcattggtttgggttattccaattttttgatgtgagtaaataaatgacttctatttgcccaaaataaagcttatataggccttataaccatgcaaatgtgtccattaagttggactcggaatgagtgaatgagtattactgcca

SEQ ID NO: 20676 - DNA, 466 bp, Homo sapiens; identical to SEQ ID NO: 20303
  misc_feature 1, 2, 3, 466: n = A,T,C or G

SEQ ID NO: 20677 - DNA, 584 bp, Homo sapiens
  misc_feature 581, 582, 583, 584: n = A,T,C or G
gagatggggtcttgctgttttgcccaggctgatcttgaactcctggcctgaagcaatcctcctgtataggcctcccaaaatgctgggattataggcatgagctactgcaccctgcctcttgtttttaagatagattcctcatgctaacagaataagctattagccacatttctacaaaggtgattttaagtcaggtttattctctaaaaatgagaggcattaaaacaaagatagttctctaacaacaacaaactaataatttaaatttttttgctgtttactttatgaatagggtagaatgtcaacatttaatttttatggctaatagtctatggaattaataatattaagagattataaacgttgctaacatacacacaaggaataaatcagttttctacatagatagctgaattgacttgttaattttggaaaagaaggaataaaagcagaaaaataaatttggaaagaattttaccataaaattagtttttttctgaagaaaaacgtcagcaaaagtaccttttgtgtatgtgtgtttgatttagtatgggaaaagatatgcatcttatagactggcnnnn

SEQ ID NO: 20678 - DNA, 643 bp, Homo sapiens
  misc_feature 1, 2, 640, 641, 642, 643: n = A,T,C or G
nncgaatatgagctccaacgcgcggggcgggccgcccgggcaggtacgcggggaggctcctggggtggagtccaaatcactcattgtttgtgaaagctgagctcacagcaaaacaagccaccatgaagctgtcggtgtgtctcctgctggtcacgctggccctctgctgctaccaggccaatgccgagttctgcccagctcttgtttctgagctgttagacttcttcttcattagtgaacctctgttcaagttaagtcttgccaaatttgatgcccctccggaagctgttgcagccaagttaggagtgaagagatgcacggatcagatgtcccttcagaaacgaagcctcattgcggaagtcctggtgaaaatattgaagaaatgtagtgtgtgacatgtaaaaactttcatcctggtttccactgtctttcaatgacaccctgatcttcactgcagaatgtaaaggtttcaacgtcttgctttaataaatcacttgctctccacgtaaaaaaaaaaaaaaaaccaaaagtacctgcccgggcggccgcccgggcaggtactcttacttggcatgcagacatgtctgactccagagtgctggttgtagaataggagaaaacaatcccttgaagataaacnnnn

SEQ ID NO: 20679 - DNA, 1023 bp, Homo sapiens
  misc_feature 1022, 1023: n = A,T,C or G
gcgtccggaaaaacaaacagctttgatattcagagctgtatttttgagactcaaatgaacataaagatccacggtcttatgagaacttagatcggctgctagaagagcattggagaaccatggagttttgtctttggagggctttccggatgacattgttccacagctctctggaaatagggcaactgtgcttggcctgcaggcagttgaatttgatataacagacgaataagaagcagaaaatcctgctggatccttttttctccctctctcctaacttcctaagaatgacttattcatttaatgaattttttttcagttcctacacagtggtagatgtatgccaagtgccctgctaggcactggggttacagtggtggaatgtaggcactgggtaggcaccaggattacagtggtgggatgtaggcaccagggttacggtggtgggatgtaggcaccgtgtaggcactgcagtgacagtgtggaatgaaatggtttctttcttcgtgaagcttatatctaatgatggaggccaaaatgacaattacaaactcgtataaatgctttgaaagaaaggttcatgtgctgtgagagggtttaacaggcacaactgctgtcagtttattgggtaggagcatcctggaagtgaagaatgagtagtccacatatccaggcaaggtgggacaagaagctagggcaagggtattctagtcaagggaaaacccacagaaaggaggtacagtaggaaggagcagaggatgctggaggaactgaacgaagctagggtgacaggaactgggagagctggagatgaagtcagatgaaaggaaagagactggccggcagagtccaggtcacgtaggacctttagactatgtcacaggttttggtcattagctgaagggtaagagaatgcatggatgaattttaagcagggagtgatattcaaatttacattttctaaaaattatgctgtattctcatatcctcaacttaccttaaaatgcttaaaaagataagann

SEQ ID NO: 20680 - DNA, 668 bp, Homo sapiens; identical to SEQ ID NO: 20192

SEQ ID NO: 20681 - DNA, 377 bp, Homo sapiens
  misc_feature 1, 2, 3, 377: n = A,T,C or G
nnnacagctaaactccaccgcagagcaagcaaacccaatctggcacacagcttttgggggtttcctctcctactatggcccctagccctgtgcccaggacatagtgaagggtcagtaaatgtttggctacattgatctgcagaatcctcactaacacccctccagcacaagcacaggtctgttgaacaaacatccccatagaacccaacggatctgccctaaagcccaaagagccttggccccccacctattgggaacatctttccaaaaataccaccactttcaaaggaactcccctgagaatgggggtgggaagtctaatgcatatattttgctctgctatgtgtgaagcatggtatatccactactttattcan

SEQ ID NO: 20682 - DNA, 466 bp, Homo sapiens; identical to SEQ ID NO: 20303
  misc_feature 1, 2, 3, 466: n = A,T,C or G

SEQ ID NO: 20683 - DNA, 485 bp, Homo sapiens; identical to SEQ ID NO: 20462
  misc_feature 485: n = A,T,C or G

SEQ ID NO: 20684 - DNA, 1044 bp, Homo sapiens; identical to SEQ ID NO: 20502
  misc_feature 1, 2, 3, 4, 1043, 1044: n = A,T,C or G

SEQ ID NO: 20685 - DNA, 450 bp, Homo sapiens; identical to SEQ ID NO: 20659
  misc_feature 448, 449, 450: n = A,T,C or G

SEQ ID NO: 20686 - DNA, 668 bp, Homo sapiens; identical to SEQ ID NO: 20192

SEQ ID NO: 20687 - DNA, 661 bp, Homo sapiens
  misc_feature 1, 2, 3, 4, 5, 6, 7, 8, 9, 10, 11, 12, 659, 660, 661: n = A,T,C or G
nnnnnnnnnnnncccttttctacccggacaggcaacttgactacatttcccagtcttccttgaagttaggggcagtcatatgacaaagttctggccaatggaatgtggccaaaaggtatgaggcctcttcaaaactggccccataagcccctcccactcagcagccttcattctcatccatgtctctccgtgaaatggggaagatcctggagataaagaagggaaaatcatacgaagggagtagagccaagcaccccccacctcctgaccctccccagaaatgaactggagatgagactttttctgtttattcccatccaaaaccaaaagttgttatagcagtctaccctccagtgaattaattaacgcgggagtgaagagagcacggatcggatgtcccttcagaaacgaagcctcattgcggaagtcctggtgaaaatattgaagaaatgtagtgtgtgacatgtaaaaactttcatcctggtttccactgtctttcaatgacaccctgatcttcactgcagaatgtaaaggtttcaacgtcttgctttaataaatcacttgctctccaaaaaaaaaaaaaaaaaaaaaaaaaaaaaaaaaaaaaaaaaaaaaaaaaaaaaaagaggcggcccccaaaagaggaactaaaaataaannn

SEQ ID NO: 20688 - DNA, 651 bp, Homo sapiens
  misc_feature 651: n = A,T,C or G
actgtggacattgaaagaagaaaacaataggagatatttagaaaattttccaggcagctgtcaggacctggttattgttgaaactggtcagactatcagtctatgggttaattttctccagcattatttagtagctccagaaggagaatggataaagtaggcattgaaataggcttaaactttggttctgctggtggattcaagaaaagggaaaaattggaagagttgagagaatgggcaagaaggaggtccaaacgctggagcataaacagagaaaaaagacagaagaaagagggggtgtggataaaaacaaagggagcaaaaaaattgtagatcctgatgaggttgaggaatagtggttgtaaaaactagaaggataagagtttgtgatccaaaagcaggttgtaaatatttcagaaaaggagcactttctgaagaaaacatggtctgggttggcatggtactggaagtggctatctaaaatggaatgaatttgaatgatcatcggcttagaaaaagccaagccaacaagaaactaagctgttcactagaaagtgcaatgaccactgaagttatcctagttaatgacaggaatagggataaaaaagaaagacacattcggtgccgaaatatataataaatgagatgtan

SEQ ID NO: 20689 - DNA, 556 bp, Homo sapiens; identical to SEQ ID NO: 20162
  misc_feature 555, 556: n = A,T,C or G

SEQ ID NO: 20690 - DNA, 557 bp, Homo sapiens; identical to SEQ ID NO: 20384
  misc_feature 556, 557: n = A,T,C or G

SEQ ID NO: 20691 - DNA, 695 bp, Homo sapiens
  misc_feature 1, 52, 694, 695: n = A,T,C or G
nccatctccagctcttcctgtcagcatcacgttctttcctgtacctgtaagncactctgttcctacctctagtgccaccagatcagggttggttattcctatatgtactctgctactgaacgatgaactttagggcctaggttacacctatccactttatctcctcagacctaattctatgccttatgatatacaagggctcaaataactagagtgtcatatatgaagagcaaatataaagcactcaaaaaagccaagcgctacctctttagaacttggaacactgctgtgatctttctccattatcagccatctgagaacatttggaatagaggggtttttccatgttggccacggattcacaaatctcccatcttttcctttcttggatttagttacatcttcttctagtctataatccagtttgaagcttttcctagaaaacctagaagaatcacttgctccggaattccgtgctgaattttgacgttttcttactgcttctttaggatattggctgcttgtcatcagagactggttgctttcattttcatccatgtcctttggtgaagaactaaaaaaaacaagggggaaaaatactgagttgaacataaaggcattcaaacataacacaaggtactatttgttagccaataaaaatttctctaaacttataaaaatattatgtctgtann

SEQ ID NO: 20692 - DNA, 1060 bp, Homo sapiens; identical to SEQ ID NO: 20584
  misc_feature 1, 2: n = A,T,C or G

SEQ ID NO: 20693 - DNA, 405 bp, Homo sapiens
  misc_feature 403, 404, 405: n = A,T,C or G
actttaattttttttttttttttttaagcagagatggggtttcgccatgttgaccaggctggtcttgaactcctgacctaaggtgatccacctgcctcggcctcccaaagtgctgggattataggtttgagccaccacgcccagctgtgttatgttttaacacatgtgctatgtcgctaagtggttggaaatatgaaaatgagttgatgtgttcttataataagacatctgctttagtatacattattagcatgctcttccactttggaatttttattttatattttcacttaggcaaaaatactttccaccattaaagtgggtataaaagcaacagttgcttttagaaatttactcttttcacttgctgggctggtttggtcacttgttagactataaaagnnn

SEQ ID NO: 20694 - DNA, 419 bp, Homo sapiens; identical to SEQ ID NO: 20332
  misc_feature 418, 419: n = A,T,C or G

SEQ ID NO: 20695 - DNA, 3855 bp, Homo sapiens
  misc_feature 1, 2, 3854, 3855: n = A,T,C or G
nnaagtcagatgaaaaaattgtgattcaccataagccattggagatccacatgggagccaactctctgcggtgaaaagaaagggattatctcagacagtaagccaggaggaaagaaagagacaagaggctatctttgaagtcatatcctctgaacattcatatttactcagcttggagatcttgatacgaatgtttaaaaattctaaagaactgagtgatacaatgactaaaaccgagaggcaccatcttttctccaatattacagatgtctgtgaggcaagcaaaaagttctttatagagttggaagcaagacatcagaataatatcttcatagatgacataagtgacattgtggaaaaacacacagcatccacatttgacccatatgtgaaatactgcacaaatgaagtctaccaacaacgaacactacaaaaattgttagctaccaatccttcctttaaggaagtattgtcaaggattgagtcccatgaagactgtaggaacttacccatgatctcttttctcattctccccatgcagagggtgacccgccttcccctgctgatggatactatctgtcaaaaaacacctaagggactctccgaagtatgaagtctgccaaaagagccttggaaggaagttagcaagttggttcgactatgcaatgagggcgcccggaagatggaaaggactgagatgatgtacacaattaactcccagctggaatttaaaattaagccttttcctttagtctcctcttcccggtggttggtaaaaagaggtgaattgacagcctatgttgaagacactgtgcttttctcaagaaggacatccaaacagcaagtctacttctttctctttaacgatgtgctcattatcaccaagaagaagagtgaagaaagttacaacgtcaatgattattccttaagagatcagctattggtggaatcttgtgacaatgaagagcttaattcttctccagggaagaacagctccacaatgctctattcaagacagagctctgccagtcacctctttactctgacagtccttagtaaccacgcgaatgagaaagtggagatgctactaggagctgagacgcagagcgagcgagcccgctggataactgccctgggacacagcagcgggaagccgctgcagaccgaacctgtggctgacgtcgtcctcatctatcaacgtgtcagcgatggctggtatgagggggaacgactacgagatggagaaagaggctggtttcctatggaatgtgccaaggagataacatgtcaagctacaattgataagaatgtggagagaatgggacgcttgctaggactggagaccaacgtgtagtctctcagatggtcttttgttactgcaagatttgcacgacacttaccgggctggttggttctgggctagttttattgttaattttgtcacagcctatttaattaaaagaacgaaaacacttgcctttaagcttgccaggttgttctgctctctcatgagaagagcttggatacagtgagtttgcacagctcagtttttacctaaccacacacttgcagacctcctgaggtacacagaatagctgagcagttcacttcagggatcaggtcatctctgctcctcctagtttcaccatgttctggcaataaaaaacacatattatatcctggttttctctatccttgcattactaaggtgactgtctctctttatacatccttgtatggttctcccagtattagcaagattgtatatctgtaaagaatgtccagttttgtaaatatttccctgcctttttttttctttttttacatctgattttaatgcttcgttaacttcaaaaggaactggtagagttcagaaggtgagctgttgtttttctaaacctcttcccaggaaggggacattgacacttgaatttttgtcacctttttcctcattagaaggaaagtagaaagccttactgtaggatttttaaaaaaaaatccatctcaccccatattggtcttaaataagtatagactaattaacctaagctacctttaacaacgtagaatttagatgggttcatatatgtgagaaaaacctgaatataggacaggggtcctacttttttccccacctctgtcgcccaggctagagtatagtggtgtgatcttggcccactgcaacctctgcttcctaggttcaagtgattctcctgcctcagcctcccaagtagctgggattgtaagagtatgccaccacgcccagctactttttgtatttttagtagagacagggtttcatcatgttggccaggatggtctcttaactcctgccctcaagtgatccaccagagaggagatcctcggcctccccaagtgctgggattataggcatgagccaccgtgcccagcctactttctaattaattaaaaaaaaaaaaaaaaaaaaaaacttcccaaatgagctgataaaaaactgacgtgaggctgctttgccttcaataatacctagttttcagctgttccaactcgtttccaaatagaaattagctggaacacactacagtaatctcaaggaagggaaaattaggccttaaaagataccaagaagtcagcatggtacccaattgaaaccttttgaccttagtgggaattcattctatttgcactaaaagccttaacttgctgtattcagagtccctcttaactgtgagtttctatagaactttactttttccactagtgcacagagagagaaaggttatcttaatagtcggtttcatggagatgaaggatgggagattaagaggggggaaatgatttttactggcagctatattccctctctgttctatttgctttaacaaagggataaaacctggcaaagtgtacattattggaggactcaaatctgtatgtgacatgtcccaactactgtccgctaactagttatccaaattgtaaagctacagaagcccagttgaggggtaagtgtgcctggctcacacagcctgcaccctgtcacctcggcaatgagccagtgtggggcactggggacttctaacccttggattgctctttttgacctgtgcataccttctaattgtaaaatatatttcagaccgtgagtaccttgagatctgagcaactgtgttaatgaagtaatagcaatggtccacagtgaaagatgtgttggggtttgcaaaacaagcattccgtcacctctttaataatgtcacagactttttaaaagagaggctatcaagttgtaatataatctgtcatgttttatttaggaaggaaggtaaatttgtgcttgcacggggatcattttgtattatttttgctaatacccagttgaagctaaaaagcaactatttgaatcctgtgaattaatttataagaatgttaaacagctttggaaatacatgcatcttatgaatcatagccttatttagcaagatcaatgttaaagtgttgttatatggcaagtatttaacacattcacagtgtttgtttgatttcaactgtgaattgtcttacagttttttcaaacctagttgtttctatggacacctgctctgaattgtacattgacttcattactaaagaacaaaaatgttcatttttgtcccagtaaattgagactgcttgtacactttcagaaaaatatgtgaatttataaagattttgtagatacttaaaaataaaaatacatattttactagattatttattgattaataaaaaacctctagggggggccccggtccccaattgcccttataggagtcgtttccaattcattggccgtgtttaacaagttgtactgggaaaaccctggtgtacccaann

SEQ ID NO: 20696 - DNA, 389 bp, Homo sapiens
acacttgaggaagcttgggctcagaggctttatgttaattccaacagtttttgcaacaggaggaggagaatatctgtccaggagccctaatcaagactcagcaggaagctggtggcttcctttcctttccttctttttgcttccctttcctggtactttacctggtgctctcctttcagtccttccttctacatatggggcccatcgcattcccactgactcagatgctgaggggccagactgaagggacagtggccattgcatcaagtcagagaacggatctgacccatctagtagaagcttattgttttggcagaagcacaagctcttagaggtgcagctgcagggtgtgacctattggggacattgagctcagtgaccatgggccc

SEQ ID NO: 20697 - DNA, 758 bp, Homo sapiens; identical to SEQ ID NO: 20597

SEQ ID NO: 20698 - DNA, 549 bp, Homo sapiens; identical to SEQ ID NO: 20485
  misc_feature 1, 2, 3: n = A,T,C or G

SEQ ID NO: 20699 - DNA, 396 bp, Homo sapiens; identical to SEQ ID NO: 20515
  misc_feature 394, 395, 396: n = A,T,C or G

SEQ ID NO: 20700 - DNA, 446 bp, Homo sapiens
  misc_feature 1, 2, 446: n = A,T,C or G
nnagggaaatgggccctccccgcgggggggcccgcggtccaggtccggttgttagtggctgctagtaggttattcagccgacctcttctgattctgctttgctgcctgatttcaaaagagttgccctatactggctttcagtcacagcttgatgtaaccactgcttgtttgcatgcatccccatcattttcatatgggctctttttttttttcttcttcaagttaggaagcaaaagaatcaggagcatttttatatgataaaagatttatataaggccagctagaatcaagccaaatgaaattcagctggaagggatggtaaaaaggctcacagaacttgtggctgccagagaagtcagtgttctttaaattaaagagggttcagctagcagcggcaactctgactttgcattcatattgaagcaagctctccagccattctgggn

SEQ ID NO: 20701 - DNA, 427 bp, Homo sapiens; identical to SEQ ID NO: 20085

SEQ ID NO: 20702 - DNA, 1361 bp, Homo sapiens; identical to SEQ ID NO: 20142
  misc_feature 1, 2, 3, 4, 5, 6, 7, 8, 9, 10, 11, 12, 13: n = A,T,C or G

SEQ ID NO: 20703 - DNA, 1060 bp, Homo sapiens; identical to SEQ ID NO: 20584
  misc_feature 1, 2: n = A,T,C or G

SEQ ID NO: 20704 - DNA, 741 bp, Homo sapiens; identical to SEQ ID NO: 20131

SEQ ID NO: 20705 - DNA, 385 bp, Homo sapiens
  misc_feature 385: n = A,T,C or G
acacattaatccaatacagacaccaaaaaactcatctggtctgagtctacttccatctccggaagcacaggtggctgaccttaaatgggaccagctgtcactaggatgtttttgtgtcgaacccagccacagaattagagagatgccagagttaacttgcactgaggatactttccagccaggtgtctggctggaaagtcacagagctacgcatccagcaagaatcaaagcctggcctgtgagaaccacgcacagtgtggactcaggtcagggacactgccatgatggacaaggggcttttctgaagttccctgaaattcaccagggaattaatgtccttagtgccacctttcccacacacagcaagggagggagttggtgagcn

SEQ ID NO: 20706 - DNA, 2012 bp, Homo sapiens; identical to SEQ ID NO: 20122

SEQ ID NO: 20707 - DNA, 414 bp, Homo sapiens
  misc_feature 1: n = A,T,C or G
nctgagaaacatcctaatcatacgggtacaccaattttgtttattcattcattcgtcggtgggatgcctgggttactcctaggccattttataagtaggtcttcagttattctctatagaaatatccttatttttcgtttaaggcctttatcacagattataattctaatatcaagttgtttcatatctcttttgttcaatattttgtttagtctctatctctcatcacactctcaacaaccccataagctccctgaggggaagggcatgtctgctttgctcctcactgtgtttactgccagcacctggcaacgtagtgggtatttaataagtaattgttgaatcactgaatgaaagaaaatcactaggccacctgaaggccccttgtctttagagtccactgtggaccatgta

SEQ ID NO: 20708 - DNA, 1365 bp, Homo sapiens
  misc_feature 1348: n = A,T,C or G
ctcagaaaagttgtcactgggcctgccaaaggtgtcactgaatgatgctttctggagtctgtgtgtccgaagcttgagacaagaaaattgaggtgcagctccaacttgtacacactgtgcttcttggccagctggatgcctcaggagaactgcagaggctgcattagccccagcagcgggaggcagctccgtctacagcctctgaccattcatggtccacttgcagcctggtataaaggccccaggacgaagtcaatcctgacaaaccctaggaggccacacatctcatctgtaagcagggcttccggaagcgttgattagaaaagaagttcagaggcctagacacacacacttctcaggggtcacctgcatccacgtaggctatgtgtgtatagcttccatttttttgaaggaaatcatttgaaagaatagatatttattagaaaccaggtttgatctgtttgtgatgcctttatgacatactgttttcttggattctacttgacgggaaataaagtcgatgctaagcagtgatcttcagtcattaaataatatttctgttttcctgcataatttcctcttgtgttcttagataagactaagcctgtttttgtcatactgtttgcacatctgaaaatgacaacttgtttgccagtagtaaactcacagcctggaaaatgataggatcccaagtttccccaaaaatgtgaggtacagtcaagcaggctgggaaaaaaaaaatacagaggttatcattatgtttatataaaaaatataccacttagcaaaagaaattctgataaagcaaaattagtgaaataattaggatcaatttctgtacgttcatctacctactttgcacttggatggaagtcctagattgggtcttaaaaggagggaacattctagaacccaccaacccttcctgatactgtcacaagatttttttcccttaattcttttaaaatcagggccacatttcaactccctgcccgctgccatttgatgatatttttgtttctctttaggtatcgtcctattttctttttctttaccactgacagcggcttatttcatatgaataatatattaaatacatatgcatttaaaatattgttttgatttgtttgcgaattgtttctcttaaagggtctatctggggaaatgagtaatttttcatatcctgttcttgcaggaagaattttaaatcgtttctccaaagacattggacacttggatgatttgctgccgctgacgtttttagatttcatccaggtaacgttgagagtaatgtcaggatctcaaatggaaaacggaagttcctattttttcaagcccttttcatggngtctgggggtgggactc

SEQ ID NO: 20709 - DNA, 628 bp, Homo sapiens
  misc_feature 624, 625, 626, 627, 628: n = A,T,C or G
acaggggacaaacagaagaggagacatatgtatactctcaatgtgtttatatgcctttgtgagacatcgagtcatcactgtgaagtagctagaataacagatatgaatgcataaatatgggaagggaggtagcaaaggggaaagtttttgagaagggtgggtggtgatgaagaaaggctgaagtgttgccttgtaaaatggagacatattctcgggaagctaatattctaataaagcagaaaaaaagagcagcaatctaaaggtcccatccttgccttgttaggaaagctatccccatatcagctaagaacacaccaggcaaccagtttccactcaatgcaatctgaaaatcagcattatgttgatcttggtacttctgcccaatagagtagtttggttagctactggttccttttcctaacagaaactattagtgaacccaatggtactaattgagtctagtaaagtgctgagcattatcagccattagctgaagttctaccctaaatacaatccaaatacaatggcagggtgacctgctggctggtagcagtagcaacagcaatgaaggaagcgagggcttatggtagacctcctttgtggccagtgttgtagctctactcnnnnn

SEQ ID NO: 20710 - DNA, 658 bp, Homo sapiens
  misc_feature 606, 656, 657, 658: n = A,T,C or G
actaaaaattctatttaaaaaagatactgtgatattagtatcttaaacagccattatgtatcaaatatctgctattcacagacccctgacaaattattatttgtttagtcactgtaacaatgaaataacaccgaagcctgtcctgttttcagtatgctactttgcttctatatgcacataaagtgtattgaatatttgtccagacaaatgctataacctgtaacaaattaatataaaccagagaattgtatttatttgtatgaactagggctgtttctttgagtttactgggggaaagaacctgagtttcaatcagatacagatttataatttatgtaagagacacttgatcttggactagcatcacttctcagcctcagtttcttcatctgtgaaatggacatactggtaataatgtccatgcaatgggcctgttgtgctgtcagggtgcttagtcaaagcagctggcagagtccctagcacagggtagatacttaatgaatcttagtttcctttcttcacctagaacaatgcttaatttaatgtcatagatttgttctattaagagataattattcggccgggtgcggtgacctcatgcctgtnatcccagcgcttttggaggccgaggtgggcggatcatgaggtcaggagannn

SEQ ID NO: 20711 - DNA, 794 bp, Homo sapiens
cggggtacttctagaattaattaacgcggggctctcgagtccgggccgcaagtcccagacgctgcccatgggggcgtccagcgagccgccgctggatgctaagtccgatgtcaccaaccagcttgtagattttcagtggaaactgggtatggctgtgagctcagacacttgcagatctcttaagtatccttacgttgcagtgatgctaaaagtggcagatcattcaggccaagtaaagaccaagtgctttgaaatgacgattccacagtttcagaatttctacagacagttcaaggaaattgctgcagttattgaaacggtgtgaagacggattctttggttgataaattgctatcattctaaagtcatggacttcactttcggcaacaaaactaaataaggatggaacacttattgaatgaaaaatgcacttttgtttttccatttttttaaataataaaaatcagacaaacagaaaaaaaaaaaaaaaacacaaaaaaaaaaaaaaaaaaaaaaaaaaaactttgttgggggggctgggcccctgagaaaggtttttaaaaaacttggtgtggggccgcgcgcacccaaatagtggtataacgaacaagcgggcgccacaaagagggtcaaagagaaacaaccggggaaccaacaaacaggggtcggtggatccccaccaaataaaaaaagcccgagggagcacagcgaggttgtgacacaactccagaggactgcgaagcgcacacggggagctcacacagggggccaccaggagccgaataatagctcgc

SEQ ID NO: 20712 - DNA, 447 bp, Homo sapiens; identical to SEQ ID NO: 20364
  misc_feature 443, 444, 445, 446, 447: n = A,T,C or G

SEQ ID NO: 20713 - DNA, 593 bp, Homo sapiens; identical to SEQ ID NO: 20493
  misc_feature 1, 589, 590, 591, 592, 593: n = A,T,C or G

SEQ ID NO: 20714 - DNA, 811 bp, Homo sapiens; identical to SEQ ID NO: 20377
  misc_feature 804, 805, 806, 807, 808, 809, 810, 811: n = A,T,C or G

SEQ ID NO: 20715 - DNA, 1126 bp, Homo sapiens
ggccgcccgggcaggtacagtttcacaatcatagcttagtgcagcctcattctcttgggcacaagcgctcctcagcctccctcctcagcctcccagttgctggaacttacaggtgcaccaccataaccagctagttttattttttgtagagacagaagtctcactttttttcctagactggtctgaaatagaccattctatttgctagaatggtctcaaaccatccttctgcctcagcctcccaaattgctggaatttcaggcataattcatcatgcctagccatttcttttttctgctgcattgcagagttagaaccaatttcatttgtcctgcactgagaatgtgcattcccagcagatcatggttgagctcagcacacctgcaactcagccagcctctttgaagggtgcacagttactaactgtcagcgttgcacagccacctttagcaggtatgttcagaacttacattcccaccctttctaaaacagctcacagtaacaagagaacgggatttaacttttgacatgcacactcatgaaaaccaatgattttggaaagccaaattgttgagaagataaggtggggattctgactactagtatttttacaaatctgattgtcgttgcaggttttgttttattttgttgtgttaatgctgagagtggagaatagattggaatatttgcctcttgtgtttctttttgctttgtaacattgcaagtggtccacattttcctttatttaaaatttaaagttggtgcctggggtttctggtgttaaatagaagtgatacttctgcataaagtattatggagatgctctgttccatccagggaggtgcaggtgaaaagagggcagttcatcctcctcacacttagggcagggagcagcatgcaggggcagatcagcagctttgcatgttgacaaatccactctctgctgcagatgcctaggggaagttgcagacttaaattttcttttgtaaaatgggggaacacaaacagatcttatgtcacactggttactccagaaaaaaaaaagaaaaagaaggaaggaagaaaagaaaaagaaggaaggaagaaaagaaaaagaaggaaggaagaaaagacagaaggaaggaag

SEQ ID NO: 20716 - DNA, 638 bp, Homo sapiens; identical to SEQ ID NO: 20363

SEQ ID NO: 20717 - DNA, 466 bp, Homo sapiens; identical to SEQ ID NO: 20303
  misc_feature 1, 2, 3, 466: n = A,T,C or G

SEQ ID NO: 20718 - DNA, 629 bp, Homo sapiens; identical to SEQ ID NO: 20404
  misc_feature 618, 619, 620, 621, 622, 623, 624, 625, 626, 627, 628, 629: n = A,T,C or G

SEQ ID NO: 20719 - DNA, 446 bp, Homo sapiens; identical to SEQ ID NO: 20700
  misc_feature 1, 2, 446: n = A,T,C or G

SEQ ID NO: 20720 - DNA, 593 bp, Homo sapiens; identical to SEQ ID NO: 20493
  misc_feature 1, 589, 590, 591, 592, 593: n = A,T,C or G

SEQ ID NO: 20721 - DNA, 619 bp, Homo sapiens; identical to SEQ ID NO: 20381

SEQ ID NO: 20722 - DNA, 522 bp, Homo sapiens; identical to SEQ ID NO: 20427
  misc_feature 1, 2, 500, 518, 519, 520, 521, 522: n = A,T,C or G

SEQ ID NO: 20723 - DNA, 388 bp, Homo sapiens
cgcaataattacttttattgtatactgcacaatataaacagcatgttgcaaagaaatatatatatttgtgtgctttgtgtatgatataaatccatttctgcaaaataaaatacaaacccgatttatcttacaaatatgaaactcaatgaaaaaacaaatcccaaaataatactatttatgtaaaatatagaagctaaacaataaattaataatacatacataaatagcaaaagagtaaagcatagtaaaaaataataagcacccaagtaaagaaaagaaataacgtaaaatttgggatggagtgatttctatgacggggaatagaaaagagatgtggccacgcatgagaatattcaggctcattggtaatgttctgtgtcttaggctt

SEQ ID NO: 20724 - DNA, 447 bp, Homo sapiens; identical to SEQ ID NO: 20364
  misc_feature 443, 444, 445, 446, 447: n = A,T,C or G

SEQ ID NO: 20725 - DNA, 1096 bp, Homo sapiens; identical to SEQ ID NO: 20674
  misc_feature 1, 2, 3, 4, 5, 6, 7: n = A,T,C or G

SEQ ID NO: 20726 - DNA, 347 bp, Homo sapiens
acaccaccaggctctgagttggttaacaattcgctgagaagacagctctagaattgcttctgcctacgaagggtgaggatgggtatatataagagatttccaacctgacaaatccatttgggaaggctgaatttgcagtttgaggagggagtttgttcaaagagcatctgcatgaacattctgctggagcagcctgtgggccgaaatccacaaggctggcactttgaggttcaacttgattctacaggctctgcggtctcatcccaaagtcacagcccacacaactggcatttcccctggtggtttggattagacaacagtccccaagctctactttggaggcaaga

SEQ ID NO: 20727 - DNA, 571 bp, Homo sapiens; identical to SEQ ID NO: 20123
  misc_feature 1, 2, 3, 4, 5, 6, 7, 8, 9, 10, 11, 567, 568, 569, 570, 571: n = A,T,C or G

SEQ ID NO: 20728 - DNA, 466 bp, Homo sapiens; identical to SEQ ID NO: 20303
  misc_feature 1, 2, 3, 466: n = A,T,C or G

SEQ ID NO: 20729 - DNA, 2538 bp, Homo sapiens; identical to SEQ ID NO: 20316
  misc_feature 2538: n = A,T,C or G

SEQ ID NO: 20730 - DNA, 556 bp, Homo sapiens; identical to SEQ ID NO: 20162
  misc_feature 555, 556: n = A,T,C or G

SEQ ID NO: 20731 - DNA, 613 bp, Homo sapiens; identical to SEQ ID NO: 20105

SEQ ID NO: 20732 - DNA, 562 bp, Homo sapiens; identical to SEQ ID NO: 20370

SEQ ID NO: 20733 - DNA, 455 bp, Homo sapiens; identical to SEQ ID NO: 20362
  misc_feature 455: n = A,T,C or G

SEQ ID NO: 20734 - DNA, 952 bp, Homo sapiens
attaattaaggcgggagaatcgcttgaacctgggaggtggaggatgcagtgagcagagatcacgacattgcactcaagcctgggcgacaagagtgaaactctgcctcaaaaaaaaaaagggggccactgggttttctatatgcccttattccccatatgatataatctcctgctcggaaagtaaattattgggttgagtgtaaaagggctgttaaaaaaatactgcttttacttattaagccatccatttacccatcctgctcacgtatgtgtcagacttttagtgcccactgcgtgtgtggctctgcactgtgttcttggggtctaacataatgtaggcaatctgaaggttactgtccagtgtgggaagcaaaaggaaatcacggtataagttttgctttctttaatagcagaaggggctacatcctactgtgggaatgcagaaaagggagtgataagctgccttcatagactgtgctttcattttttgcaaaagtaaatgtaatcaatatgaatttgtggaaagtgtagcatatattgccatgtgttatgactttgagcttattttaaaataaagatggatgcctgtttctgcctaacatgttagtcagtgttatcaaagacaagaggcagaccattcattcactcatttccaaaacactgaatgccattctgtgcctagcgctatacaagacatcggaaattcagtgtcaataagtctttgctttccaatcaacagggacgattttaattatagattgtcttcctattaagtatgaattttagcaggtattaaaattagtttgataatatgagaaaaaaatgaagattgaggccgggtgcagtggctcatgcctgtaatcccaatactttgggaggctgaagtgggaggacttgagcctaggaatttgagaccagcctggacatcatagtgagacctcatctctacaat

SEQ ID NO: 20735 - DNA, 446 bp, Homo sapiens; identical to SEQ ID NO: 20700
  misc_feature 1, 2, 446: n = A,T,C or G

SEQ ID NO: 20736 - DNA, 811 bp, Homo sapiens; identical to SEQ ID NO: 20377
  misc_feature 804, 805, 806, 807, 808, 809, 810, 811: n = A,T,C or G

SEQ ID NO: 20737 - DNA, 390 bp, Homo sapiens
  misc_feature 387, 388, 389, 390: n = A,T,C or G
acgcgggggtgggggggactacaggtgcccgccaccatgcctggctaattttttatattttttagtagagacagtgtttcaccgtgttagtcaggatggtctcgatcttctgacatcgtgatccacccgcctcggcctcccaaagtgctaggattacaggcgtgagtcactgcactcagtcaggttttcaggtgctggttccatggctcttcctgagccgaaaataaggaaactccatagaccttgtccactggaactcgttcccatctaccctccactctatccagggtgatggatctctgcagtaagtggaagagttcttcatggcccccaaggttatatccatctagaacttcagcacgttatttcatctggaaatagtgcccnnnn

SEQ ID NO: 20738 - DNA, 903 bp, Homo sapiens
  misc_feature 1, 2, 13, 896, 897, 898, 899, 900, 901, 902, 903: n = A,T,C or G
nncaccatcttanaatggctgtggtagaataccatagaagaccaaaatcccttaaattaccagggcaagaactataaggaactcaaaagcctccagttagcttcctttctttcggcgttctttttgctgtgatgaccaaggtctgaaatacaatttctctacccagccccatcgccttttctgccaggtacagctgaactaagttgggctaacaaggcagatgatgggctccaaactgtgctgcatctgtctttatggtggccctctttattacaccaagatccccagacacaacctgctggcccagaacactgcctgctgccaactagagcataacctgctcattctctccaccaccaagtgctttatgggccaggacacagcctcctgggcagtggtccttgaccttggaatctgaccttgacactgacatcactggaacattaggaaaaacccatgagccttggactccctagagaccagctaaatcagaattgctgcagtggtgctggggcatttttcccaatgacaaagtctctttctactcaagaaataaactcaattctgactgagtcagggtttcatgaatcaagcttcatgaatacttatcccaaattatttcacttatatgttgtaagatgttcccatttttgtgagttttatattattaactaagttaatgggaaatgaagtgtatctgttaaaacctaatcaatattaacttgttataaatattccgcaatctaaactgcttttacatcattgaaaagttataaaaattagcaaatctgatagcaccaattcaataaagcaatttaaaattacctagtagcacattctgtgaaactttgacaatatgatgttacttggctatgatataatcatgtacctgcccnnnnnnnn

SEQ ID NO: 20739 - DNA, 1529 bp, Homo sapiens; identical to SEQ ID NO: 20365
  misc_feature 1, 1485, 1495, 1500, 1527, 1528, 1529: n = A,T,C or G

SEQ ID NO: 20740 - DNA, 431 bp, Homo sapiens
acacacttgcatgagggatggggctggtttacaggaatggaaccagcttggaaagaagacagaaggtgagaagtgaatacttgttggtatcatgtaagaacagagtgaagaaaaaggacaggccggcccttggtttatttttaaatttcaggaaaatggattggccaaataatggggatcaaaaataaagggtgtttttattatgagccaagtgaaaattaaatttaagataggtatgttgttatggtttgattgtgtcctccaaagttcatgtgttggaaactgaagcgccagtgcaacagtattgagaggtagaaactttaagaggtgatcagtgctgggtgcagtggctcacgcctgtaatcccagcactttgggaggccaaggcgggcagatcacctgaggtcgggagtttgagatcagcctgatca

SEQ ID NO: 20741 - DNA, 675 bp, Homo sapiens; identical to SEQ ID NO: 20117
  misc_feature 645, 672, 673, 674, 675: n = A,T,C or G

SEQ ID NO: 20742 - DNA, 1290 bp, Homo sapiens
  misc_feature 1, 2, 1281, 1282, 1283, 1284, 1285, 1286, 1287, 1288, 1289,1290: n = A,T,C or G
nngcggctccatgtgtctcttgcgattgcctcgcacctgttaggtccgagtcttttcgattacttcggacatttatgtttataggaaaatgatgagtttatgacaaaggaagtagatagtgttttacaagagcatagagtagggaagctaatccagcacagggaggttcacagagacatccctaggaagtggagtttaaactgagagaagcagtcttaaactgaaggatgtgttgaagaagaagggagagtagaacaatttgggcagagggaaccttatagaccctaaggtgggaaggttcaaagaactgaaagagagctagaacagctggagccgttctccggtgtaaagaggagtcaaagagataagattaaagatgtgaagattaagatcttggtggcattcagggattggcacttctacaagaaatcactgaagggagtaatgtgacattacttttcacttcaggatggccattctaactccagggggtagactggactaggtaagactggaggcaggtagacctcttctaaggcctgcgatagtgaaagacaaaaataagtggggaaattcaggggatagtgaaaatcagtaggacttaatgagcaagccagaggttcctccacaacaaccagtacagatgtccagtagacctactggatatgcaggcctgcagctcaggggagagctgggttaagaaccgtcaaggcagtaatcatctgcatttagatggcgagtgaagccatgacaggggctgaaatggcccagcaagaataaatcaaaccatgagaaacacatacatttaagaataaggagatgtggtcaggcgcggtggctcacacctgtaatcccagcactttgggaggccgaggcgggtggatcacttgaggtcagtagtttgagaccagcctgggcaacctagtgaaatcccgtctctgctaaaaatacagaacttagctgggtgtggtggtgcgtgcctatagtcccagctgcttgggaggctgaggcacaagaatcgcttgaacccgggaggtggaagctgcagtgagccgagatcacaccaccgcactccagcctgggcaacagagaaacaccctgtctcaaaaaaaaataataataaggagatgtcatgggctcgggggagggggaaatggggagcgctgttgtttgaatggtataggttcagtttgggactgagaacaaattctggaaattaatggtggtgatggctgcacaacagtgtgagggcactttatgccactgaagtaacagatgccnnnnnnnnnn

SEQ ID NO: 20743 - DNA, 458 bp, Homo sapiens
  misc_feature 458: n = A,T,C or G
actactgcaaccactagcagctaccatttatgaagcacttatgtgccagctactgtgaaagggactctctttaaattactttgcttacttctcacaaaaatcctgcaaagtattattttaaggaaacttaccagtgtagccattcagtatttgggatgaatagtaagaaactttttagaaccatttataaagcactctaggtcattctttgagaaatgctacaaactagggaaccaggagattagagatgggctcacgtcttgattttcagaaggaaaatgtagtggattgtgaatgctgtatcattaagcttgacatggatgtctatgcaaaattcaaaaggattttttttttttttaacaacttacttcttttccatagtcttaccagcactcactggatgcctgccatggattctttaataacaggttctggctggcatggtgtttcacacctgn

SEQ ID NO: 20744 - DNA, 373 bp, Homo sapiens
acctcattttgtcttcattccctctttgttcgggcctctctgcttttcgttaattttctcctggccaaccagccaactctggctccctgtggttataggaaattatccgtgcaatgaacttaatttagaaaaactctgctgcataaagaggtggcagaattattcttctcatagtccagtctatgttgactttcatgctacagcatttcaacagtcattgacatagaaatagatgcttaatttaaaatgtttttgcaaaagtcattggacgattgataaataaagccgaggttagactccaaataaagtgcttaaaaaagtaaaattctggcattcatcttccttatcccttaatgggggaaaaactctcatg

SEQ ID NO: 20745 - DNA, 640 bp, Homo sapiens
  misc_feature 1, 42, 635, 636, 637, 638, 639, 640: n = A,T,C or G
ngtgtgtagtatggtggttcactcctccagtgtgacacccanaaatgtcatcagacctgccagaatgccctgacaaaatcaccctctaaaccactgctctaaagcaaaattattctcctaaccagaagggaaatggatgctaggtggaaaaaagcaatatcctaccccattgacaccttggtgctgtatgaacagttatgtatttccatggctttctccccaactcatgaagttcctcagaacagaaatcatgtctcactcatatctgtgtgcctgctgtctccagtacacagtgtttagcacacaagtgcttagtaaacatttccttttgataaatgcatgagcagacgttcagtctgaagtggagtcaggagtagtcatgtttctgcttgctgccgtgcacagggagcttggcctgcaggcatgaggcatttaattctcagaacacttaatgatgggagaggtccatgcctatggggagtcagacctaagcaactccatccacctttctgctaaaatcgcccactttggcagaaatcatgacctatcaacagatgaccagtcctctaccaacttcgtgttttccttgagaaatggctccctcccgcgttaattaattctagaagactctcgannnnnn

SEQ ID NO: 20746 - DNA, 542 bp, Homo sapiens
  misc_feature 1, 2, 3, 4, 5: n = A,T,C or G
nnnnngagacagagtccactctgtcacccaggctggagtacggtggtgcaatttcagctcaccacaacctccacctcccaggttcaagcgattctcatgcctcaccctcccgagtagctgggactacaggcacatgccaccacgtctggctaatttttatatttttagtagggacagggtttagccatgttggtcaggctggtctcgaactcccgacctcaggcgatccgctcgcctcggcctcccaaagtgctgggattacaggcatgagccatcgtgcccagccaatacatttgattttgatctatcagcaaagaggctccaaggtttagtatgtttccattttgtattcagggtttcatttgtgtgctaggtcgaacatctttctgtattcaagccgaagttagagatccaaattgctaaaggacttcagcaggccagagctcagtgaaaggaaggtccacagaagggccactaattagtaatgaatggctaaaagacaagggactttttttttttttttctttctgagatggagcttc

SEQ ID NO: 20747 - DNA, 758 bp, Homo sapiens
  misc_feature 757, 758: n = A,T,C or G
actgggattacagtcctgagccaccacaccgggcccttcattgtgttttctaaaaacaatttctgatcacctggggattattacaacagatctaactttaggaaagtaagtattaaatttgaataagattatataatagggggatttaaattaaatgcctaacagagtttcatccaaaattttagaatgtgaattcaaggaactcttgacccttctgaagtaaattgatagcatttccacagtgttcacactaggatgtagctagccaactcacagctgcctgtcctcttttagcttccaatgaaaatgctttggaaaacatacacatagaaaaagaaattctcacagtaatacttaaacctaaaggctaagcaatcaggtcttttgctaaaatctaggaagaatgttaccaactgtagtgccaatggaaatggattttttaaaccattttaaatgggactgaaacagttgtttccattaaaggaaatgttgctaagaagtaagttggagggaggcctagccacccccaccctaatccctagtgatggaatagtttaaaaccataaaagctacaataaccagaaaactcaactgctaccaccctcactgcagggagacctgaattcagaggcagccagtgtttgccttccctttttcagaaaacatagcctcactactttgaagaaaataccagtaatttccacacaggagaaataatcattgactataagagaaatcaacaatgtagtaataaacnn

SEQ ID NO: 20748 - DNA, 1189 bp, Homo sapiens; identical to SEQ ID NO: 20185
  misc_feature 1179, 1180, 1181, 1182, 1183, 1184, 1185, 1186, 1187, 1188,1189: n = A,T,C or G

SEQ ID NO: 20749 - DNA, 2026 bp, Homo sapiens
  misc_feature 1, 2: n = A,T,C or G
nncgacccacgcgtgcgggcggtcagatccttgcaagcatggtcgcgccggggcttgtactcgggctggtgctgccattaatcctgtgggccgacagaagtgcaggtattggttttcgctttgcttcatacatcaataatgatatggtgctgcagaaggagcctgctggggcagtgatatggggcttcggtacacctggagccacagtgaccgtgaccctgcgccaaggtcaggaaaccatcatgaagaaagtgaccagtgtgaaagctcactctgatacgtggatggtggtactggatcctatgaagcctggaggacctttcgaagtgatggcacaacagactttggagaaaataaacttcaccctgagagttcatgacgtcctgtttggagatgtctggctctgtagtgggcagagtaacatgcagatgactgtgttacagatatttaatgctacaagggagttgtctaacactgcggcatatcagtctgtccgcatcctctctgtctctcccattcaagcagagcaggagctggaggaccttgttgcggttgacttgcagtggtctaagcccacctcagaaaacttaggccatggatatttcaagtacatgtcagcagtgtgctggctctttggacgtcacctttatgacactctgcagtatcccatcgggctgatcgcctccagctggggcgggacacccattgaagcctggtcatctggacggtcactgaaagcctgtggggtccctaaacaagggtccattccatacgattctgtaactggtcccagtaagcactctgttctctggaatgccatgatccatccactgtgcaatatgactctgaaaggggtagtatggtaccagggggagtccaatataaattataacacggatctgtacgattgcacattccctgcactcatcgaagactggcgtgaaaccttccaccgtggttcccaggggcagacggagcgtttcttcccatttggacttgtccagttatcttcagatttgtctaagaagagctcagacgatggatttccccagatccgttggcatcaaacagcagacttcggctatgtccccaacccaaagatgcccaatactttcatggctgtagctatggatctctgtgatagagactcgccttttggcagcatccaccctcgagataaacagactgtggcttatcggctgcatttgggggcccgtgctctggcttatggtgagaagaatttgacctttgaaggaccactgcctgagaagatagaactcttggctcacaaggggctgctcaatctcacatattaccagcaaatccaggtgcagaaaaaggacaacaagatatttgagatctcctgttgcagtgaccatcgatgcaagtggcttccagcttctatgaacaccgtctccacccagtccctgaccctggcgatcgattcttgtcatggcactgtggttgctctccgctatgcttggaccacgtggccttgtgaatataagcagtgtcccctataccaccccagtagtgccctgccagcccctcccttcattgctttcattacagaccagggtcctggacatcagagcaatgttgctaaatgactgtttcagtatgatcagaacttagatataaggatgggtccttcagattttagcatttaggagtttcaataataaccattgcttttaaaggaaattaatagaaagcctcattgaatggctttcagctagcacatggctgtttctatattctgatgagcccaggcttataggtaacttgaaatgcttgctttttgttccctagttggtctaagggtctgtattggactaattctgaactacagacaaattggacctcaatgtcatttacttccctcatattaatgggagtgaaatgtctaatacttttgcccctttgtatccagagttgtgggaatctcaggattggaagagattttaaaggccacataggccagctagtgttcatgtgttctttataaaatttctcccatccaagt

SEQ ID NO: 20750 - DNA, 466 bp, Homo sapiens; identical to SEQ ID NO: 20303
  misc_feature 1, 2, 3, 466: n = A,T,C or G

SEQ ID NO: 20751 - DNA, 402 bp, Homo sapiens; identical to SEQ ID NO: 20517
  misc_feature 1, 2: n = A,T,C or G

SEQ ID NO: 20752 - DNA, 373 bp, Homo sapiens
  misc_feature 372, 373: n = A,T,C or G
actaaagcatatcagcagattgggggttccacttgttgttttcaatttaataaacacttattgagctgctacaggaactgtttttaatgcttttccaaaaaaagtgaccttctcaacatgatagaaaacatttccgaaaaactgttagctaaaactatacgcagtggagaaagattgaaggctttccccataagattaggaaaagacaaacacactaaaatcacacacagctagtgtatagttgtgtttcttacattaacaatgaacaatccaaaaaagaaattaaggagcaatttcacttacaataacatttgtattattccgttttcacactgctatgaataaatacctgaaactgggttgtttataaann

SEQ ID NO: 20753 - DNA, 469 bp, Homo sapiens; identical to SEQ ID NO: 20577
  misc_feature 446, 455, 456, 457, 458, 459, 460, 461, 462, 463, 464, 465,466, 467, 468, 469: n = A,T,C or G

SEQ ID NO: 20754 - DNA, 450 bp, Homo sapiens; identical to SEQ ID NO: 20208
  misc_feature 443, 444, 445, 446, 447, 448, 449, 450: n = A,T,C or G

SEQ ID NO: 20755 - DNA, 373 bp, Homo sapiens; identical to SEQ ID NO: 20744

SEQ ID NO: 20756 - DNA, 601 bp, Homo sapiens
acatgagtctcttttttttaagaattttaattttcctagttccttatctttttaatgattattctttaagtggacatttaagacatgagcttttaagagcagctgaaaattattggttgtttactatgggttttatccatttgtatactgtttttttttctcagctatcttcaaaatagccataggaggtagattccattattattttactctaaaaagagaaaactgagttttaaagtgttaaagtggcaggaccaagatgaagatacgaggtgaaagtaactaaaggttgttagcataacaattcaaccaaagatgcaattgaaacaatatgtctttgctgtcatgtctagacaatgagatggccagattgcaggcagcatatttgcagtgactctccaaggcctgcaaggttagagctggtctaggtagatgtttgcagctggaagtgggaaaacatccaggcaagcagggggttaatcctggtattcttgcaaaagttcagatccatggtatgaaggcagtatgaaaagatatgggcaaggatagtggcaccagaaaggcttagcaattgtctacagggcccagccatggcaactgt

SEQ ID NO: 20757 - DNA, 803 bp, Homo sapiens
  misc_feature 698, 802, 803: n = A,T,C or G
taaatcacttccttgattctagtgttccttggttgccttaaagtggcttttagcaagaccacaaagataggaaacattttacatcagtaagagaaggggtagtagaagacatgcaggcaggaatctacaactatcccctcttcttagccctgggccatagccctgacagtcccaggggcccagttccaccactgtgtcatgatggggtgatgcagatagaccatccttctgtctcaaacgtcttctgcatctaagaaattctgttcaaaagatggtttatggcgagagatgctgccatctaaaggcatactacaaaagcatttatactactataaaaataatccaattcctagccagctacatgggtgtactacatcttaaactagactgtaatcaaataagctaataatactttacaaataaggacggtatttcaaacttcaggaaccatcgtttttaaatgattcatgtagtatttaatcacttggcggtcttcataatttaaccctgtcataaagggaacttttacaaagattaaaatagaatggttacaggggacacacaattgcaatctaagtgcgggatgtaggctattcaacagtatccagactttatctacaacatatatatatatatccacacataaatatgcgtagggaaaaagacttgtgggggtttgggggtggagctaaactatntgctgtgtaagagacataaactagaaagaagggcctgaataggacagatacaaatggaatcaattagctgggtgtggtggcgtttgcctgtagtcccagctacnn

SEQ ID NO: 20758 - DNA, 932 bp, Homo sapiens
  misc_feature 1: n = A,T,C or G
naggatcccctctctccacactggctgtacaagcctagagagcactaaataaatgtcaattattatttttatccattctggcatttagaaataaaagttacaaaattcactattaaaaataccattgatacataccatattccagccacactggcctcttttctgtgacaaaatgcccttttcttcttttgccctcaacacctgctcctccctatgcttggaattttcccccagctcctccacggccaactcattttgttccttaaatctcaagtccaatacctctcaattcaaatattccccctttagagagccttcattgagactgctatccccaaaagtctaactttcttataatcttgctttaattctgtcatagcttttacaaacatctgtaattgtcttatatacactggtatggagagctgatcttttttgcactggtatttgcagctcctagcattgtattacagcaaataatgtgtgcttaataaataaataaaaaatgatgcaatgtcaaatactttaaaacaacattgtgctcacacaactttaaaaacaatttgagtttaacatatgtcacaatgtttgaaaaagagtttagatgcagcagtgtccaatcttttggcttaccctggagtacactagcagacttgtcttggggcacacataaaacacactaacactaacaatagccaatgagcttaaaaaaaaattgcaaaaaaatcttataatgttttaagaaagtttacaaatttgtgttggaccatattcaaagccatcctgggttgcatgcagcctgtgggccatgggtcggacaagcttggtttagggagagggaggatatagagaagtattacacaacggtttttccttgctgcctgtttaatcgccaagagcaattcaaataacagaatttatacaaataggat

SEQ ID NO: 20759 - DNA, 560 bp, Homo sapiens
  misc_feature 560: n = A,T,C or G
acttcaaatgggtcactgaatatcttcaaattgtatgtaaattttggaggggaagtggtatatgcagatttttttttttctggaaagaagaccaatcacttttgccaaattctcaaacaggcccatatttctctcacacacatgcgtgcgcatgcgcacacgcgcgcgcgcacacacacacacacacgttaagatgcgaagaatcactgtcataaaatgtcatatttctaatttctgtaaatggggagaattcctcaagcttatataaaagtgatgtaaataattcagttacaattataaaagaaatggtatcacagcaaatccctttggcaccccactgaaaatttctctctgatgtttaaaacaccatttctatgcttactcttacagctgtattaataatcagataaggggtttatttcttgtctattttgcttagcatattaccaaatctggttcatatgaactcatgggtaaaatctaaaaatgttcatgaattattcttcatgaatttttcacaaagcattaatgtatgaaaaagtgaacaatataacatcagn

SEQ ID NO: 20760 - DNA, 418 bp, Homo sapiens; identical to SEQ ID NO: 20251
  misc_feature 1, 413, 414, 415, 416, 417, 418: n = A,T,C or G

SEQ ID NO: 20761 - DNA, 675 bp, Homo sapiens; identical to SEQ ID NO: 20117
  misc_feature 645, 672, 673, 674, 675: n = A,T,C or G

SEQ ID NO: 20762 - DNA, 439 bp, Homo sapiens
  misc_feature 1: n = A,T,C or G
nccaccgcggtggctggccgaggtacgtcacaccaatggtctcagtgtggtccttaaaccagctgcagcagcatcacttttcccaggtgcccatcccagacctgctgatttggaaactgactatggagcccaggaagctgttttagcaagccccctaggcgattctgacgcagttgatgtttgagaaacactgcactatctcagactcttttaaatcagagatctggagtcaaattcaagctctactacatctcagctatgtgacctttggcaattgatacacctttctttcttttctttgcttttttttttttttgagacagagtcttgccctgttgcccaggctggaccacaagggcccgatcttggctcactgcaccctccccctgtcaggcgatcttggctcacggcaacctccacctctcaggttcaagcaatt

SEQ ID NO: 20763 - DNA, 1189 bp, Homo sapiens; identical to SEQ ID NO: 20185
  misc_feature 1179, 1180, 1181, 1182, 1183, 1184, 1185, 1186, 1187, 1188,1189: n = A,T,C or G

SEQ ID NO: 20764 - DNA, 466 bp, Homo sapiens; identical to SEQ ID NO: 20303
  misc_feature 1, 2, 3, 466: n = A,T,C or G

SEQ ID NO: 20765 - DNA, 861 bp, Homo sapiens
  misc_feature 858, 859, 860, 861: n = A,T,C or G
acttgtgttgtcttcaggattagggaatgctgctttgatcatgttgaaaggaagatagaaaaaagattgaaaagctgggtctctaaggtaggaggtctgggatctgtttattctacttagttcaagttggaattgatgctgttaaacatgtgagatgaccctgaactactcttcagggttaaggcaggtctgaggcagatggatgaattacgccaatggactataatgtgtaatctgtgcatgtgtgtaaccataaaatacagttctatccagattttggttgagaaaagttaatgataaaagggctgggctggaagactgggtcgaggaagaagagtgatacttagggtttactcacatcttatctaggcaacttttctggtcttgatttgggctttaagggccatgaataccccaatatccttaaattcctacattcccagtatatatgatgtaagaaatttccacccatttggtctgaatcttctatatttggcacttctcatcaggcacctagccaacggttgagggctgatcttctgacttggctttcctggttgaccagtgctggttctataaccccattaactatcagaattccaagccatgaactaagcttgctggtttcatcctggcagaaatgaacataattcttgagctaaaattgtacagttgtagtccaacaataatggcagatacaaaggctatgttcccggtacaaagacaagcatttcacctgcataatctcatttagcccttaacaattctgtacgggagatattatctataaacccttttacagacgagtaaccaaacccagctagattacaaagtgagaaagcgatggaagccacatcnnnn

SEQ ID NO: 20766 - DNA, 524 bp, Homo sapiens; identical to SEQ ID NO: 20093

SEQ ID NO: 20767 - DNA, 483 bp, Homo sapiens; identical to SEQ ID NO: 20169
  misc_feature 1, 2, 477, 478, 479, 480, 481, 482, 483: n = A,T,C or G

SEQ ID NO: 20768 - DNA, 393 bp, Homo sapiens; identical to SEQ ID NO: 20407

SEQ ID NO: 20769 - DNA, 668 bp, Homo sapiens; identical to SEQ ID NO: 20192

SEQ ID NO: 20770 - DNA, 542 bp, Homo sapiens; identical to SEQ ID NO: 20746
  misc_feature 1, 2, 3, 4, 5: n = A,T,C or G

SEQ ID NO: 20771 - DNA, 383 bp, Homo sapiens; identical to SEQ ID NO: 20349
  misc_feature 383: n = A,T,C or G

SEQ ID NO: 20772 - DNA, 631 bp, Homo sapiens; identical to SEQ ID NO: 20434

SEQ ID NO: 20773 - DNA, 466 bp, Homo sapiens; identical to SEQ ID NO: 20303
  misc_feature 1, 2, 3, 466: n = A,T,C or G

SEQ ID NO: 20774 - DNA, 466 bp, Homo sapiens; identical to SEQ ID NO: 20303
  misc_feature 1, 2, 3, 466: n = A,T,C or G

SEQ ID NO: 20775 - DNA, 1189 bp, Homo sapiens; identical to SEQ ID NO: 20185
  misc_feature 1179, 1180, 1181, 1182, 1183, 1184, 1185, 1186, 1187, 1188,1189: n = A,T,C or G

SEQ ID NO: 20776 - DNA, 808 bp, Homo sapiens
  misc_feature 1, 2, 3, 4, 5, 6, 7, 8, 9, 10, 11, 188, 261, 806, 807, 808: n = A,T,C or G
nnnnnnnnnnnaagcatttatcttccaggtgagttaaggcgttaataaatatttttcctttaaccacccaagtgaagacctggcatagtaagaagggggttcccatatctccccttatatttatgaaagtcctggaatgttcttttaatatgcaacaaattccagataataaatcccatcaccttttnttctggggaaaaaacaatcttcctagaatatttgtttatttgcatttttaaaaagcattggaagattccccanaaagaatttgcaggaaaggagaccaaggccaggttctgaagcaaggctgctcaatgtccactgtttttaaatcactttaatttctgaaccatgtggctatactccctatctaaaaggacatgaatattttttaaagtcccattacgtacataaggggcccaatacaagcaagcataaataatcttgaaaataagagaaatctgagaatgcataattttttagttgatgataaacaatagttttagaacttaaaccataattttcagatgcttgaaaaaattctgatcatcttcaaccatggtatttacatgaaccacaaaaacatacaataacatacactctccaaataacaaattgcactcctacttactcctatttctctactcagtgtccatttcctcaaaaaacttttcccaattagcaccaatgaaggacaacactcagactaccctattctttaaacagacatgaatttgtccaatatacatatatgtatttcctggactattaggtcctaaaatactttagtaaagaaagcaatgacnnn

SEQ ID NO: 20777 - DNA, 276 bp, Homo sapiens
acatccaaaatcatttcagcatataacctgtaaagactgcatcatcccagctactttcctgctgacttccacttgggtttactcaatgggtgacactcacaggacataagagattagaaagagggataaggttttttatatatctgctccctccttacttaaagccatggttttagcagaggcccaaggtcgtggctttttttgagcagcccctttatcaaaggtctggaaagagtctaccttccccctcacaactgaataatgaggcttactact

SEQ ID NO: 20778 - DNA, 642 bp, Homo sapiens; identical to SEQ ID NO: 20389

SEQ ID NO: 20779 - DNA, 396 bp, Homo sapiens; identical to SEQ ID NO: 20585

SEQ ID NO: 20780 - DNA, 575 bp, Homo sapiens; identical to SEQ ID NO: 20550
  misc_feature 1, 2, 3, 4, 5: n = A,T,C or G

SEQ ID NO: 20781 - DNA, 466 bp, Homo sapiens; identical to SEQ ID NO: 20303
  misc_feature 1, 2, 3, 466: n = A,T,C or G

SEQ ID NO: 20782 - DNA, 363 bp, Homo sapiens
tcttataagacatctgatttaaaaaaaaaagaataatagatttaagaagaaaaaaattagctaataatgacagcaggcttgtaatattatcataatgtcatttatcatagatatccttattctccagggcagcacttctcaaatccttgacagtatgacattttgggccagctaattccttagggagggacctttcctgaatattcaggccgttgagtggcctgcttggccttgacccgctcactgccagtagcacacctcccccaggcttcagcagcagaacacctccagtcactcagtggggactgggtaggtgggagacagaatcgcaccagttaagtgtctctgcggcagggtgaacgg

SEQ ID NO: 20783 - DNA, 610 bp, Homo sapiens
gacggagtctcgctccttcgcccagcctggagtgcagtggcgtgatctcggctcactgcaagctccgcctcccgggttcgtgccattctcctgcctcaaccttcccgagtagctgggaccacaggcgccccccaccgcgcctagccaatattttgtatttttagtagagagagatgagtgtatataatgccgtaggaataggtaaaattacctagagagcccaagtctctaggaactccaactttagaagtcaggcagagggaaaaaggtgttccaaattttttttttttaaaaaagagagtatttcaaagtggaaataaataggttgaaactgttgagaggtctaattagatgagaactaaaacatcctttggatttggtaacagagttacaactgcatttttattgaaaatgaaaatgcttaattgagagtgtatataaacttctaggtaaaggtggcaaattgagctcatgcatctaattttgcttgttcctgatgcctctcttatacgataaacagatttttttaatggagtctcgctctgtcacccaggctggagtgcaccatctcagctcactgcagcctccgcctcctgggttcaagtgatta

SEQ ID NO: 20784 - DNA, 1361 bp, Homo sapiens; identical to SEQ ID NO: 20142
  misc_feature 1, 2, 3, 4, 5, 6, 7, 8, 9, 10, 11, 12, 13: n = A,T,C or G

SEQ ID NO: 20785 - DNA, 538 bp, Homo sapiens; identical to SEQ ID NO: 20391
  misc_feature 1, 2, 3, 4, 5, 6, 7, 8, 9, 10, 11, 12, 13, 536, 537, 538: n = A,T,C or G

SEQ ID NO: 20786 - DNA, 390 bp, Homo sapiens; identical to SEQ ID NO: 20737
  misc_feature 387, 388, 389, 390: n = A,T,C or G

SEQ ID NO: 20787 - DNA, 520 bp, Homo sapiens; identical to SEQ ID NO: 20673
  misc_feature 520: n = A,T,C or G

SEQ ID NO: 20788 - DNA, 601 bp, Homo sapiens; identical to SEQ ID NO: 20756

SEQ ID NO: 20789 - DNA, 556 bp, Homo sapiens; identical to SEQ ID NO: 20162
  misc_feature 555, 556: n = A,T,C or G

SEQ ID NO: 20790 - DNA, 425 bp, Homo sapiens
  misc_feature 1, 2, 3, 4, 423, 424, 425: n = A,T,C or G
nnnncatagtcgactcctagaggaacacatgtttgaaggcagtgctttcaacaagacctatgtagatttggaactaatgaataaaaagaagtggtctggaatgatagaattttacagctaaaaaggacctgtaaaatcatgtacatcattctgcatgattcacggactaggagtccctggtcaaaaacttcaaaaactaagtgatgggtcccaagttactcagtggcagaaacttgattcagtaacatgtcagcttgtgggcttgaaaagtcttaagtgtctctacttcttctatccttgtgctttcccgggactttacacaatcccacctcccactggacaattgtcaaatcccagagagtatgggaagtctgttcatctctgatcaccataaatacgtatgacatacacacactgcactcnnn

SEQ ID NO: 20791 - DNA, 567 bp, Homo sapiens; identical to SEQ ID NO: 20361

SEQ ID NO: 20792 - DNA, 865 bp, Homo sapiens
acttctccacccttcttacatttatttatgcctagcactgttactttccagaaatgaattaatacagctatcatcactgagtctcaattacttgatagatgacaggaacatcctctgatctctatgggatgagaatgttaactttattacccttaattcctgctgttttgcaaccagagagtaagcaaaggctaaagctgagggtgagatgtagaaaccttgcctactatgtgtgtggaaaagtttagtggcataaacttgcagaatttacttatttgtatgaatgagaaatatgtgatcagtaatttggctcagaatggatgaggatgagatttcgtaagcaacacaccagcatctaatcctgaaatcaccttctggatctatttttataagttgtaccactctttgaagcagtggacatggagtggcctctgggaagcaggtcctacactaggagctagaaaggaagccctgttaagctgatctttgagctgctagtgattcctactagggagtcacctgaatatatgtgctgactttgagctgctagtgattcctactagggagtcatctgaatatatgtgctgactttgagctggggttggcaaactgtagcctgtgggccaaatccagcctcctgcctgtttttgtattgcccctgagcaaataatgttttttacatttttaaaaggttgggaaaacatcaaaagaataataatattttgtaatatgtgaggcatatgaaatttaaatttcagtgtttataaataaagttttattggaacacagccaagttcatttgtttatgttttgactctgactgctttttcttatagtggcagagttgagttgttgtgacagaggt

SEQ ID NO: 20793 - DNA, 707 bp, Homo sapiens
  misc_feature 1, 2, 3: n = A,T,C or G
nnngtgctggaattcggctttcgaattcaagaagggcagccagcagaagatgaagcagagacagggattaagtcaaaagaagcaagaaagtacattttcaactgtttagatgatatggcccaggtgaacatgacgacagatttggaagggagcgacatgttggtagaaaaggctgaccggcgggagttcattgacctgttgaagaagatgctgaccattgatgctgacaagagaatcactccaattgaaaccctgaaccatccctttgtcaccatgacacacttactcgattttccccacagcacacagtagctgtccaccgcgatcgcgcacaggatcggcaaactttaaaggcccagacactaagtattttaggttttgcggccataaggtcttggtaacaactactcagctgtcactgtagctgaaagcagccacagatgcaatacatagacagatgagtgaggctgcattctaatgaaacatttatgaaagtgggcagggctgggcgtggtgtctcatgcctgtaatcctagcactttgggaggcccaggcaggtggatcacctgaggtcaggagttcgagaccagcctggccaatatggtgaaaccctgtctctactaaaaatacaaaaatcagctgggtgtggtggggcgcacctgtaatcccagctatttgggaggctgaagcaggagaattgcttgaac

SEQ ID NO: 20794 - DNA, 409 bp, Homo sapiens; identical to SEQ ID NO: 20670
  misc_feature 409: n = A,T,C or G

SEQ ID NO: 20795 - DNA, 460 bp, Homo sapiens; identical to SEQ ID NO: 20633
  misc_feature 1, 460: n = A,T,C or G

SEQ ID NO: 20796 - DNA, 389 bp, Homo sapiens; identical to SEQ ID NO: 20457
  misc_feature 389: n = A,T,C or G

SEQ ID NO: 20797 - DNA, 1128 bp, Homo sapiens; identical to SEQ ID NO: 20289
  misc_feature 1, 2, 1127, 1128: n = A,T,C or G

SEQ ID NO: 20798 - DNA, 1249 bp, Homo sapiens
  misc_feature 1, 2, 1249: n = A,T,C or G
nnaggcacccaggccttaccatttatgcctcgggctcgtatgttgtgtgaaattgtgaccggataccattttcacacagaaaacagctatggcattattacccctgcctcctccgctgtctccctggagttcttgcaagtcggccaggatgtctcagtgtagacccttgcctgaatctgggcgagctatcctgggcgatcgcttcctggtcctcgcctcctccgctgtctccctggagttcttgcaagtcggccaggatgtctcaggctgagtttgagaaagctgcagaggaggttaggcaccttaagaccaagccatcggatgaggagatgctgttcatctatggccactacaaacaagcaactgtgggcgacataaatacagaacggcccgggatgttggacttcacgggcaaggccaagtgggatgcctggaatgagctgaaagggacttccaaggaagatgccatgaaagcttacatcaacaaagtagaagagctaaagaaaaaatacgggatatgagagactggatttggttactgtgccatgtgtttatcctaaactgagacaatgccttgtttttttctaataccgtggatggtgggaattcgggaaaataaccagttaaaccagctactcaaggctgctcaccatacggctctaacagattaggggctaaaacgattactgactttccttgagtagtttttatctgaaatcaattaaaagtgtatttgttactttaaaaaaaaaaaaaaaaaaaaaaaaaaaaaaaaaaaaaaaaaaaaacaaaaaaaaaaaacaaaaaaaaaagaaggagacaaacaaggggaacgaagtagaaaaagagagaaaaagcaaaaggaaaagaagaaagagagatacgaggcaggataacagagacagcgcagaagaggaggagaagaaagagagagaagagaaggaacagacgagagaggagacaggaaagaagagaaggaagaggggagaggagaaaaaagagagagacagagacgcggagagaaaagagagaagagagaaggaagagaaaaggcgaggaaaaagaagaacagaaagagaaaagtagagagagagagagataccgaacgaggaggagcaaaagaggaaagaaagaggacgaaaagaagagaggaaagcacaacgaggcaagaaaaagagagaagagcgagggagaagagaaacataagaaggagagaagaaagagcgaacgaacgaaagaggatgagaan

SEQ ID NO: 20799 - DNA, 533 bp, Homo sapiens; identical to SEQ ID NO: 20481
  misc_feature 533: n = A,T,C or G

SEQ ID NO: 20800 - DNA, 562 bp, Homo sapiens
  misc_feature 1, 2, 3: n = A,T,C or G
nnncgaccacgcgtccggtcagtgtgatcttcactcacagccactgaatccttttgctatcattcattcagtcctgacatgttaagtgtaacaagcaaaaggccgaggggctcttgtctcagaacataactggcaaggttttaagtgtattctctctctttatgtgtacactgaaaatcggggctcgccaacttggattccaacagcacagaagtgaggagaagaagcacaatgaagcataatgtctggataatggctacaacaaccatccctgagaactgcctggtaatatcagggtgataggatgggcttccactctcctaaaacagccagcagttcttgtatttctaactagaaggcagaaaaaaagagacaatctacattaatcatgatttggggattattaccaaagtgaaaagaatctcatttccaatcaacttagaaagcttatcctactccattaagtgaaagaaagaaatatctctttctaaaataaagcatgtatccactttgccttggcataggacaggacacactgggcccaaaatagctccagtccttc

SEQ ID NO: 20801 - DNA, 419 bp, Homo sapiens
  misc_feature 418, 419: n = A,T,C or G
ttgcctcgtagccctggcaggacctaggggacaggttctgaccgggaagagccctgggtgggtcttaagaggccattcatttcttaccaattctgagtcactgaataaaaccacttcccccagtggggcccctcggtttcttcacctgtaaaatgggtgcgatgtgtgaggatgaaattgcagtaaaataaaaccgtggcagtaagagatgcctttctctggcacatcccacctgctgggcataagcggcgccaccctctggagttacagcctcaaggcagtccggtaactaatcaggctttgggatggagagggccaggatgaggaagcaaccttcccaacaccacgtggctgtgaaaatgacaaagcatggtcgggcgcagtggctcacgcctgtaatcccagtactttgggagann

SEQ ID NO: 20802 - DNA, 397 bp, Homo sapiens; identical to SEQ ID NO: 20110

SEQ ID NO: 20803 - DNA, 735 bp, Homo sapiens
  misc_feature 733, 734, 735: n = A,T,C or G
gcgtccggtcttgctctgtcacccagggtggagtgcaatggcgcaatctccgctcactgcaacctctgcctcctgggttcaagcaattctcctgcctcagcctcctgagtagctgggattacaggcacgcaccaccactcccggctaatttttatatttttagtagagacggggtttaactatgttggccaggctggtcttgaactcctgacctcatgatccgcctacctcagcctcccaaagtgctgggattataggcatgagccactgcgcccggccagaggaatcattctaagcggagaagataacacctgcaaaagtatgccacagttatgttgggaatttcaatatgatggagctctgagtgtacatgtatgtgaggaaaaggaggtaaacaaggagttagaaagatgtgatgagaccaggtggtgatggactgaatataaagcaaagacatctggatttttaattctgtagggaatagctgaccaaggtatatgattacatgtctgctttttaaacagctttgtgatttgaaatgctgggttgttattgtttttttttgtttttgtctttctttttaaaaaaaaaaaacatggctaactctgccaaccatagacaaaatatgcatactggcatgtggagaaagaagacaggaattgttagaaagatttcattatttttccagcctccaaaataatgaggtaattttaggcatagtaataagaatgannn

SEQ ID NO: 20804 - DNA, 1020 bp, Homo sapiens; identical to SEQ ID NO: 20647
  misc_feature 1, 2, 3, 14, 20, 35, 42, 48, 81, 1019, 1020: n = A,T,C or G

SEQ ID NO: 20805 - DNA, 407 bp, Homo sapiens
acctcttaattagccaagaataagtgccgtggaagaaggcgggatgactttttagaacccatttttagctcgaagatcactgagggagccatcaaatccatccacctgttcaatcaatattcagccagcaagtgggtgtcaaggtgagcagcttacagtgctgagcacactggaaacacaggtgtgtaagggacagccacggtctcaaattacattctgaaagggaatactaggtaagtgatcccaaacatgcaaatatcattccttggtcctgggatgtgggggaagcattttggaggaattgacattgattgcaagtttttaaatatgacctggattagattatgagatgatgggtgcttgggggtaggggtgtacctgcccgggcggccggccaccgcggtgga

SEQ ID NO: 20806 - DNA, 2506 bp, Homo sapiens; identical to SEQ ID NO: 20323
  misc_feature 2503, 2504, 2505, 2506: n = A,T,C or G

SEQ ID NO: 20807 - DNA, 396 bp, Homo sapiens; identical to SEQ ID NO: 20429
  misc_feature 395, 396: n = A,T,C or G

SEQ ID NO: 20808 - DNA, 394 bp, Homo sapiens
  misc_feature 1, 2, 3: n = A,T,C or G
nnnattctcttttggttgctataattctgtggtataatatgaagtcagaaaatataattcctccagttttatttatttattcatttttgcttaggatagtattatttcttatagtgaaagcattctatgttatttattattagtctaattttgtagttttacaatgctatcctcttttacaaagctatgatcaactcagtgcgtccagatcaggatcatttgtagctatttgcaaaagtagcaatattctggctgggcatggtggctcatgcttatattcccagcactttgggaggccaagacaggcggatcacctgaggtcataggttcaagaccggcctggtcaacatggtgaaaccctgtctccaattaaaatacaaaaattagccgggga

SEQ ID NO: 20809 - DNA, 572 bp, Homo sapiens; identical to SEQ ID NO: 20583
  misc_feature 571, 572: n = A,T,C or G

SEQ ID NO: 20810 - DNA, 633 bp, Homo sapiens
acattgtgacaatttgatacatgcatacattgtgaaatgatcaaatcaggttcattaatatattcatcacctaatatatttgtcatttatttttggtgagagcatttgaaatccactattttatgacatcagtaagataacctaactagaagctcccaatactcaccaccaccctcccaaagatagccaaaacaataagtaagcaactacatttagaagaaaataactaagggaggatgttagaatacattaaaggtgtattagaaactctgtagtgtgcagaaacccaagatggccacatagacaacagaaggaaacacctcacctccaccaccctatccctacatcaggatcagttggaaccagggggaaattctccttgcagggaaaaggtaaggaagaggaccacagcagcccccatcaccaccttaggcacctacagtcctcacctctggtgacccctgcagttctcacaggcactaagcccagctgagggaactccctggaatccacacagctacactccccacagaggaggagaaaatactcaccactgtgacccacgtggctactgcatttgaaatcagaaacattgttggaatgtgtcctgttctggggataggtagccacagt

SEQ ID NO: 20811 - DNA, 830 bp, Homo sapiens; identical to SEQ ID NO: 20532

SEQ ID NO: 20812 - DNA, 671 bp, Homo sapiens
  misc_feature 619, 649, 669, 670, 671: n = A,T,C or G
acaaaaagcaaagaccccttctccatctctggattttaaaaactggaaaaggatgctgagaggattgagccaaagagccagtcctgggacagtcactgtggccagctagtggtgtgctttgtctggccacgctgggtcctgctgctcgctccaaaggggcaacatacttgatttgcagccctggcagaatcatatgattaaagtgtgggagggcggtggtgagggaagtatctccccaaaggaaagaaggggtatggaacaggtaaaattaacagatgtttacaaaattgtcttaattattttccccaaaatgcatagccagttttcccaatcctagtttttctctatttacttaaaatgccatctttattatatatcatatagtaaattatctgtcttttcatttgccagtgccacagtgtcttcatttttttaaagctttaaattaaaaaggaaaaatcagagcttattcaactatctggtcaatggaaatttaacagtgatgcagtagttttagaatgtatacaaatttttccagcctgggcaatatggcgaaaccccatctctgcagaaaatacaaaagatggagaatcacctgagccttgggggtgaggctgangtgaactgagaatgtgcactgcacttcaanctgagcacagaatgagaccnnn

SEQ ID NO: 20813 - DNA, 811 bp, Homo sapiens; identical to SEQ ID NO: 20377
  misc_feature 804, 805, 806, 807, 808, 809, 810, 811: n = A,T,C or G

SEQ ID NO: 20814 - DNA, 387 bp, Homo sapiens; identical to SEQ ID NO: 20586

SEQ ID NO: 20815 - DNA, 604 bp, Homo sapiens; identical to SEQ ID NO: 20360
  misc_feature 596, 604: n = A,T,C or G

SEQ ID NO: 20816 - DNA, 1380 bp, Homo sapiens; identical to SEQ ID NO: 20118
  misc_feature 1380: n = A,T,C or G

SEQ ID NO: 20817 - DNA, 1498 bp, Homo sapiens
  misc_feature 1, 2, 1498: n = A,T,C or G
nngagctagagtcttcctctgtcaccaggctggaatgcagtggtgtgatcagctcactgcaacctccgcgaccctggttcaagtgattctcctgcttcagtctcctgagtaactgtgattacaggcaagcaccaccacacccagctgatttttgtatttttagtagagatggggtttcaccattggacaggatggtctcgatctcctgacctcgtgattccctctgaaagtgctgggattacaggtgtgagccaccacacctggccttattttcatcttttgaaacaatgctatatgaagtcttccttgattctgcatgatctttccccagataaacaggtacctcccttccttgaggctagccttaggacttcactgatttttctactgcatctttaccacctgaactctacattattcctccacatgtctgtcccctctgctccaagactgcaggggagagtcttgcacatcatctttgtaaaaacagtctttgttttactcagaaatttttattgagtcctgctaaatacatgctaggcattagggtttaaaaagaattaaaataaagcatgtcagggatggcttttctagaacacatgcccaagcagagacttaaatattgagactagccagattaaaaggggtagagggcaggaaagggtgacggcatgccacgcagcagcaagagcgggagcgaggcctgaaagagtgaaagtatttgcctacaatagaaggatgagtgagtagggcattaccagcagctcagtaatgccagagaaagggcacacagggaaaagggctaaagatggagagtggggcagaagtcagattatgaaagccttatgtgtaattttaagatgcttggacattaatgttcaagagtggtccctggtcctatctgcatttagatatagatcactttaaatgccaaaaccaatattcctagtgaaccattattcattaagacaaggtgacagatagctcatgtggacacagctgagatgatactatgtagcaaattctcaataattctcatgaacacttggaaagtcaattctataataaagtcatacaaattataataaatcacttaatatttggtttgggaaggtgctttgtaaagttatagtgcatatgaatataactaatagttgtgaattcagagctgtgacaataaagcaaagaaaccacattgtgtttgagtcagcaatctttagatttctatccagtcttcctacccagtccataaattctaagtataatcctggtactcgctctcaagtttaagttaaatgctagcctatacaaaaaacactctttctcttactcttttttgttatttttatgttactttgtttaaaggaagaacacaaaaatgccctgctaaagggattctgtttggctgcaggctgcaagaggggaaaaacacaaagcacattttgcagaaaatgattttttagaagtcagaactatgacatgaagtcaagcagggcan

SEQ ID NO: 20818 - DNA, 404 bp, Homo sapiens; identical to SEQ ID NO: 20663
  misc_feature 404: n = A,T,C or G

SEQ ID NO: 20819 - DNA, 611 bp, Homo sapiens
  misc_feature 609, 610, 611: n = A,T,C or G
acactttatctgtctctttgcttctttcccaccctctttcccagctctctctctgtctctctcttgtaccctgacccttttttcttcctatgcatacttttttctttccctttttaatctctatatcttaatcctaccaatggccctctgagaatttattagccatgatagggattcttaggcctgagatttcttatcaaaaaatatttttaaagcattaaccgtgtgctgagccctgtgctggatactttacgagattcaaaaataagaccagtctcttctcttcagaagtttccagtagataaaggggtaacatcactataatataggaaagagtatttagtggaggtaaaaactacgaatgttgagagtgttgagagtagggaggagaagatcaggagaatcttcgtgttcccaccagagaaccaacctgaccactccagggtatggtattcaggcatttggcctgaaatgtcttcttctttactctctcccatctgactgtctcctactttagggctcagcttagatgtccccgattccaggaagtcccctaacaccctaaactaggtttgggactttccagtgtctcccatcatgtccagtacnnn

SEQ ID NO: 20820 - DNA, 1108 bp, Homo sapiens; identical to SEQ ID NO: 20121
  misc_feature 1, 2, 1103, 1104, 1105, 1106, 1107, 1108: n = A,T,C or G

SEQ ID NO: 20821 - DNA, 1365 bp, Homo sapiens; identical to SEQ ID NO: 20708
  misc_feature 1348: n = A,T,C or G

SEQ ID NO: 20822 - DNA, 614 bp, Homo sapiens
gggatatgggcagtgattatggcaggtgggataccgcaatgaatgtggcaggtgggatacggcagtgattatgacaggtgggatacagcagtaaatatgacaggtgggatacagcagtgattatggcaggtgggatacggcagtgattatgacaggtgggatacggcagtgattatgacaggtgggatacagcagtaaatatgacaggtgggatacagcagtgattatggcaggtgggatacggcagtgattatggcaggtgggatacggcagtgattatgacaggtgggatacggcagtgattatggcaggtgggatttggcagtgaatatgacaggtgagattcagcatgaatatgacaggtgtggttccagtccacaagagcttgtattgcagttagagggaaacagaaaataaaacaaatcttggaaatctcacatagtgaaaaatgttaaaaataaaaccaaaaggtggcaaaaaaggtgactaagggaatttttttcggtcattatttacttactatttgtgatgaataagcattaattggaagcttaatattgacctctgctttctttttcttcttaaaagaggaaacagtctgatcacttttacta

SEQ ID NO: 20823 - DNA, 375 bp, Homo sapiens; identical to SEQ ID NO: 20552

SEQ ID NO: 20824 - DNA, 5145 bp, Homo sapiens
  misc_feature 1, 5144, 5145: n = A,T,C or G
ncctatagggagtcgccccgcgtccgaaaagattataagtaaatactctgctctttcaagtgaaccaaacctatcaaacctgtttagaaaataaaccaggcagaataaaatgatgcgaaatgttcattttaaaaaacttcaggatgggcacaaacacacagaagtgggaaatgaataaaagagtattgataaatttttgaaaattgttgaagctgagtaatgggctttcagtccagtgtaaagctgttggagcgcgggagcaaaggtaaagaatgatgtaatgcgctggctgctccaaagcatcttttgttgtggaatggttattccagtcatctctttatgaatcaaatgtgaggggctgctttgtggacggagtcctttgcaagagcacatcaacgggaaagagaaagagacattcacttggagggctcttgctgaaaatgggtttaactctccttttgccagtcaccaccagcctgacctcatacacttttagtacaatggagtggctgagcctttgagcacaccaccattacatcatcgtggcaaattaaagaaggaggtgggaaaagaggacttattgttgtcatggcccatgagatgattggaactcaaattgttactgagaggttggtggctctgctggaaagtggaacggaaaaagtgctgctaattgatagccggccatttgtggaatacaatacatcccacattttggaagccattaatatcaactgctccaagcttatgaagcgaaggttgcaacaggacaaagtgttaattacagagctcatccagcattcagcgaaacataaggttgacattgattgcagtcagaaggttgtagtttacgatcaaagctcccaagatgttgcctctctctcttcagactgttttctcactgtacttctgggtaaactggagaagagcttcaactctgttcacctgcttgcaggtgggtttgctgagttctctcgttgtttccctggcctctgtgaaggaaaatccactctagtccctacctgcatttctcagccttgcttacctgttgccaacattgggccaacccgaattcttcccaatctttatcttggctgccagcgagatgtcctcaacaaggagctgatgcagcagaatgggattggttatgtgttaaatgccagcaatacctgtccaaagcctgactttatccccgagtctcatttcctgcgtgtgcctgtgaatgacagcttttgtgagaaaattttgccgtggttggacaaatcagtagatttcattgagaaagcaaaagcctccaatggatgtgttctagtgcactgtttagctgggatctcccgctccgccaccatcgctatcgcctacatcatgaagaggatggacatgtctttagatgaagcttacagatttgtgaaagaaaaaagacctactatatctccaaacttcaattttctgggccaactcctggactatgagaagaagattaagaaccagactggagcatcagggccaaagagcaaactcaagctgctgcacctggagaagccaaatgaacctgtccctgctgtctcagagggtggacagaaaagcgagacgcccctcagtccaccctgtgccgactctgctacctcagaggcagcaggacaaaggcccgtgcatcccgccagcgtgcccagcgtgcccagcgtgcagccgtcgctgttagaggacagcccgctggtacaggcgctcagtgggctgcacctgtccgcagacaggctggaagacagcaataagctcaagcgttccttctctctggatatcaaatcagtttcatattcagccagcatggcagcatccttacatggcttctcctcatcagaagatgctttggaatactacaaaccttccactactctggatgggaccaacaagctatgccagttctcccctgttcaggaactatcggagcagactcccgaaaccagtcctgataaggaggaagccagcatccccaagaagctgcagaccgccaggccttcagacagccagagcaagcgattgcattcggtcagaaccagcagcagtggcaccgcccagaggtcccttttatctccactgcatcgaagtgggagcgtggaggacaattaccacaccagcttccttttcggcctttccaccagccagcagcacctcacgaagtctgctggcctgggccttaagggctggcactcggatatcttggccccccagacctctaccccttccctgaccagcagctggtattttgccacagagtcctcacacttctactctgcctcagccatctacggaggcagtgccagttactctgcctacagctgcagccagctgcccacttgcggagaccaagtctattctgtgcgcaggcggcagaagccaagtgacagagctgactcgcggcggagctggcatgaagagagcccctttgaaaagcagtttaaacgcagaagctgccaaatggaatttggagagagcatcatgtcagagaacaggtcacgggaagagctggggaaagtgggcagtcagtctagcttttcgggcagcatggaaatcattgaggtctcctgagaagaaagacacttgtgacttctatagacaatttttttttcttgttcacaaaaaaattccctgtaaatctgaaatatatatatgtacatacatatatatttttggaaaatggagctatggtgtaaaagcaacaggtggatcaacccagttgttactctcttaacatctgcatttgagagatcagctaatacttctctcaacaaaaatggaagggcagatgctagaatcccccctagacggaggaaaaccattttattcagtgaattacacatcctcttgttcttaaaaaagcaagtgtctttggtgttggaggacaaaatcccctaccattttcacgttgtgctactaagagatctcaaatattagtctttgtccggacccttccatagtacaccttagcgctgagactgagccagcttgggggtcaggtaggtagaccctgttagggacagagcctagtggtaaatccaagagaaatgatcctatccaaagctgattcacaaacccacgctcacctgacagccgagggacacgagcatcactctgctggacggaccattaggggccttgccaaggtctaccttagagcaaacccagtacctcagacaggaaagtcggggctttgaccactaccatatctggtagcccattttctaggcattgtgaataggtaggtagctagtcacacttttcagaccaattcaaactgtctatgcacaaaattcccgtgggcctagatggagataatttttttttcttctcagctttatgaagagaagggaaactgtctaggattcagctgaaccaccaggaacctggcaacatcacgatttaagctaaggttgggaggctaacgagtctacctccctctttgtaaatcaaagaattgtttaaaatgggattgtcaatcctttaaataaagatgaacttggtttcaagccaaatgtgaatttatttgggttggtagcagagcagcagcaccttcaaattctcagccaaagcagatgtttttgccctttctgcttcactgcatggatacagttggtaaaatgtaataatatggcagaattttataggaaacttcctagggaggtaaattatgggaagattaagaaaggtacaaattgctgaggagaagcaggaaacctgtttccttagtggcttttatcccctcggcatgcgatggggctgatgtttctatgattgcctcagactttcacatttactagtagggctgagagaggctttagtgaggaaggaatattcagaataaaacggttgagaaagctgagaagaccattgagttttgatcagttgtgaatagagtgcaaagccatggccaagctgtttttggaaacgctggccggcgtgtcttcagtggaaaaagcaaatcaaaatggagcgagagcaaaggggcgtcctcagtcctcaacctacaatcactgtatggaatcggtcctggcagctgaacataggaggtcactggaacaagtgatagtgcagattggctttcaaacatcctcctggcttgagttttatcagctacagtgtgggtcctcttttgaagccttaattcacaacagcagctttttgggggtggggctgggcgggtgttgtcattgttctttcccttcctgtaagtgtcgctagttgctgcctcgtatctcaggtttttctctgtttttgagaaatggacagttttttgaccaggatgtgacttcatgtttcctatggtgacttctaaaaccagcacagaatgatatgactcaacacagaccgacttggttatggggatgatgagccgcacagacctcactagttgtgcacaaataatgtgctatgatggggtgtaaagtgaaggcagaagagggtcagccgcattgttatgatactgggaaagtgctggtcaacgatttgagttagtttttagatatacattgaaatctttaatcagacattctcaagtttcacacagtagtttttgatgttatgtacacacacaccaaatgtgtaacagttcaccacttccagagtgtggtcatgcccaaaacatgtttaagaaaggaaagcagtagctccttgctaacgatgtttcaggaggtttggggcacttggttttaatgagcttctgtcatttagggcttctcttggccatggtccccttccttctggaactgtgatgtagtcacatcctacagcctttagtgctggttcactagtgtcagataatcagttcttggaatcgagactgccgtggcgaaggggtggcctcggaggcaggctctggagctgcttggatgtctttaggtggggtggtggctggtctcttcagcatgtaattggggaaaccctcgcgtctactaggtgatacagatggtgattcttcaagagcaaatagactcatgtgagatggtggaaatgattgcgttacagtttacggacagactgcagttttctgaaataggtcttgaaaagcacggtgacgcacggggttccctgagggcgtgtcggtaaggaaaaacgggaaaaaaaaaaagggttttgggaaaaataggtcnn

SEQ ID NO: 20825 - DNA, 421 bp, Homo sapiens; identical to SEQ ID NO: 20662
  misc_feature 1, 2, 3, 4, 5: n = A,T,C or G

SEQ ID NO: 20826 - DNA, 396 bp, Homo sapiens
acgtgaaagcgctttgaagatcacaaacccatttagaaataggtgggttgctcttcctcaaatctttgaaagctgtctactactataaattcattcattcatatctttccctcattcctttcagttttttaaaaatgtattctatccaacttacatgtaagcactttgcaaacactcactcatttactatgaataacaatcctactatattcacaattatcatttccccgctttacagaagaggaaactgaggcacagagattagacagtgtaggcaggattcaaactcaggtggtctggctctactgtccttgctcttaacctaggcccacctacagttatccaggtttctgtttactaatcctcagccatcttcctctgatcagaatcaacata

SEQ ID NO: 20827 - DNA, 1214 bp, Homo sapiens; identical to SEQ ID NO: 20119

SEQ ID NO: 20828 - DNA, 418 bp, Homo sapiens; identical to SEQ ID NO: 20116
  misc_feature 1: n = A,T,C or G

SEQ ID NO: 20829 - DNA, 920 bp, Homo sapiens
  misc_feature 1, 2, 3, 4, 5, 6, 7, 8, 9, 10, 915, 916, 917, 918, 919, 920: n = A,T,C or G
nnnnnnnnnngtttgtggatttgcttccttttggtttcttttaatttgctcctctaagctacagttcctttaaactggatgtgaggcctaaaggtttgattggattttatttttggagggttgcatcaatgctgatcgttcatattgcagcacactaagaaccacattgtgcctgttatcagttttttcctctccattgtgagatatatcttccttagtgcttagaaaataatctagctgtgttaatttttgttttaacgtttgcatgttttcccccaacaatcatacatctaatatatcagttgctaatatttcattattagtactctacggtgtcaataattatttcagtctctgctgcaattagtgctaattacaatacctgagctataaaaataaaagatttcattatagcaaagttcacaaatatcgttttagttcagttatccacattgttcatctaaaataatacattttctttacatataactgtcttagacttgtaattgaggatatttgatgaaacagatctgtatctgaaacagcactatgatgctaaacatttgcataaggaatgaaaaaagttagcaacctagttttttcaatattcagatatttgagattacacagaaaactacatccagatgaatgactgaattattcacttttcttctgagcattttggcattggatagacacagcattcaagtttaatgcattttaggaacaggttcagtttacatatttaacgcacattaaaaaaacacaaagccaaaagaaatttctaatttagaaacatatacatcaaatacatagcattgattactattttaaaataactatagagaaatacaattgttggttctggttgtacctgcccgggcggccgccgaaagggcgaattaccagcacacnnnnnn

SEQ ID NO: 20830 - DNA, 455 bp, Homo sapiens; identical to SEQ ID NO: 20362
  misc_feature 455: n = A,T,C or G

SEQ ID NO: 20831 - DNA, 901 bp, Homo sapiens; identical to SEQ ID NO: 20587
  misc_feature 1, 886, 887, 888, 889, 890, 891, 892, 893, 894, 895, 896,897, 898, 899, 900, 901: n = A,T,C or G

SEQ ID NO: 20832 - DNA, 378 bp, Homo sapiens
ttttcacacaaattggccagatgacatctttactggtatctttgctgttccttccagcaagatctgcagtgtattattgcagagtcagctcgtgaagtatgcacgaactctctctaaactggtgtttttagccaagaaacaaaccacttcattgtaggtgcctgtaaagactgcatcatcccagctactttcctgctgactcccacttgggtttactcaatgggtgacactcacaggacataagagattagaaagagggataaggatttttatatatctgctccctccttacttaaagccatggttttagcagaggcccaaggtcgtggcttttttgagcagcccctttatcaaaggtctggaaagagtcccccgcgt

SEQ ID NO: 20833 - DNA, 611 bp, Homo sapiens; identical to SEQ ID NO: 20819
  misc_feature 609, 610, 611: n = A,T,C or G

SEQ ID NO: 20834 - DNA, 572 bp, Homo sapiens; identical to SEQ ID NO: 20583
  misc_feature 571, 572: n = A,T,C or G

SEQ ID NO: 20835 - DNA, 466 bp, Homo sapiens; identical to SEQ ID NO: 20303
  misc_feature 1, 2, 3, 466: n = A,T,C or G

SEQ ID NO: 20836 - DNA, 469 bp, Homo sapiens
acgcggggggatgcgaactcttttaaactataacatggacactttattggaaccaaactttagttttctacattaatgagaaacactggtaactttgcttcattgaaaaaataattgcttgttctctgtcagatgcacttcgtcttagtaacatggccatggggaagacaaccacaggccagatagtcaatctgctgtccaatgatgtgaacaagtttgatcaggtgacagtgttcttacacttcctgtgggcaggaccactgcaggcgattgcagtgactgccctactctggatggagataggaatatcgtgccttactgggatggcagtttctaatcattctcctgcccttgcaaagctgttttgggaagttgttctcatcactgaggagtaaaactgcaactttcacggatgccaggatcaggaccatgaatgaagttataactggtataaggataataaaaatgt

SEQ ID NO: 20837 - DNA, 731 bp, Homo sapiens
  misc_feature 1, 2, 52, 63: n = A,T,C or G
nnatatgctgcactatgtcaccaatttaatataactataataacagactaanagtgacaaganaatcagatacctataagccctcctgtgattttcattgcttaaatcacttggtaacttggctctttgagtcattatctcagtggttatttcaactgttatcttatttcaaccagataatctctggttcccaagtattatatcaatttcaacagtttagttatactgggatgccctgtaacatcctcaattccacttgaagaattatcctttgctccaacctcttcatcttctgtacctattttataccactcaatgaaatctccacctatccattgttccaagacaaacacactgtctttgttagtttctcatgcaaccttgtgcctcacataaatcaatgagaaacaaactacaacagggacttctgatataatgtgccctaaagaaaatttgtttctggcctgttttaataaaaattaaatagcttccttaaattgtgaatattttccattatagtgatattgtaggaacaccagaatttttttttttttgcccccccccagacagtctcactcttatcgcccaggctggagtgcagtggcactttctcggttcactgcaacctccatgtcccaggctcaagcgattctcctgcctcagcctcccaagtgctgggactacagagtgagactcttgtctcaaaaaagaaaaataaaagaaaaagaaat

SEQ ID NO: 20838 - DNA, 401 bp, Homo sapiens; identical to SEQ ID NO: 20379

SEQ ID NO: 20839 - DNA, 617 bp, Homo sapiens; identical to SEQ ID NO: 20325

SEQ ID NO: 20840 - DNA, 786 bp, Homo sapiens
  misc_feature 783, 784, 785, 786: n = A,T,C or G
acccccgaatctaaaataaaagcagaaattatatgaaaaaactggggtgggagttggaaggaactttagatatgtaataaacttgtttgaaaactgttaatttctcatgctttcattaaaaaataattttcctcaagaaaccccaaattctccacctcaggaatgaaaagtgcatttgaatttcaagaaggtatgggcatgagaaccttgcagttttctaatttgtggagacaaaataatttttataacaccaaccagaggtttcctctacaaaccccttgtaattcctttctgagctctcttccttctagaatcttggggcatctgaaaaactcaaagctatgtaaacacaacatattggttgttggagacaggatagcttcttgtcttctttcccttgtgatatggtttggctgtgtccccatccaactctcaacttgaattgcatcttccaaaattcccacgtgttgtaggagggactcagggggaggtaattgaatcatgggggctggtctttcccctactattctccttataattaataagcctcacaagatctgatgggtttatcaggggtttccgcttttgcttcttcctcattttctcttgctgctgccattttcgcctcccgccacgattctgaggcccccccagctatgtggaactgtaagtccggttaaacctcgttttcttcccagtctcaggtatgtctttatcaagcagcatgaaacggactaatacaccttgttttctcactgtggggttgtaaacatttgtaaatgnnnn

SEQ ID NO: 20841 - DNA, 549 bp, Homo sapiens; identical to SEQ ID NO: 20485
  misc_feature 1, 2, 3: n = A,T,C or G

SEQ ID NO: 20842 - DNA, 675 bp, Homo sapiens; identical to SEQ ID NO: 20117
  misc_feature 645, 672, 673, 674, 675: n = A,T,C or G

SEQ ID NO: 20843 - DNA, 1096 bp, Homo sapiens; identical to SEQ ID NO: 20674
  misc_feature 1, 2, 3, 4, 5, 6, 7: n = A,T,C or G

SEQ ID NO: 20844 - DNA, 387 bp, Homo sapiens; identical to SEQ ID NO: 20626

SEQ ID NO: 20845 - DNA, 460 bp, Homo sapiens
agcctctgcctcctgggtacaggcgattcccctgccctcctgagtagctgggattacaggcgtgccatcacgcctggcttatttgtatttttggtagagatggggtttctccatgttggtcaggttggtctcgggctcccaacctcacgtgatccgcccgcctcagccttccaaggtgctgggattgcaggtgtcagccaccacgcccagccccagaatacaaatttttaacatttagtataattagacagtcatggcattttaaggtcagagcttcttactcaaatgcagctcttttctgtaaggacaataaaatgttaatttttactcagttaacattctaaattagtgttttaaggtcatctcttttacttagaagacagttgttggccaggaaacgtttactgaaccagctttaaaaccgtgctaattcataattaaatgttgtgaccaatatagg

SEQ ID NO: 20846 - DNA, 806 bp, Homo sapiens; identical to SEQ ID NO: 20267
  misc_feature 1: n = A,T,C or G

SEQ ID NO: 20847 - DNA, 809 bp, Homo sapiens
  misc_feature 809: n = A,T,C or G
acggggaggaacagagtccctcctttacttctccattagaaagaatgagatggcaagacaatgaaacaggcaaagtgaacagagatgcaagacaaaattcaggtgagagagccagagcatcactcagccattcctgacatgtaaaacaggcaactagaaatttgcagaaaggaagcgaagtctccataaagatgtttttaaagtgagcttgaagtatttggagacaattcagtgttacataaaatctgcaaatctctggataaagaagcagagatcccagcatgggacaaatggagcctcaaaagtgggaagaagacagagaagaccagggcagaatgcatctcttcctttctcttggctttcctggataaggactgcatcattcctgtggaaggacaggccatcagctccgaaacactgtatgtattttccagtatatactgctagctgtgtgatgttgggaaaatttgttaccctgtctaacccccacttccctcatctgtaaaatggaaataatgatagtacctacctatctcataggtggcaactacaaggggcagcacactcagggaattaaggaagtttcagtgaacatcaactttatgaacacagtgttcataaaggcaggtcagtgcagtggtttgggagccaggagaagcacgtgggccggagtgtgcctgcaggagacaaggtcagagatgttgctaataatggagaataaaggatgcattctcattactgaaaaaaaaaaaaaaaaaaaaaaaaaaaaaaaaaaaaagtcgacgcggccacgaatttagtagtagtan

SEQ ID NO: 20848 - DNA, 658 bp, Homo sapiens
  misc_feature 642, 643, 644, 645, 646, 647, 648, 649, 650, 651, 652, 653,654, 655, 656, 657, 658: n = A,T,C or G
actaacatttgtagagaattttgtagtttacagagcactttttcctcattttattatttgtttttcacaaccatctggtgacattaaagggtagcagagaaatatggggaagtgggtgggggatgagactaatggcagagactgtgtgtgttaggaggagtggttgtcggagatacttaaagggatttgaatgcaacagttcattcatttcattgaacaaattgaaaattcataaatatcctggaaccatcaaaagatttcaggtaaggaagcagcctgttctctttttggatgatcttaacatttttaaacttgagcatctgtatacatgataattttatgagccaagatagaggatgtaggctgggcgcaatggcttacaccagtaatcccagtactttgggatgccgaggtgggcagatcacttgaggccagaagttcaagaccagtctggccaacatggtgaaaccccatctctactaaaaatacaaaaattagccaagtgtggtggctcacgcctgtagtcccagctactggggaggctgaggcaggagaattgcttgaacccgggaggcaaaggttgcagtgagctgagatcgtgccattctactccagcctgggtgacagtgcgagactctgtcnnnnnnnnnnnnnnnnn

SEQ ID NO: 20849 - DNA, 642 bp, Homo sapiens; identical to SEQ ID NO: 20389

SEQ ID NO: 20850 - DNA, 903 bp, Homo sapiens; identical to SEQ ID NO: 20618
  misc_feature 1, 2, 3, 4, 5, 6, 7, 8, 9, 10, 11, 12, 13, 14, 15, 899, 900,901, 902, 903: n = A,T,C or G

SEQ ID NO: 20851 - DNA, 668 bp, Homo sapiens; identical to SEQ ID NO: 20192

SEQ ID NO: 20852 - DNA, 447 bp, Homo sapiens; identical to SEQ ID NO: 20364
  misc_feature 443, 444, 445, 446, 447: n = A,T,C or G

SEQ ID NO: 20853 - DNA, 409 bp, Homo sapiens; identical to SEQ ID NO: 20395
  misc_feature 409: n = A,T,C or G

SEQ ID NO: 20854 - DNA, 377 bp, Homo sapiens; identical to SEQ ID NO: 20681
  misc_feature 1, 2, 3, 377: n = A,T,C or G

SEQ ID NO: 20855 - DNA, 856 bp, Homo sapiens
  misc_feature 779, 810, 856: n = A,T,C or G
acatcccagctgattcagtatctccttctctttgaaaactctcacagaaactgccctataacttctactgacatctcatctcaatggctagatcagtgctatataacaaaactttctgcagtgatagaaatgttctatatctgaactatccaagatgttagctactagccacttatgactgtttagcatttaaaatgtcacttgtggaactgacaaaatcaacttttaattttacttgattttaataaatttaaatttaaatagatacatgtgtctagtggctaccacaataaatagtgcagggctagaccttaatcacatcactaccccatctgcaagaaaagctggaaaatgaaggtttggagctaaacacgttgctaccctccacaaaattatgtttttcttagtaaggaaaaacaaacaaaaatgaatataggctgggcagataacagcctctgcaaccaagggatatttgcttgctaatattccttaagcccagaggaatggagtgctaatgggtttatcataggcatgaaaaatggtgtgtctgggaagatattatgtagttaaaaagcagaatcttggagctggagttcaatccaaatactttctttttacaatgagaaaactgaggctcagagggacaactgagagacctcattaatagagcaataggaaaatctgctctgaaattatacagagctatttagtggcctttataacatcactcatgataaaatgtaaaatctcagaaagaaaatgccctctgcctatggttnttaaaatacaggaaagaaaagctagagattntgatgccacctattggtagacagaagtataaactgccctttcgtan

SEQ ID NO: 20856 - DNA, 398 bp, Homo sapiens
actatggatccactcaaccagaatttctagggtctggataatttgcacattatcaagtctcctgggtgatcttatacaacccaagtttgagaagcatcaatataggtcataaggaattactaagctttaagcagatcaattttgtattttagggtgattattgtaatagcagtgtgaaagcagtgttaatctccccccagtctcttccatacagcctatttataatagcacacacacaaaattctgctatttacctgacaatttttacagcagtgtggaaagtaaaagaggagagtagaaaggtagaaggacaggtagggacagtaaagtgaaatgagaaaggaataaactaaggcagtgattatgagaaaagatggggctaaagtccagagacattt

SEQ ID NO: 20857 - DNA, 1132 bp, Homo sapiens
  misc_feature 1, 2, 3, 1132: n = A,T,C or G
nnncatttaggcttatgacaatcaaaaatgagagaatttaaattttttacaattaagctctggttttgagtagattgtgggttatcacaccgtgcatttttttaatgtacaccttactcaaacacaccctaaaatgcaggcttgcagtctgcgcattgtaaagcaggagcaccgcagatcaattgggggaaaaaaatatttaaggttgtaaatttaattttgttctaggattttcattttcatttatggcacccgttgtgtttgagaacatggaccaatttatggattagttttaaacccccagtctgtcacactcaatgaacaattctaagttggagagaatccatatgaaaggattagaatgtgccacagtggagcttacacatgactgtttcaactaaatattgcccagctgcctctcctgcagtattatttttttttttttgctacttagttaaattgctagtgtctctaatttcacacattgtcagagctttttttattttgtaaatatactgccacaataaatgtatgtgatgtttcatttattcaagatggggtctgataaactgtaggactaggagactaagaagagaagtcaattttgagtagaatgtgcatctttcaaataatattgctgggcccttctttggataccttgtttgactgtactcataaaatagccagagagtgactgttaagaccgtacacacttaatgggttttcaagaagatgggattgttttttcttggccatataatataaatgtataataaatttgctctctttgtaattaaaattaagagacagtagctcagctaggccttttaaatgtctatataacccaacaccaccataagtccagctcaattttttgtgacctgtttttctcatgggctagctcaaagattttttttttttaaggcagcagcaagatgaggttttaaaaaggctttgttagggcaattagacattttcatttttcaagctgattatagcatttatcacttacattggaaatttagtatttgcattttgcctttaccgcttaaaatgttacccaacaaaatggtcaccacacaagttgattcacaagggtgtgtttgcacatttctccagttttttgattaan

SEQ ID NO: 20858 - DNA, 515 bp, Homo sapiens; identical to SEQ ID NO: 20177

SEQ ID NO: 20859 - DNA, 418 bp, Homo sapiens
  misc_feature 418: n = A,T,C or G
acattttcttttgggtagtttttcttaaatatggagttttagattgcattttaaaaattgcctattgttactacattcctaagctctttcaatatctcaaggatactgatacacctatggaatcccttgatattctccttgcagattcgcccctcctgttagctcctctctttccctatgttgccctcctggcttttacgagactgattgctttccacatcactgcacagtggacattctggcattgactttcattgtcatcctgcgttggagaccatatatctctttttttcttagttaattccctcattttgcttatcacactgtcagtaactttgtataaaaggacaaattaaggttaaaattttttggagtttttttttttggccccagcttttctatatatatttttttcatn

SEQ ID NO: 20860 - DNA, 642 bp, Homo sapiens; identical to SEQ ID NO: 20389

SEQ ID NO: 20861 - DNA, 398 bp, Homo sapiens; identical to SEQ ID NO: 20856

SEQ ID NO: 20862 - DNA, 727 bp, Homo sapiens; identical to SEQ ID NO: 20324

SEQ ID NO: 20863 - DNA, 601 bp, Homo sapiens; identical to SEQ ID NO: 20756

SEQ ID NO: 20864 - DNA, 512 bp, Homo sapiens; identical to SEQ ID NO: 20569
  misc_feature 511, 512: n = A,T,C or G

SEQ ID NO: 20865 - DNA, 418 bp, Homo sapiens; identical to SEQ ID NO: 20859
  misc_feature 418: n = A,T,C or G

SEQ ID NO: 20866 - DNA, 396 bp, Homo sapiens; identical to SEQ ID NO: 20585

SEQ ID NO: 20867 - DNA, 406 bp, Homo sapiens; identical to SEQ ID NO: 20412
  misc_feature 400, 401, 402, 403, 404, 405, 406: n = A,T,C or G

SEQ ID NO: 20868 - DNA, 1189 bp, Homo sapiens; identical to SEQ ID NO: 20185
  misc_feature 1179, 1180, 1181, 1182, 1183, 1184, 1185, 1186, 1187, 1188,1189: n = A,T,C or G

SEQ ID NO: 20869 - DNA, 2184 bp, Homo sapiens
agggagtcgacccacgcgtccgcaagtttttggctcgggcggctgagaagaccgcgcggggctggagacaggtagcagtacgggggcggggcttcatgccggatgtgatagtctgcagtcgtttcggttggcagcctggcgggtgggagatgcggcggccacctgctgcaaagaaccgaagggaaggttagaagtacgaaggcagtttggagctggggctaagcagctgtcgcacggtcagatcatgggctccaccaagcactggggcgaatggctcctgaacttgaaggtggctccagccggcgtctttggtgtggcctttctagccagagtcgccctggttttctatggcgtcttccaggaccggaccctgcacgtgaggtatacggacatcgactaccaggtcttcaccgacgccgcgcgtttcgtcacggaggggcgctcgccttacctgagagccacgtaccgttacaccccgctgctgggttggctcctcactcccaacatctacctcagcgagctctttggaaagtttctcttcatcagctgcgacctcctcaccgctttcctcttataccgcctgctgctgctgaaggggctggggcgccgccaggcttgtggctactgtgtcttttggcttcttaaccccctgcctatggcagtatccagccgcggtaatgcggactctattgtcgcctccctggtcctgatggtcctctacttgataaagaaaagactcgtcgcgtgtgcagctgtattctatggtttcgcggtgcatatgaagatatatccagtgacttacatccttcccataaccctccacctgcttccagatcgcgacaatgacaaaagcctccgtcaattccggtacactttccaggcttgtttgtacgagctcctgaaaaggctgtgtaatcgggctgtgctgctgtttgtagcagttgctggactcacgttttttgccctgagctttggtttttactatgagtacggctgggaatttttggaacacacctacttttatcacctgactaggcgggatatccgtcacaacttttctccgtacttctacatgctgtatttgactgcagagagcaagtggagtttttccctgggaattgctgcattcctgccacagctcatcttgctttcagctgtgtctttcgcctattacagagacctcgttttttgttgttttcttcatacgtccatttttgtgacttttaacaaagtctgcacctcccagtactttctttggtacctctgcttactgcctcttgtgatgccactagtcagaatgccttggaaaagagctgtagttctcctaatgttatggttaatagggcaggccatgtggctggctcctgcctatgttctagagtttcaaggaaagaacacctttctgtttatttggttagctggtttgttctttcttcttatcaattgttccatcctgattcaaattatttcccattacaaagaagaacccctgacagagagaatcaaatatgactagtgtatgttccacaccctctgctactgtgttacattctgattgtcttgtatggaccagaagagagctttgggacattttttctgaacattctaagcattctagtgaaagttcccatgttccaacagaacttaaaagcaatgtttgccttatatataaaagggacacaataattgaggtccaccttctaggaaatcctaggactcgtttatttgggacatggtgggaataaaggtcacatattggaaaatggaaaggctgatgaaactatcagatactaaaacattcttaaaatagaggaatatagttagagacatcaggtttaagccagtatttgttcctgttttacaatgcttctgtcttaagctgtgtcttaacttttaacacccatcttttctttctaaagctttcctgacagctgtgaaaatccaaaaaatattcttaaactgtgtatggtggcccttgcctgtagtctcagcactttgggaggctgaggtgggagggtcgcttgagttcaggagttctagacccacctggggcaagatggtgagacctagtctcaaaaaaaaaaaaaaaaattagccaggtgttgtggtgcacccctgtagtcatagctgcatgggaggctgaggtgggagaattgcttgagcccagagcaagaccctgtctca

SEQ ID NO: 20870 - DNA, 466 bp, Homo sapiens
acacaagtagaactgttaaaaccgtgtggcttccaactgctctaataactttaagattcacagtcttcaactttcttacagtggaagccatgggggcattgtcctgttgccttctctctcattcctcattaatgagaaagatgttaagctcactgacgtaagtcccagtgaagtcttctccagaactcagaagggccataaatagagagacaaagggcaggaggtgggagttattcaccagcgtggaggaagcaggataagcccagaggaatggcctctggaattatacaaagaatttggaggcgactggggtgtggccctgggaacaaaagtgaaactgtcagaactcagataacagtccacgttcctgagattggattgtagcagcccttctggaaaaggagcacttcttgggactttatacaaatccagccgggtcccccacacactgcctcacaaaccctgt

SEQ ID NO: 20871 - DNA, 593 bp, Homo sapiens; identical to SEQ ID NO: 20493
  misc_feature 1, 589, 590, 591, 592, 593: n = A,T,C or G

SEQ ID NO: 20872 - DNA, 3351 bp, Homo sapiens
  misc_feature 1, 3351: n = A,T,C or G
nacgaggccagccaagcaatgctcccatcttcatcaattccacctgtgccttcatatagggatctgggttcgtctctgcagctgcctacccctgccccatgtgtcccccgttacctgtcctcagagcctcaggtatggtccaggctctgacgaaagtcagggttgctgtgtgggaacccctctgcctggcacctggataccctgggccaggtaacctgagggcaggggagaggtggggtggcagacacgcagaagtgctactagtgacagggctgccatcgctcacctgtacctatttacacccagaactttccagctccccctcatcatgcctcctccttcctacctgcctcccctctgctggtgcacctcgcccaactcattcttactgcacagttcactttatttaacaattttcatgtcccccacctcatgttttcaccttttctgggccaggcatagattaagtaactgggaacgccccctctttataaagctgggcttctttctcatctctctcccaaatgttgtatctcagtattcttcctattcgagtctccagggggtggctggacctacctggtcatttgaaacaggcccccaagctggagtttttaatctggactctctggcttgctgtgacccctaaggcaatgcttctcttccctggattccttagtgtgggtcacagtactgtgttcttagttgctttagctcttaaaacatacgaagtgttgcctaaactgaaaatatttatcttttatttaaaatcagatttttgtttttagactgtcttagatctggggctattacgaatcacttcttcttcagtaaactttgactcaacttctcctgctgtaaagaagctcgctccagatgtctgcatgggtcctcggcactcttggctgaggactcaaaggttttaatcaggatcgtctaaaaatgtacctcggtgaggaggcacagattttgcctcctgttgaccagcctggtttcataccgaaaagacattgaaggactgcagaaatgtatgggtgcaccgggccgagggaagggtggctgagtgagaggcgtataaaatggggctgtgtgcatgcaggcccatgtttcagcctcagcccacgccaggtgaaaggatcagcaatgctctgttgccatcgtgctgggacgacaccagctctattgccaccgatgagtagctgaggtcagtgtgcacagagtttgaaattaagttaatagactttacagcagctggtctgacactacgcgcagtgctcggttgtttacaatcagtggggaaaagggcagaaccagtgcccggccccacactgcctctgtggcctggactttgaaaggaacccactgaacactaattatgagccctgtctttcccccagaatgcctccctgggtttcacaaacagccttgaggttggccctcctcaaggtcagccttcagatttgggagcaaacttcagagaaggcagaggaagatacattgccttgctgtgggctgcctcttctttcctcttggtgtgcgaagtatttcagaaggccattgatgaattccccctctttagctgtgtatttgtgcacgtgtgtgtgtacgtgcgtgtgtgtgtgtgttcctgtgtaagtaacagaccagactccttttctcttctgtcccgtcaccaggctcttgcttcactgcagatacagttcactctgaaagctggttgaaggagagcagcaaaaatgtatcaggggttttgcttctgtgtttcgccaaagctcataagggctgtgacccacccatatggccccagttttttctgtctcttctgttccaaagccaggagagctgacttccaggtgaagggatgggaaaagtggactctcattgtagtgactcccaacctacctaataatttgttaacttaggaatatgctatcattgttgacttgttcttccttaggagaaggacgattttcacccaccctttctgttctatggtggactcttaacaggtgctatgtgaccaggaatctagccgggagtagcagaggccctgtcttctgaagtctcaggcttagaagttaccaaagtgggctcagaaactgtcatctcctggttccaagttcgggctctggcagcccagccgctatcttagctgtctttcccagcggtgctaagagtggtctcagtgagaaggtagatgccaactggagggccagacctgtgtcctgcccatgtcctccttggtggacgtttctgtttactcagagctgctagagaccatcctgcccatccgagttctgagattgggactgtgatgttgggacctgaggactggatggtagaatactggggtcccccagctcttagcaggatgcaggctattgcttccacacccctggccgtgagaacgtggtatgtaggagagttggctgtagctttaggatttctggaagccaatttggcatggcctatttgatctctggcttgtgctcctgctacactgacagactgattgcgtggctctttcagaagacccaggaagggcagctccagccagaggaccttcctggctatgcaggtgcacagctcttaggcatcaagcaaagggtcagccagtcagtagtagtgggaggaagcccttcctcctcttatgcaagcagctcgcagccagcccagaatctcttatgcagcccaaagggcttcttgaggtagagagccctccccagtgtcttcccaggataagtagaaatatgatcacagagcaacggagcaaaggctttcgggagtgtgaggctgcatctgctggagcaaagggaaaccgtgggcttttccggccagatactcttgagctctgtgaccctgctcctgtcaccccaatttctccaagccagaggtagctttctcagagccccttggtggttctgtcctccaaatgctgctgttgggagcgggcttccagctctcagtgggcagtgcacctccttcctaaatgcaggcacttgctaggaagagtgtgagctgggcgtcttctgttcacctgctagcagtttgtcacatttcaccaagtgggattattaatggttgtgctgctgtccagctggtaagatccccttatctggacaagccctggtaaatattgggttgactgtttggctcatttaccttcaggccggcaattcatctttctctggggcaaataatggggggggtcatggcacggttattccccgaatagtttcgggctaggggggtccagtctaaaaccggtcttcccacattttttgagccccaaatctggaaggcgctctgggggaacgtggggtcctccgcgggatggagaaccgggccaan

SEQ ID NO: 20873 - DNA, 741 bp, Homo sapiens; identical to SEQ ID NO: 20131

SEQ ID NO: 20874 - DNA, 1648 bp, Homo sapiens
  misc_feature 1, 2: n = A,T,C or G
nngacaagtatagttaattttatatggctttaaaagcaagcaatattcatatctacagacgtactcttcacttactggtggacttatgatcgccgccaccatatataaatatatatatatatagcaaacagccttgcggaaatcatcggccagaaaagctgcgagggcgtatgctaatggtcgttataccgtaccatgttatgccaccatgtgggtgagggtgagcagggatgattgaacgtgcatagcgatatttcaaacttctgttatacactggcagtgtgtccctaatgagaagctgaccagattatgcattctacctgttctcatagcacgaagtactcgaccaaaaagccaaatttcccctgttggagtatggtgacttagtgtagtctgtggctgacctacgaaatgacacagagttatcaagagtttcccttcctagaagatgaatgtaaccttttgtgttaggacggtagagaagataacaaatagcttgtgcttgccctagaaatgtgctaattactcttaacaagcgcaatgacattcaagagcctgtcctggagaactggaaatgtcaggatcactggttcaggttgtttatacctttagtgaattccctcaggtacaggtggtgacgtagggaggttcacctggaattgaaactttaagggaggtgaaacctttcggatgttgcctgcacttttcttatctgtgccgtttagttttcctgctgcaaatagccggaggcgcctccagaatctcgggtgggggacaggacgacggggcacaaagggggaaacgtttgaaaaataggtcaccctggcagaattgaaggcacaacagaggggtgcccagggacccacattgcccgaggattcacagttatcctgcatcagaccattagatttctttagtgctatgattataatagggatttttgaatcaccaaaaacagtttttagatgtttatgttctttgttttactatcaatgttgtgctggttaagggagagaaaagttcaagaagatcttacatatttgaaaggaaattggtactcttgaaggctatgcaacatgagtctttgaacaagaattccttgctactttgattcattcatcaaatactgagtgcctgtgtgccaggcacaggtgaactctggggattcaggggtaactaaaacagattggaaccctgcccttgtgaagctttcagtctagaagggagacgtgaaacaaattttagcttcaaaagcaacatctatttttgcctgttagcatgcatttattttaaaagtcatattagagttacctggttccgcttcagagcagactgggaaaatcaggcttacaatggaatcagatgctgtgggcctaaaacagctctttaaaaatctatttttttaggccaggtgcgttggctcacacctgtaatcccagcactttgggaggccaaggtgggtggatatgaggtcaggaggtcgagaccagcctggccaatatgatgaaaccttacctctactaaaaataaaaaattagccgggcatggtggcacatgcctgtagtcccagctactcgggaaactgaggcagaagaatcgcttgaacccgggaggcggaggttgcagtgagccgggatcacgtcactgt

SEQ ID NO: 20875 - DNA, 479 bp, Homo sapiens; identical to SEQ ID NO: 20337
  misc_feature 478, 479: n = A,T,C or G

SEQ ID NO: 20876 - DNA, 546 bp, Homo sapiens; identical to SEQ ID NO: 20461
  misc_feature 546: n = A,T,C or G

SEQ ID NO: 20877 - DNA, 628 bp, Homo sapiens
  misc_feature 1, 2, 3, 4, 5, 6, 7, 8, 9, 10, 11, 12: n = A,T,C or G
nnnnnnnnnnnnatgctggtgctgcaggttcagggaacacacattgagccagtgcactaagccctgctgcctcttttgggtaatctgtgcccatgtttctgagcatcaggaaaagtgcttaattcctgtgactccatcttacaaatgacgaagtcttttgctagaatcctacggtaaggcttcttgtggcctgttggttaccattcatttttcatatatttatttttcagctggcaagcagatgaattaactcccccaagcttctacctgtgtttctactcagtgggagagatttggagtggatcatgagggtcaaccacgcagtgtctacaatgctccctacatgcatggttcacagacgtaccatgagttgttccggggctggaggaataacggttgtattaaatgtgttaaagtaacactaattgctgtgcgatgtagctccttcgtgggagattttcaatgggtgtatgtgtgtatgttctgagcaggggttgtaaaagcaaatcacaacagggactaggcagatacgtgaatagcctttttctctccagtgtttaatgatgtacagtttcaggcatatggaaaaaaccaggaagccttgtacgtcggccgccaccgcggtgga

SEQ ID NO: 20878 - DNA, 396 bp, Homo sapiens; identical to SEQ ID NO: 20826

SEQ ID NO: 20879 - DNA, 415 bp, Homo sapiens
  misc_feature 1, 2, 3, 4, 5, 6, 7, 415: n = A,T,C or G
nnnnnnnggtggcggccgaggtaccaataattttatgccctcatcgagttgcttttattgattttttattgatttattcaatcaatcaatcaacatgtttattaagtgcttattgtgttaaaggcaatgagtggaagtagctgaaaaatacccttagacatatttgaactgccttgggccacattctatctcttgactgtcgtgggttctcaaaggtatggcatgtttctcataatgaagttaagtagattaagggatttctgttacagttaacttttagccttcagaagatttgactatgattaaatgggtgagcagtataaattctggaaggcagaactgcatagtaaagaataaaaactctggtatcagagacaactgggtttgagtcctcggtttgctatttggatgtaan

SEQ ID NO: 20880 - DNA, 556 bp, Homo sapiens; identical to SEQ ID NO: 20162
  misc_feature 555, 556: n = A,T,C or G

SEQ ID NO: 20881 - DNA, 387 bp, Homo sapiens; identical to SEQ ID NO: 20626

SEQ ID NO: 20882 - DNA, 1189 bp, Homo sapiens; identical to SEQ ID NO: 20185
  misc_feature 1179, 1180, 1181, 1182, 1183, 1184, 1185, 1186, 1187, 1188,1189: n = A,T,C or G

SEQ ID NO: 20883 - DNA, 741 bp, Homo sapiens; identical to SEQ ID NO: 20131

SEQ ID NO: 20884 - DNA, 668 bp, Homo sapiens; identical to SEQ ID NO: 20192

SEQ ID NO: 20885 - DNA, 2315 bp, Homo sapiens
  misc_feature 1, 2, 2313, 2314, 2315: n = A,T,C or G
nnagcgtccgcggtcgcgtgggcggacgcgtgggcggacgcgtgggcggacctgtcagtgttcaatatttaacaaactccagttaaacaggtaagaggtcagcagtagcttataggccttggttctattatccatgtgcccaactgcagccatcgtgggctggtgttaaaattttcctttcaattgtcatttttctaataattgcaatcagtgagaggagaagaaaaagttcaagggaatgacctgacctttcaccatcctacacaggagatgactgatgacatggattcatacactaatgtatatcgtatattctccaaagaccctcaaaaatcacaagaagttttgaaaaattctgagatcataaactggaaacagaaactccaaatccaaggtaacaagtctgaagaaatgggcaagcagctgtgcttctcaaattgtgtcttcaactaacagcattagcatcacctgagagctcattagaaatgtaaattcatagaaactctctgagctgggagaggtggagcaatctgtggtgtgccaaggactatagctgattgtggtgtaaactcaactttgaaaactactaagcactgaggtattaatcaggtgggagcaatgtaagtagagaactgcatgtctgacaatattgctttcttggctttctctcaggttttcaagaaagtttaggtgaggggataagagcagctgcattttcaaattcagtgaaggtagagcattcgagagcactcctctttgttacggaagatatcctgaagctctatgccaccaataaaagcaagcttggaagctgggctgagacaggccacccagatgacgaatttgaaagtgaaactcccaactttaagtatgcccagctggatgtctcttattctgggctggtaaatgacaactggaagcgagggaagaatgagaggagcctgcattacatcaagcgctgcatagaagacctgccagcagcctgtatgctcggcccagagggagtcccggtctcatgggtaaccatggacccttcttgtgaagtaggaatggcctacagcatggaaaaataccgaaggacaggcaacatggcacgagtgatggtgcgatacatgaaatatctgcgtcagaagaatattccattttacatctctgtgttggaagaaaatgaagactcccgcagatttgtggggcagtttggtttctttgaggcctcctgtgagtggcaccaatggacttgctacccacagaatctagttccattttagacaatgaagctgcttagtaatctctgccaagccatctcttaatattaaagcagacaccacagaatagatttcttcacttacaaatgcatattgggcacttataatacagcaggaactcttctcacctggagccttgatgttaaaagacacagccatgctcttgaggagcttacaatcctggctggaggcaggggagggtatattctttaaatatgcttaagtgttatagggaaagacggggttaccagtaaacatgtaactagaaagccaggctcagttcttacctctgggaatcagaactctttatgcaacttggttaatagaatctactatctggaagataaatgaaggattttaataaaattttcaatagaataaacctaatctgtatggatactttatcaaaaatgaatgtccctgctatttctggatttatgaggcaatggtacactaaagaatggaatcagttcagtgagtagaaaggtatccaaggtgaagcctgagacgaatggctttcccaggctaccttccatcactgttgtacagaaaagaaatccagagaatcaaatggactggccttgggggtctctgctatggaaatgccattttttgtgtctcctttctcctactctttctcacatcctcttcatgattgaagcatggcacaaggcaaggtgttgcctgcgagtctggttgtaagttcagcctttggtgtttgcactactgctatcataaggggtcagggacattccggggagaagtgaccactaaggtgaggattagagagtgagtagaagtgagccagacaaaaaaagcagaaaatgcagatgatggaaaggacatgtgccatgcactatcataagaacttcctaactgaacactgatactacaattctgaatccctgatcttaaaaaataattatacttcaccaacaaaacttggcctcttttggttccactctgccaccctgccattggaacttggattactgtgaacattgcagctatagcaaaataaaaaataaaaaaaataaataattggcannn

SEQ ID NO: 20886 - DNA, 447 bp, Homo sapiens; identical to SEQ ID NO: 20364
  misc_feature 443, 444, 445, 446, 447: n = A,T,C or G

SEQ ID NO: 20887 - DNA, 1380 bp, Homo sapiens; identical to SEQ ID NO: 20118
  misc_feature 1380: n = A,T,C or G

SEQ ID NO: 20888 - DNA, 1189 bp, Homo sapiens; identical to SEQ ID NO: 20185
  misc_feature 1179, 1180, 1181, 1182, 1183, 1184, 1185, 1186, 1187, 1188,1189: n = A,T,C or G

SEQ ID NO: 20889 - DNA, 924 bp, Homo sapiens
  misc_feature 1, 924: n = A,T,C or G
ncgttcgcgtacgcgtacgaaccctgcttcctgttgtatacaaaatgccaagtgctgacgagatgatgcgcacatgttcatgtaattctggaggcacatctgtgttttggaaatccttccagagactttcgcactttctataagtacactctacaaggggaagtggggcactaatggactgggagggcaggtcaggagtagcccaaggtatgcatgtgcaagaggaaaacttgataaactcaagtttatcaagaaattgttgatttcttgttcaactgttgatttgaaccaggcttctggttcaaagggccaggccatagctacagctgctctggtgggccaaaccaaaagcatcactgagtttgggcacttgaagtttcagacagctgggagtctccatagaaccggaagggaaaacacttccaaggatatgagcatgtcttgtccctgcctttgggccacccatgcacaccagctccacagcagctgaagcagagcagatccagaggaggctgtcggagggaccactgtccttcctgctgaattcatactgaccctctggattctccagattttctccaaagttcttccattctagcctggccaaacatttgggctcagcaaactgagacaagctccccacccatggcgacacttcctatgtccatagtgtgaatgtagtaatgggatatatgtcttggaacccccaagcatatgtcacgtgcaaaacaccgtgggaagcagtgggggtgtggtaaagagatgggctggaaaggctctttgtcctcaataagctggccatctgatggggagatagaggagtgaagcgagtccgaactaataggcatgtgtatttggaggcaacaaggaagagagaaccattctgactgggagctccctggaggaggtagcggacatttgacn

SEQ ID NO: 20890 - DNA, 350 bp, Homo sapiens
  misc_feature 218, 219, 220, 221, 222, 223, 224, 225, 226, 227, 228, 229,230, 231, 232, 233, 234, 235, 236, 237, 238, 239, 240, 241,242, 243, 244, 245, 246, 247, 248, 249, 250, 251, 252, 253,254, 255, 350: n = A,T,C or G
acagaggagaaaaataataataacagtaatacctgacaggttgggagagattgtgctggtgtcacagagtctgtgacggcacttgtaagggagtgctgcataaatgagagtggctgctgttgttgcattattatttgttttacatggttataaaactttcctcaagccccgtttgaaaagagaaatcagtagttggcaaacaaattcgaagaacaatnnnnnnnnnnnnnnnnnnnnnnnnnnnnnnnnnnnnnncagtcttgctctaaaatgcagtggcgggatcctggctcactgtaacctcacccttctggattcaaatggttctcctgtcttaaccttctgagtan

SEQ ID NO: 20891 - DNA, 396 bp, Homo sapiens; identical to SEQ ID NO: 20480

SEQ ID NO: 20892 - DNA, 656 bp, Homo sapiens; identical to SEQ ID NO: 20451

SEQ ID NO: 20893 - DNA, 1108 bp, Homo sapiens; identical to SEQ ID NO: 20121
  misc_feature 1, 2, 1103, 1104, 1105, 1106, 1107, 1108: n = A,T,C or G

SEQ ID NO: 20894 - DNA, 675 bp, Homo sapiens
  misc_feature 675: n = A,T,C or G
actagacaacagctgtttccctggtgtatgatggagccaacaccagtcaggggtatattattacatctgattttccccccggataaggtagccaattctcgggtaaccaaccatccccaagtctccgtgcttatataggcactattttcttgctccactagatggttttcatactggctcacactgacccatcatgggtctgttaggagatctcctgccttatggtcactcaggaacttcactctgaccaaggagccaccaccctgaatatcatgggtcacttcgtgctgtgatcccagctacttggaggccgaaatgagaacggatcacttgagctccagagtcaaggctgcagtgaccacagatggcccagtgcactccagcactggcctgcagaaacgagacgcctcaagggactgaggccgctctctctgtgagattgctgatatagcaactgggacttggcctctgtattcttcttggactgacttgacgttctcactttcctgtttctcctgggaacactcgtaaggaatggctcagtgaatttccttctcaagcctcggcatatggtgtggcgtggtcctggacctgtttgcactcagatccatccttctgctctgccttgttctggggtgaagaagttgatcctcggcagggtgactttttcaggcn

SEQ ID NO: 20895 - DNA, 779 bp, Homo sapiens; identical to SEQ ID NO: 20149
  misc_feature 1: n = A,T,C or G

SEQ ID NO: 20896 - DNA, 363 bp, Homo sapiens; identical to SEQ ID NO: 20782

SEQ ID NO: 20897 - DNA, 466 bp, Homo sapiens; identical to SEQ ID NO: 20303
  misc_feature 1, 2, 3, 466: n = A,T,C or G

SEQ ID NO: 20898 - DNA, 466 bp, Homo sapiens; identical to SEQ ID NO: 20303
  misc_feature 1, 2, 3, 466: n = A,T,C or G

SEQ ID NO: 20899 - DNA, 447 bp, Homo sapiens; identical to SEQ ID NO: 20364
  misc_feature 443, 444, 445, 446, 447: n = A,T,C or G

SEQ ID NO: 20900 - DNA, 440 bp, Homo sapiens
  misc_feature 435, 436, 437, 438, 439, 440: n = A,T,C or G
actcaaggagagagtttcaggagtgcagccatcaacactcaagattccatgaaactttcagcctaactgatggtcccactgattactcactcagaacaaaacatatttcaccaaatatcactttcaggacttcattcctgatccttctggggtagaaggtgcaaaaacctggtttgtattagagacattaggaatatttcaataaggccaacagatttccatgctgaagggcacaagaaatggaagagctaatcccattccctttggagttcagtttagatagtttaattgtcataatcctatttgttaaacaggtttccttccctaaatccatagtatacccttgttttttaaatcccatgtgtcaagtaagaacccaaaggagccttgctttcagctttaaaataagcaataaccaggcacgcctggatgcannnnnn

SEQ ID NO: 20901 - DNA, 405 bp, Homo sapiens; identical to SEQ ID NO: 20693
  misc_feature 403, 404, 405: n = A,T,C or G

SEQ ID NO: 20902 - DNA, 588 bp, Homo sapiens; identical to SEQ ID NO: 20604

SEQ ID NO: 20903 - DNA, 424 bp, Homo sapiens; identical to SEQ ID NO: 20414
  misc_feature 421, 422, 423, 424: n = A,T,C or G

SEQ ID NO: 20904 - DNA, 588 bp, Homo sapiens; identical to SEQ ID NO: 20604

SEQ ID NO: 20905 - DNA, 466 bp, Homo sapiens; identical to SEQ ID NO: 20303
  misc_feature 1, 2, 3, 466: n = A,T,C or G

SEQ ID NO: 20906 - DNA, 405 bp, Homo sapiens
tttacacagtttaataaaactttaattaaggctctgcaatagtgtaaactgatcatgtcaagcaactaaacacttgcttaatattaaaatctattcaagcttcactaatgctaaagttaaccagacatttcataattcatccaagggaaaatgtcattcgaatcaataaaaacataaaatttatcctcttatttcactaaacttttttttagaagcaagcatttgaaatagagatggaaatatcttaaattggaaaaaaaaggaaacaactttgttgctaaagagcttcctttttgaaattaggcacttatatttcaatacgaacattttgcgatcaaataatttttgggcttagaaacattttacaagaaaacagtttctccttaaaattgatcaattaactgt

SEQ ID NO: 20907 - DNA, 538 bp, Homo sapiens; identical to SEQ ID NO: 20391
  misc_feature 1, 2, 3, 4, 5, 6, 7, 8, 9, 10, 11, 12, 13, 536, 537, 538: n = A,T,C or G

SEQ ID NO: 20908 - DNA, 1076 bp, Homo sapiens; identical to SEQ ID NO: 20090
  misc_feature 1, 2, 3, 4, 5, 6, 7, 8, 9, 10, 11, 12, 13, 14, 15, 16, 17: n = A,T,C or G

SEQ ID NO: 20909 - DNA, 362 bp, Homo sapiens; identical to SEQ ID NO: 20639
  misc_feature 362: n = A,T,C or G

SEQ ID NO: 20910 - DNA, 1189 bp, Homo sapiens; identical to SEQ ID NO: 20185
  misc_feature 1179, 1180, 1181, 1182, 1183, 1184, 1185, 1186, 1187, 1188,1189: n = A,T,C or G

SEQ ID NO: 20911 - DNA, 668 bp, Homo sapiens; identical to SEQ ID NO: 20192

SEQ ID NO: 20912 - DNA, 1189 bp, Homo sapiens; identical to SEQ ID NO: 20185
  misc_feature 1179, 1180, 1181, 1182, 1183, 1184, 1185, 1186, 1187, 1188,1189: n = A,T,C or G

SEQ ID NO: 20913 - DNA, 337 bp, Homo sapiens
  misc_feature 337: n = A,T,C or G
acagaccatgtcagaattcctagtcttttacttctaaattttattacatcgtgtgaaatttagaaaaatataagctgtttattttcttgatcaagataggtgaagaaatacagaaaagaaagaaataatgaaagcaaaccccaactttcagatttggacacacctttgctaaaaactatcaacattttccccttgaaattctgagtggaaagatatgtgcttccctaagtcaggagctgtatatgcactccccaccccgaaacattttttgggcaaatggaatcattaaaggaatgagaggtatctactcttcagttcccactcattgacacaaacn

SEQ ID NO: 20914 - DNA, 779 bp, Homo sapiens; identical to SEQ ID NO: 20149
  misc_feature 1: n = A,T,C or G

SEQ ID NO: 20915 - DNA, 588 bp, Homo sapiens; identical to SEQ ID NO: 20604

SEQ ID NO: 20916 - DNA, 604 bp, Homo sapiens; identical to SEQ ID NO: 20360
  misc_feature 596, 604: n = A,T,C or G

SEQ ID NO: 20917 - DNA, 593 bp, Homo sapiens; identical to SEQ ID NO: 20493
  misc_feature 1, 589, 590, 591, 592, 593: n = A,T,C or G

SEQ ID NO: 20918 - DNA, 446 bp, Homo sapiens; identical to SEQ ID NO: 20632
  misc_feature 441, 442, 443, 444, 445, 446: n = A,T,C or G

SEQ ID NO: 20919 - DNA, 594 bp, Homo sapiens
  misc_feature 1, 593, 594: n = A,T,C or G
naatttatagtcaggtccttgttctgtgtggcccaggctggagtgcaatgcaatcatagctcaatgcagtcttggactctggggctcaagcaatcctcctgcttcggcctcccaagtagctaggactactgacaagtattaccactcctggctaatttttaatattttttttgtaaagacggggtctggctttgttgccctggctggtcgcgaattcccggactcaagcaacctttctgcctcggcctcccaaaatgctaggattataggcataagccactgtgcctgtccaaaactttatttttaatgacaaaacctattttcctatagctctgcttggaatgctgtatttatcctaagcaccagttttggccctagctggcctgtatacagctttaggtaggctcttgatctagttttgctataggcagggtagatctcagtatttcatattttacttgtggcagagacagtgttaacctttctctcatggatagcggattcattgagacagattttaactaagagctatgatgatttatacctgaactccaaattgaatcaagaacacacagtaacaaaaactcctcacnn

SEQ ID NO: 20920 - DNA, 373 bp, Homo sapiens; identical to SEQ ID NO: 20744

SEQ ID NO: 20921 - DNA, 457 bp, Homo sapiens
acgcgggcgtctgctaattttttgctttctctaaagcgctcctgctcactgccatatggtaaattcctcagtgaattattcagggtcttgtcctgatgcaaaagacactttaaaaaaaagcagaacattccttatccctcttggaaaaagaaataacaaataattaaggccacagcgctcagggacccaagtttattggcaataaaaggtagctgtgctgacaacgctaccaattaatctgccaaaagcgagctcagtggtgttgccataaagatcatgtgttggaaaacaggactggagacatccagggatctatataaagcatagacaacagtcttagcgatcatggggcagcaatgtgggcaccctaccttcagcagatatggtagcggtctgcgttctttctgtaacaaaactcctcactacgtggagaacccctcaatcccaagtcagctgt

SEQ ID NO: 20922 - DNA, 2487 bp, Homo sapiens
  misc_feature 1, 2, 3, 4, 5, 6, 7, 8, 2459, 2460, 2461, 2462, 2463, 2464,2465, 2466, 2467, 2468, 2469, 2470, 2471, 2472, 2473, 2474,2475, 2476, 2477, 2478, 2479, 2480, 2481, 2482, 2483, 2484,2485, 2486, 2487: n = A,T,C or G
nnnnnnnngggcatgttcacagattctctgttaagagcccccaccaccaagaaggttagcaggccaacagctctgacatctatctgtagatgccagtagtcacaaagatttcttaccaactctcagatcgctggagcccttagacaaactggaaagaaggcatcaaagggatcaggcaagctgggcgtcttgcccttgtcccccagagatgataccctcccagcaagtggagaagttctcacttccttctttagagcagctaaaggggctacccagatcagggttgaagagaaaactcaattaccagggtgggaagaatgaaggcactagaaccagaaaccctgcaaatgctcttcttgtcacccagcatatccacctgcagaagtcatgagaagagagaaggaacaaagaggagactctgactactgaattaaaatcttcagcggcaaagcctaaagccagatggacaccatctgatcacacctgatgccatgtacttgtgagagaggatgcagttttgttttggaagctctctcagaacaaacaagacacctggattgatcagttaactaaaagttttctcccctattgggtttgacccacaggtcctgtgaaggagcagagggataaaaagagtagaggacatgatacattgtactttactagttcaagacagatgaatgtggaaagcataaaaactcaatggaactgactgagatttaccacagggaaggcccaaacttggggccaaaagcctacccaagtgattgaccagtggccccctaatgggacctgagctgttggaagaagagaactgttccttggtcttcaccatccttgtgagagaagggcagtttcctgcattggaacctggagcaagcgctctatctttcacacaaattccctcacctgagattgaggtgctcttgttactgggtgtctgtgtgctgtaattctggttttggatatgttctgtaaagattttgacaaatgaaaatgtgtttttctctgttaaaacttgtcagagtactagaagttgtatctctgtaggtgcaggtccatttctgcccacaggtagggtgtttttctttgattaagagattgacacttctgttgcctaggacctcccaactcaaccatttctaggtgaaggcagaaaaatccacattagttactcctcttcagacatttcagctgagataacaaatcttttggaattttttcacccatagaaagagtggtagatatttgaatttagcaggtggagtttcatagtaaaaacagcttttgactcagctttgatttatcctcatttgatttggccagaaagtaggtaatatgcattgattggcttctgattccaattcagtatagcaaggtgctaggttttttcctttccccacctgtctcttagcctggggaattaaatgagaagccttagaatgggtggcccttgtgacctgaaacacttcccacataagctacttaacaagattgtcatggagctgcagattccattgcccaccaaagactagaacacacacatatccatacaccaaaggaaagacaattctgaaatgctgtttctctggtggttccctctctggctgctgcctcacagtatgggaacctgtactctgcagaggtgacaggccagatttgcattatctcacaaccttagctcttggtgctaactgtcctacagtgaagtgcctggggggttgtcctatcccataagccacttggatgctgacagcagccaccatcagaatgacccacgcaaaaaaaagaaaaaaaaaattaaaaagtcccctcacaacccagtgacacctttctgctttcctctagactggaacattgattagggagtgcctcagacatgacattcttgtgctgtccttggaattaatctggcagcaggagggagcagactatgtaaacagagataaaaattaattttcaatattgaaggaaaaaagaaataagagagagagaaagaaagcatcacacaaagattttcttaaaagaaacaattttgcttgaaatctctttagatggggcttatttctcacggtggcacttggcctccactgggcagcaggaccagctccaagcgctagtgttctgttctctttttgtaatcttggaatcttttgttgctctaaatacaattaaaaatggcagaaacttgtttgttggactacatgtgtgactttgggtctgtctctgcctctgctttcagaaatgtcatccattgtgtaaaatattggcttactggtctgccagctaaaacttggccacatcccctgttatggctgcaggatcgagttattgttaacaaagagacccaagaaaagctgctaatgtcctcttatcattgttgttaatttgttaaaacataaagaaatctaaaatttcaaagaaaaaaaatacaagcagaaactaaataaactataacnnnnnnnnnnnnnnnnnnnnnnnnnnnnn

SEQ ID NO: 20923 - DNA, 897 bp, Homo sapiens
  misc_feature 894, 895, 896, 897: n = A,T,C or G
gcgacacaagcggctggacgtgaagaggaacacaccggcggagaacacagaacaccaaccctctctttagtcaccctggaggcctcggagaaggcggtttcggtgatccgtgaagagaccccgagtctgttacatcccggagaatgacaagagagcgagtacctgggtgacgtttacgttctgggatttcgggagatgcggttttctgcacgccaggggccaagcctgagacgtagatggacggcagggataggagctctctccgcgccacaaacgcccctgctcatacctgggttccttgattttcctgcctatataaccgagcctcccatggccgggctctgagctctcattctgcggactgggacaaaggggttaactgtgatgcgctttgtataaccccaggattctgcacttgcccaagggcgaggcgcaaatcaaaaactacgcacaactgaacaccgagatcaggtgagtcctgagtgtctcacgacataaaatccttacgattttaacaagagttgtatttgtgctagcactgttaactgacaaacgcatgccagatcccatctgtctttaaagctcaatgtgtgacggttagacacgtcgattgtctcttcaactttcttatttggaaaaaccaaaaaaccaaaaccagtggtctgacttggcgaggacccttcgagctagtccgtagccaatctggagtgatactggacgctgtgggagaacagccatgtgaatacacccgagtgaacccgtataagcaagggttaacgcgtaccataccatgtttcacgtctcacgtttaaaaacgcggcactgtgtcgcgaacgaaatagataaaggaggggcacatgggagaacactaacagcgcgcgcgcacccacacannnn

SEQ ID NO: 20924 - DNA, 1479 bp, Homo sapiens
  misc_feature 1478, 1479: n = A,T,C or G
actgatctaaccaagatattttgtttttctcatccaccagtcactttctcagtcctttctgtatcccttgcaatttgaacaaagcttggtgaatagtgtgcacacaaaaagcacactaggtgaaagacagatacataaaaagggtaaagtcaggatattttaacaaacctatcaagctctaaatataagcctccttggtagttttctctttaaccctctctccactgttggatgaaatttgctgcattcaattccagttcccaccccaacttccttcttaacacaaggtcagggttaagccttcggtgctttaatccagaggaaaattacttattttaaaaagcagtgaaaaacaccgcattcctttggcacaggatgaagaccagctcagctcttcagttgttgatcattgtctattgttctccaaacagtaaaccagtatttcacactgagattgtcggctgcgggtatattccaattccccgtctcctcatgaatatgaagtgaagggctctgaccctggaagtggttctaagcagggcaaaatggggtctcggaagtgtggaggctgcctaagttgtttgctgattccgcttgcactttggagtataatcgtgaacatattattgtatttcccgaatgggcaaacttcctatgcatccagcaataaactcaccaactacgtgtggtattttgaaggaatctgtttctcaggcatcatgatgcttatagtaacaacagttcttctggtactggagaataataacaactataaatgttgccagagtgaaaactgcagcaaaaaatatgtgacactgctgtcaattatcttttcttccctcggaattgctttttctggatactgcctggtcatctctgccttgggtcttgtccaagggccatattgccgcacccttgatggctgggagtatgcttttgaaggcactgctggacgtttccttacagattctagcatatggattcagtgcctggaacctgcacatgtgtggagtggaacatcattttattttccattctcataaccctcagtgggcttcaagtgatcatctgcctcatcagagtagtcgtgcaactatccaagatactgtgtggaagctattcagtgatcttccagcctggaatcatttgaataaggacaaaatgttttccattatcaagacatggcatctatctaaatattaatatcaatgtgtagacttgagggaatattgaaatgatggtgctttctggattggtgttatggtaaaacatttggagtcctcactggacatgagtatacaccttcattagtatgttttaagtatatgatcagaacttcgaatattctggccttggtcaaaaatccttcagattggtaggagaatagattgggaactttggatgttttggtttaatttggaatgaaccataacggggaaaggggtggtgggttaaataagggaaaaaagggggataann

SEQ ID NO: 20925 - DNA, 364 bp, Homo sapiens
gagctccccgcggtggcggccgaggtacgcgggggagccagcgatgggtccaccttgcctttgttgttgttgttgtttttgtttcttgttttggtgactgagtgaagggacttgaccctggttctcccagcttgagcaggagcgtcactgcggtgatcagggaagctgcctggaccagctggcctggggcagccaccaccccattctctcgcccctcttgagaatccagcctgtggacccaggtgtgtcagcctgcagtcagaccacagtctgtctcgggctggtgctgggggtggcagaaagggggtcctgacgcagcccctgctcccccgagtctctcagtctcctggggaagagatgacag

SEQ ID NO: 20926 - DNA, 1274 bp, Homo sapiens
  misc_feature 1271, 1272, 1273, 1274: n = A,T,C or G
gctctccgatgcccagccctcctggaaccacctcgcctgtgacgtaggtggagcgcgcactgcctccgggcccgtctttctcaattgggaccggaaaacgttgtcgctcatcctatgacgcgaaagtaaccgagactatcaggatccggagacggaaatgtccgaaggccgcagtacttgaccctgtattttgggagtcgaacggagaatggaaactgaaagtggaaatcaggaaaaggtaatggaagaagaaagcactgaaaagaaaaaagaagttgaaaaaaagaaacggtcacgagttaaacaggtgcttgcagatattgctaagcaagtggacttctggtttggggatgcaaatcttcacaaggatagatttcttcgagaacagatagaaaaatctagagatggatatgttgatatatcactacttgtgtcttttaacaaaatgaaaaaattgactactgatgggaagttaattgccagagcattgagaagttcagctgttgtagagcttgatttggaaggcaccagaatccggaggaaaaaacctctgggggaaagaccaaaggatgaggatgaacgcacagtgtatgtggagttacttcccaaaaatgttaatcacagctggattgaaagagtatttgggaaatgtggcaatgttgtttatataagtataccacattataagtctactggagatccaaagggatttgcgtttgtggaatttgaaacaaaagaacaagcagcaaaagcaattgagtttcttaacaacccaccagaagaagcaccaagaaaacctggcatatttcctaaaacagtgaaaaataagcccattccagccttaagagttgtggaagagaagaaaaagaaaaagaagaagaaaggccgaatgaaaaaggaagacaatatccaagccaaagaagaaaacatggacacgaagaagccaccccagggcggtggacggacccagcggacaaaaggtcgggcaggcggggggggaagtgtggctgtcccccggacaccacacgaaacaccactggggggctcgcaaagccacaaccaggatccagagctacacgagcaacacgcaacacgcagcagaagagccaaccacgcacagacaatcaagagtacacgacagaagcagacagaacacaaaacagacagcagagcaacgagcagaagcgcgaacgagagaccagcaagaacaagcaggaaacaagcgcacgcaaggacgacacgacgcaacgagacgacgaccaaacgacaannnn

SEQ ID NO: 20927 - DNA, 479 bp, Homo sapiens
acagcctttctcacatggtagtctaagggctcctgtaatccaagcactttgggaggccaaggcgggtggaccacttgagctcaggagttcaagaccagcctgggtaacatagtgagaccccttctctgttggcagtaattccctctacacagcaggtgctctggcagctctctggagacgaggaaggagaacttaggaagatggtcttggcttacacaccaccttgctgccagggctcttgcaaagacaggcttcaccaaccaccagcccacagttggcccgtccccaggggctgcacactagccttatggaaagttcctcgagttccctgtgcgtcagcttctgcctggacgctggctactgttgtcggctctgtgaacaggcacacagggtttcctccgggtgtgggatggggctgcccgggatgggggttggggatgctggagcagtgggagatgtcccctgcctatctcccccgt

SEQ ID NO: 20928 - DNA, 3132 bp, Homo sapiens
  misc_feature 3132: n = A,T,C or G
ccacgcgtccggctgcgggaggcgcggcgcggggggggtcgggtgcgcggcgggccgcccctccccctgccaggtccgggcgggtgcctggagccgccagagtttccgcacccgggagggagatgcggccggggctcaggctccttgcagttgtaatttagattcgagaagtggtttatcctttgactggaaaagaaaagtagctgcagtattcccccagcacttgctgagagcatgccgtatgccaggctgtgaggctcgagagacaagcagtggaagagttgcggcctgtttcatctctggattgtaaatctgagcctccttctggcccctggaaggggacagcatcacgatggaatgattcctaaccagcataatgctggagccgggagccaccaacctgcagttttcagaatggccgtgttggacactgatttggatcacattcttccatcttctgttcttcctccattctgggctaagttagtagtgggatcggttgccattgtgtgttttgcacgcagctatgatggagactttgtctttgatgactcagaagctattgttaacaataaggacctccaagcagaaacgcccctgggggacctgtggcatcatgacttctggggcagtagactgagcagcaacaccagccacaagtcctaccggcctctcaccgtcctgactttcaggattaactactacctctcgggaggcttccaccccgtgggctttcacgtggtcaacatcctcctgcacagtggcatctctgtcctcatggtggacgtcttctcggttctgtttggcggcctgcagtacaccagtaaaggccggaggctgcacctcgcccccagggcgtccctgctggccgcgctgctgtttgctgtccatcctgtgcacaccgagtgtgttgctggtgttgtcggccgtgcagacctcctgtgtgccctgttcttcttgttatctttccttggctactgtaaagcatttagagaaagtaacaaggagggagcgcattcttccaccttctgggtgctgctgagtatctttctgggagcagtggccatgctgtgcaaagagcaagggatcactgtgctgggtttaaatgcggtatttgacatcttggtgataggcaaattcaatgttctggaaattgtccagaaggtactacataaggacaagtcattagagaatctcggcatgctcaggaacgggggcctcctcttcagaatgaccctgctcacctctggaggggctgggatgctctacgtgcgctggaggatcatgggcacgggcccgccggccttcaccgaggtggacaacccggcctcctttgctgacagcatgctggtgagggccgtaaactacaattactactattcattgaatgcctggctgctgctgtgtccctggtggctgtgttttgattggtcaatgggctgcatccccctcattaagtccatcagcgactggagggtaattgcacttgcagcactctggttctgcctaattggcctgatatgccaagccctgtgctctgaagacggccacaagagaaggatccttactctgggcctgggatttctcgttatcccatttctccctgcgagtaacctgttcttccgagtgggcttcgtggtcgcggagcgtgtcctctacctccccagcgttgggtactgtgtgctgctgacttttggattcggagccctgagcaaacataccaagaaaaagaaactcattgccgctgtcgtgctgggaatcttattcatcaacacgctgagatgtgtgctgcgcagcggcgagtggcggagtgaggaacagcttttcagaagtgctctgtctgtgtgtcccctcaatgctaaggttcactacaacattggcaaaaacctggctgataaaggcaaccagacagctgccatcagatactaccgggaagctgtaagattaaatcccaagtatgttcatgccatgaataatcttggaaatatcttaaaagaaaggaatgagctacaggaagctgaggagctgctgtctttggctgttcaaatacagccagactttgccgctgcgtggatgaatctaggcatagtgcagaatagcctgaaacggtttgaagcagcagagcaaagttaccggacagcaattaaacacagaaggaaatacccagactgttactacaacctcgggcgtctggtaagcgcggggtgccctgtgcctgtggaaggaaagatgggttatttttcttatttataataaaatgacatagtgacacccacctagcccatacattttataaagttctttcacatgtttctatctcatttgaaggtagctatttgatttccttttgagtaattttttaaagctctcattagagagcagtacagtgtgaattagtcaagtttaagaggtcacccacgcaaaaggttaaacccaggaataaattaacatgttaaagtcccgtccgccctgtaaaacagcactccaatgggtaacttcctgataaacatcagtttctctgtttttaaaacaagaattgagtaagaacagagattaaagtaacaaatccgtagtatgatttctgagctcccttgttctccttcttcaagggagcagagctcttcatctgcagggagcatttccccccaaaaaaggcagctttggagggcacgggatttatttgaaagggctttgacattatttggtggaaatagaaaataacgtgttctgtagtagctttatatttttggttattgacaggatgtttacgaagatctgattgctcttgattttcttgacaaaaataaaatgagacacacacatagcaaaattctttaaacacgaatggttgtcttctccctataatcaaccatttaatttggtttcaagaaaacaaatacatatgttcctaatatatttagatgtattcaataaacattgttaattaaaaaatttgtgttcattctaaccaaactggaatacatccatagtgatatgactttcacagaagtttatatgtagatttccagattttatccagcttagccttacaggtaggaaggcatcctcgtgttctaaagagatgtctgctgccctcgttttaaaggcctgaagcttcttggcttatccgan

SEQ ID NO: 20929 - DNA, 505 bp, Homo sapiens
actactatagggcgaatgagctcaccgcgggggcggccgaaaccagcttttaagtgagctcagcatattataaaggaatgaaagcaattagagcgtggactctaaaggtaggtgagacttgctgttccacttagaaacatagaaacataggaaactaaggactcgatggggacatcaatagtaggatggcttttaagagggctgaagtgtgtaaatatacacattaagctttgcagcaactctgtgccaaatcgaagttgttgcagacctggaattttagtttggtaaaggataactgtagttattttttaaataaaatgattcattagaattctttggttctctcatgataatttagcaagtttgtctctttcagaaagaaaagtttaagtggggttaatgggtactactcgattgtcaacgtcaaggagtcgcaggtcgcctggttctaggaataatgggggaagtatgtaggagttgaagattagtccgccgtagtcggtgt

SEQ ID NO: 20930 - DNA, 620 bp, Homo sapiens
accgtatggagtcctccagctgcagcccagctcaccctcaatgccaacccacttgatgccacccaaagtgaggatgttgttctgcctgtgtttgggacccccaggacaccccagattcatggcagatccagagagctggccaaaccctccattgcagtcagcccaggcactgccatagagcagaaggacatggtgaccttctactacaccactaaggacgtcaacattaccatccactgggtttccaacaacctctccattgtgttccatgagcgcatgcagctgtccaaggatggcaagatcctcaccattctcattgtccagcgggaggactcagggacttaccaatgtgaagctcgagatgcccttctgagccagaggagcgaccccatcttcctggatgtgaagtatggtcctgatcctgttgaaatcaaattggagtctggtgttgccagtggggaaggtggttgaggtgatggagggctccagcatgaccttcttagcggaaacaaagtctcacccaccctgtgcctatacttggtttctccttgactccattctgtctcacaccacgagaacattcaccatccatgctgtgtccagagaacatgagggcctgt

SEQ ID NO: 20931 - DNA, 505 bp, Homo sapiens; identical to SEQ ID NO: 20929

SEQ ID NO: 20932 - DNA, 668 bp, Homo sapiens; identical to SEQ ID NO: 20192

SEQ ID NO: 20933 - DNA, 424 bp, Homo sapiens; identical to SEQ ID NO: 20414
  misc_feature 421, 422, 423, 424: n = A,T,C or G

SEQ ID NO: 20934 - DNA, 435 bp, Homo sapiens
  misc_feature 429, 430, 431, 432, 433, 434, 435: n = A,T,C or G
acccaaattaactaaccttaaatgcaagacttagcagcaggtattatccatgttgaaccacagagttgtggttataggatgatctatccaggttgaaaaagaattctggccagcagtttgaagaagtgaaaatcaagattaggcacagaggcagagggtggtggggccacagggcggggaaggattccaatccatgagactgcagaaggggaagtgagcagcctctacccatacagactagggtctcatggatgccactggagagcattccagtctcactggatattggtagttcactaacttgtgtcagtcatgattgtgacctctgatatattgctatatttggttttcatttatacaaaagctgcgtctctccttgatcccagtgttttgttggtcttttgtgcatccaggaaagtaaggcttgannnnnnn

SEQ ID NO: 20935 - DNA, 968 bp, Homo sapiens
atttgtttacttctgtgtattttttttttttacataaatggaattgcactatatagttctgtagctcagtttttaaaatttggtattaaaatgttctttcagttagggccaaagggcatttaacttcaaggtaagacccattccaggacggcagagatcatgtctgtcttgcgtatccctgtgtgaattttgcctgacatgttgcaaacactccgtatggaagtcttgagggtcttctgccccagtcagaaaacctctgggagaacagttatccccagacctcagacgctcgacggatacatgagaagctttctttgatggattcgatgtcaggatctccatgtgaacttccacttagaggtgtcatgctatggggcctcagcgtcaccacatcgtttggacgtctgaccagtttcctgactttgagagtctcttactttaaacatgagggatcagccctagaaaggaaaggaaagacacacgcaagagtctgcctctgactccaccggcggccactctcaggatgggtcctccagacgggatttaaacagaactgttttgatagggacagtgctttctgttgctgtcctggggcagggtgatggcgaggacacagggtgctttcagatcctctgcgtggacaagaccagctctgggccagcttccaggaagccccactggtagcgacagaacatgtccaattcagaaagcccttcagggctggttcaactggatatcgtatttaaatggatctatttatatttcatatgtgtgaaagaaaggctttgttggatgaacacatttacacttttctttttttttttttttactgattaaaattttattattttggccaggtgtggtggctcacacctgtaatctcagcactttgaaaggccaaggtgggtggatcacttgaactcaggagttcaagacgagcctgagcaacgtaggaagtcccatctcta

SEQ ID NO: 20936 - DNA, 905 bp, Homo sapiens
  misc_feature 904, 905: n = A,T,C or G
aaggaaagaagaggagctgagacgaaaagccttagaggagaaaaggagaaaagaggaactagtgaaaaagcgaattgagctcaaacatgacaagaaagcaagagctatggccaagaggacaaaggataatttccatggttacaatgggattcctattgaggaaaagtcaaagaagaggcaggcaacagaaagccataccagccaaggaaccgaccgagagtatgaaatggaagaagagaatgaattcctcgagtacaatcacgcagagtcagagcaggagtatgaggaagagcaagaacctcccaaagttgaaagcaaaccaaaggtcccccttaaaagtgccccaccacccatgaacttcactgatttactcaggctggctgagaaaaagcagtttgaaccagtggaaatcaaggtagtgaagaaatcagaagagcgacctatgaccgcagaagaacttagggagcgagaattccttgaacgaaagcataggagaaaaaaacttgagacagatggaaaactacctccaactgtgtccaaaaaggcaccctctcagaaagaaagtgtgggcacaaaacttagcaaaggttctggagacaggcatccttcttccaaaggaatgccccttcctcatgctgagaagaaatcaagacccagcatggccaatgagaaacacctcgctttgtcttcatccaaatccatgccaggagagaggatcaaggcaggatctggcaatagctcccaaccctcacttcgtgagggccacgacaaacctgtttttaatggagctggaaagcctcattccagcacctcttcaccaagtgtcccaaagacttctgctagcaggactcagaaatctgctgttgagcacaaagccaaaaaatctctgtcccatcctagccann

SEQ ID NO: 20937 - DNA, 789 bp, Homo sapiens
  misc_feature 1, 2, 3, 788, 789: n = A,T,C or G
nnncaagggaacgggcgacctgggagacccagccagtaccgcccagacggacttcggagtggtgatggggtacctccaagaagcttacaggatggaaccagggaaggtttgggacactccacatcactcaaagttccactggctcgatccctgcagattagtgcaagaacctacgtgagcagaaaccaattgtccacagctgccagccttgggccatctggattaccagaatcatggacaaccacttaatattatccagggaagcctcttgggcaaaaaccacattacgagttcaacctcagccgtatgaaggttcagggcgagactggtgcactcagcaacatcagtgaccttccttttcttgcagaaaaactctgcctttccaaaaatgggcacttcaaggcaaaacaagatggacacacaacggatgtgagccattcatctcctgtagatttaacagatccacaagttcggaggaattggatctttcttgggagtctcgcactggtgatcagtaccagctatagctctttggtaggtgggttcaccaagacggaagagcgcgcttagtaagaaaatttacagggctaattctttccaaaacaaaagtagaacaacagcatgtttagactgctggaccccgattctgtgagggcaccaggatgctgggcagttctacctctggaacggcaatatcccacatgggatcacagagggagacccctggctcaagcacgcccgcggacagacacaggggggggtccgccaggccacacgggtgtcggcann

SEQ ID NO: 20938 - DNA, 2943 bp, Homo sapiens
gggagtcgacccacgcgtccggtgcggggagccggaaatggttgtggactacgtctgtgcggctgcgtggggctcggccgcgcggactgaaggagactgaaggccctcggatgcccagaacctgtaggccgcaccgtggacttgttcttaatcgagggggtgctggggggaccctgatgtggcaccaaatgaaatgaacaaagctccacagtccacaggccccccacccgccccatcccccggactcccacagccagcgtttcccccggggcagacagcgccggtggtgttcagtacgccacaagcgacacaaatgaacacgccttctcagccccgccagcacttctaccctagccgggcccagcccccgagcagtgcagcctcccgagtgcagagtgcagcccctgcccgccctggcccagctgcccatgtctaccctgctggatcccaagtaatgatgatcccttcccagatctcctacccagcctcccagggggcctactacatccctggacaggggcgttccacatacgttgtcccgacacagcagtaccctgtgcagccaggagccccaggcttctatccaggtgcaagccctacagaatttgggacctacgctggcgcctactatccagcccaaggggtgcagcagtttcccactggcgtggcccccgccccagttttgatgaaccagccaccccagattgctcccaagagggagcgtaagacgatccgaattcgagatccagactgaggaagacccggaaacttaggggccacgtgagccagccacggccacggccggcataggcaagcaccggaagcaccccggcggccgcggtaatgctggtggtctgcatcaccaccggatcaacttcgacaaatatgtgtatgaaggtggttgttacctcttcctagccacccaggctactttgggaaagttggtatgaagcattaccacttaaagaggaaccagagcttctgcccaactgtcaaccttgacaaattgtggactttggtcagtgaacagacacgggtgaatgctgctaaaaacaagactggggctgctcccatcattgatgtggtgcgatcgggctactacaaagttctgggaaagggaaagctcccaaagcagcctgtcatcgtgaaggccaaattcttcagcagaagagctgaggagaagattaagagtgttgggggggcctgtgtcctggtggcttgaagccacatggagggagtttcattaaatgctaactactttttccttgtggtgtgagtgtaggttcttcagtggcacctctacatcctgtgtgcattggggagcccaggttctagtacttagggtatgaagacatggggtcctctcctgacttccctcaaatatatggtaaacgtaagaccaacacagacgttggccagttaaacatttctgtttataaagtcagaataatacctgttgatcactgaaaggcctgcatgtattgtactctgaattttacagtgaatgagagaatgtaccctaattgttcaacagggctcaaaaggaaagattccattttgatgggtcacattctaaagaggggcagtgtgataggaatgagatggtcctttaggacttaagttctcagcccaaggtttttccacgtggccccctcatcttttttttttttttaaacggagtctctcttggccaggctggattgcaatggcgcgatctcggctcactgcagcctccgcctcccaggttaagcgattctcctgcctcagcttcctgactaactgggattacaggcgcccaccaccatgcccagctaatttttgtattttcagtagagatggggtttcaccatgttggccatgctggtctctaactcctaacctcaagtgatctgcccacatcggcctccaaaagttctgggattatagtgtgagccactgcgcccggccatggctccttaatcttgatccaaattattgttacatccagaatgtgatgaatcaaaatctcgagatgggggtccagcaatctgaaatttcagtatgccagggcttttctgtatgtcaaagtgggtttgaaatagttaatttttcttctagtctgaaatgtatcgggaaaatttggaaatcctgaaggctggaaattgaaataagtttttctaggatttgtgtctcttgctattggaaaactgatggtgaccaattcatgtttacaaataagatcctcatagatctcggtaaattataatttgctacagttttatggttcttcctgtgattttgagctttttttgacccaaaataatacagtctaaaactatagacaaataagatggcacttagactcctgggttttagttagtggaggtttccttagtgcactgtggggtcataataagccgagaaccatggctgtctatgggacacatctgtcaggacaacctttagaggatgttggggatcaaatagaaggcacagagaagcactgaattggcttacataagaataggctagaattacaagtagtgaaacctcgattcagctggacaattttaaacaaatgtatcatttggcttgtatcttctgttgtgctggagaagttagaaataagggctctccagaccagcctgaccaacctggagaaaccttgtctctactaaatacacaaaattagccaggcgtggtggcacatgcctgtaatcccagctactttggaggctgagccaggagaatctccaggaggcggaggttgctgtgagccgagatcgtgccattgcactccagcttgggcaacaagagtgaaactctgtccaccccccccaaaaaaagtaagggctctccattagggcccatagaggacttgtaatatggaacctgaatccaaggatcccacaataagtggtcagtagttcatgatgaattaaaagactcaatatttggtcttca

SEQ ID NO: 20939 - DNA, 533 bp, Homo sapiens
  misc_feature 533: n = A,T,C or G
gctgactcctgtgagacgcagccgaggcgagcagaacccgaggggaagggatgcagaccagagccgagagctactaagttcctggcctcccccgagtgagtgactggcgatggacggagagcaggacttcccttcctgcattcagaatgtgtgtgcaggtcattattcatcaacacatgtcaagataaaacatacagagctcttcttggaagggctgggtttggtccatctcaaatgacacttttgtcacctccataaattccaagatggaatgtcagtccactggggttgttatagacggctaggctagactaggcagtccggggcggggaggggagttaagtaggtaagtgttcttccttccacgaggctgtcttgttgaggtcatttctgcctgagtgcgacacagtcctctgtaaatatacctgtaaggaacgttttccttgcaagatacaacaggtctccgtttttttcccgatttcaacacgtgtgttctgagtgtgaactcggtcacagaaaggggcccccgcgtn

SEQ ID NO: 20940 - DNA, 5221 bp, Homo sapiens
  misc_feature 5193, 5194, 5195, 5196, 5197, 5198, 5199, 5200, 5201, 5202,5203, 5204, 5205, 5206, 5207, 5208, 5209, 5210, 5211, 5212,5213, 5214, 5215, 5216, 5217, 5218, 5219, 5220, 5221: n = A,T,C or G
ggagtcgaccacgcgttcggcagaacattaaagatgcttatacaaccctgcttaaccagttggaaagatttaagctttcagcattagcacctctttttggaagtttaaaatggaataatattacggaagaggcacacaagactgtatctctgcttacacaagtctggccagaaggatctgacattcggcgtgtcttttgtgttacttcatgctcattatctttgagaatgtaccatcgctttttaggaaacagagagccctcctctggtcaggaaactgagatccaacaggtgaacagtaattgcttaaccctgcaggagatggaagatttgtgtaaactgcattgtctcactgtggtttttctactccatctgcctctttctcaaagagcttgtgctagagtcatcacttcccattgggctgaggacatgaagcctttattacaaatgaaaaagtggtgtgaatatttcatcttaagaaatatacataccttttgaattttggaatctgaatttaattcacctttctgacttaaatgatgagcttttgttgaagaatattgctttttactatgaaaatgaaaatgtaaaaggcctacatttgaatttgggagataccattatgaaagattatgaatatctctggaataccgtatcaaagttggtcagagactttgaggttggacagccatttcctctgagaacaacaaaagtttgttttcttgaaaagaaaccatcaccaatcaaagacagctccaatgaaatggtgcccaatttgggttttattccaacgtcatcttttggggttgataaatttgctggagatattttgaaagatttgccttttctaaagagggatgatcctattgttacttcactggttaaacaaaaggaatttgatgaacttgtgcactggcattctcataaacccctgagtgatgattatgacaggtccaggtgtcagtttgatgaaaaatctagagaccctcgtgttcttagatctgtgcaaaagtatcatgtttcccaacggttttatgggaattcattagaaacagtctcttcgaaaatcatcgtgactcaaactattaagtcaaagaaggattttagtgggcccaagagcaaaaaggcacacgagaccaaggctgaaataattgctagagagaataagaaaaggttatttgccagggaagaacaaaaggaagagcaaaagtggaatgctttgtcattttctattgaagagcaattgaaagaaaatttacactctggaataaagagcctggaagattttttgaaatcctgtaaaagtagctgtgtgaaacttcaggttgaaatggtggggttaactgcttgcttgaaagcctggaaagaacattgccgaagtgaagaaggtaaaaccacgaaagatttaagtatagctgttcaggtgatgaaaaggatccactccttgatggaaaaatactcagaacttttacaagaagatgatcggcaactcatagccagatgccttaagtatttaggatttgatgagttggcaagttctttacatccagcccaggatgcagaaaatgatgtaaaagtgaagaaaaggaataaatattcagttggcattgggccagctcggttccaactgcaatacatgggccattatttgatacgagatgagagaaaagacccagatcccagggtccaggattttattcccgacacatggcagcgagagctccttgatgttgtggataagaatgagtcagcagtgattgttgccccaacgtcctcaggcaaaacctatgcctcctactactgtatggagaaagtgctgaaggagagcgacgacggggtggtcgtgtacgttgcacccacaaaggcccttgttaatcaagtggcagcaactgttcagaatcgttttacgaaaaatctgccaagtggtgaagttctctgtggtgttttcaccagggagtatcgtcatgatgccttaaactgtcaggtacttattacagtgcctgctgctttgaaattctgctgcttgctcctcatcgccaaaactgggtgaaaaagatcagttatgttatatttgatgaggttcattgtcttggtggagaaattggagcagaaatctgggaacatctccttgtcatgatccgatgtccctttttggctctttcagctaccataagtaatcctgaacatctcaccgagtggctacaatcggtaaaatggtactggaaacaagaagacaaaataattgaaaataataccgcttctaaaagacatgtgggtcgtcaggccggctttcccaaagactacttgcaagtaaaacactcgtataaagttagacttgtgctctatggagagaggtataatgatctagagaagcatgtatgttcaataaaacatggtgacattcattttgatcattttcacccatgtgctgcactaacaacagatcatattgaaaggtatggattccctcctgatcttaccctttcacctcgagaaagcatccagctgtatgatgccatgtttcaaatttggaaaagttggcctcgggcccaggaactgtgcccagaaaacttcattcattttaacaataaattagtcattaaaaagatggatgctaggaaatatgaagagagtctaaaggcagaattaacaagttggattaaaaatggcaacgtagagcaggccagaatgggacttcagaatcttagtcctgaagcagatttgagtccagaaaacatgatcaccatgtttccacttctagttgaaaaactaaggaaaatggagaagttacctgcactattttttttattcaagttaggagctgtagaaaacgcagctgaaagtgtgagcactttcctaaagaaaaagcaggagacaaaaaggcctcccaaagctgataaagaagcccatgtcatggctaacaaacttcgaaaagttaaaaaatccatagagaaacaaaagatcatagatgaaaagagccagaaaaaaaccagaaatgtggatcaaagcctaatacatgaagctgaacatgataatctagtgaagtgtctagagaagaacctggaaatcccacaggactgcacatatgctgatcaaaaagcagtggacactgagactttgcagaaggtatttggtcgagtaaaatttgaaagaaaaggtgaagaattgaaagccttggcagaaaggggtattggatatcatcacagtgctatgagtttcaaagaaaaacaattagttgaaatcctctttagaaaaggatatcttagggtggtgacagctactggaacacttgctttaggtgtcaacatgccttgtaaatctgtggtttttgctcaaaactcagtctatctggatgcgttgaattatagacagatgtctggccgtgctggaagaagaggtcaagacctgatgggagatgtatatttctttgatattccattccccaaaataggaaaactcataaaatccaatgttcctgagctgagaggacacttccctctcagcataaccctggtcctgcgactcatgctgctggcttccaagggagatgacccagaggatgccaaggcaaaggtgctatcagtgctaaagcattcattgctgtccttcaagcaacccagagtcatggacatgttaaaactttacttcctgttttctttgcagttcctggtgaaagagggctatttagatcaagaaggtaatcctatggggtttgctggacttgtatcacatttgcattatcatgaaccttctaatcttgtttttgtcagttttcttgtaaatggactcttccatgatctctgtcagccaaccaggaaaggctcaaaacatttttctcaagacgttatggaaaagctagtattagtattggcacatctctttggaagaagatattttccaccaaagttccaagatgcacacttcgagttttatcaatcaaaggtgttccttgatgatctccctgaggattttagtgatgctttagatgaatataacatgaaaattatggaggactttaccactttcctacgaattgtttccaaactggctgatatgaatcaggaatatcaactcccattgtcaaaaatcaaattcacaggtaaagaatgtgaagactctcaactcgtatctcatttgatgagctgcaaggaaggaagagtagcaatttcaccatttgtttgtctgtctgggaactttgatgatgatttgcttcgactagaaactccaaaccatgttactctaggcacaatcggtgtcaatcgctctcaggctccagtgctgttgtcacagaaatttgataaccgaggaaggaaaatgtcgcttaatgcctatgcactggatttctacaaacatggttccttgataggattagtccaggataacaggatgaatgaaggagatgcttattatttgttgaaggattttgcactcaccattaaatctatcagtgtttccttgcgtgagctatgtgaaaatgaagacgacaacgttgtcttagcctttgaacaactgagtacaactttttgggaaaagttaaacaaagtctaaaaacaaagtctatgcaaaccacttaaaaataattccatagtagtttttcaggtcacgtttttgattcttatgcttcttgccagaaatacattatgataaagtggaaatacattacgatgaagtggaaagagcaaacactttggaatcaaacagagttgcaatcaaacctgccatgttctgtcatgaatactcacaaattatttagtatacctgaatcttggtttctttttataactgagtaataatggttacatctcaggtagtttgaggattgactaaaaaaatgcgagaatgttgtatgtgactgaataacaatttttactctgcgaagccaaagtaaatataatattatcagtaactttatccccagtgtcagtatttataaaatgtttattaaggctagaaaaaatgaatacaatatcctgaaggtgaaatatattctcttcaattagcataaatatgatttacataagttagctatacagctattgagatagtactttctagtaaacttaaactactttttaaacatacattttgtgatgatttaacaaaaatatagagaatgatttgctttattgtaattgtatataagtgactggaaaagcacaaagaaataaagtgggttcgatctgtttaccaaaannnnnnnnnnnnnnnnnnnnnnnnnnnnn

SEQ ID NO: 20941 - DNA, 633 bp, Homo sapiens
  misc_feature 1, 2, 598, 632, 633: n = A,T,C or G
nncgacccacgcgtccgactgtcttggtacctgcggtagtagcctggctttgctctgacggcgatctcgcggcccgagagccttttatagacagctccttcagtgtctctgtttccaaaccgcaaccgagaagagacagacggagaaaagagagttacttttccaggttgcttttcccggggatgtgaaggatacagaaatgactgtgaatcaacccatatcatcaaggagctgataatctagtggaagagttagacgtgtgcatacttcactatgatatgaggcagtctctgagcttatattctctgtggaagatgtgacatatccaggcggaacatcatgatgcagggaaacacatgtcacagaatgtcgttccacccgggacgagggtgtccccgaggacgaggaggacatggagccagaccctcagcaccatcctttaggccccaaaatctgaggctgcttcaccctcagcagcctcctgtgcaatatcaatatgaacctccaagtgccccttccaccactttctcaaactctccagcccccaattttctccctccacgaccagactttgtacccttccccccacccatgcctncgtcagcgcaaggccctcttcccccctgcccaann

SEQ ID NO: 20942 - DNA, 170 bp, Homo sapiens
acgtttaacgtcggcccggcgcgcgcgtccgggaggttgcccgtaggccgctaactggtggttcccagtccccgccgactcggcctctttcttctgcggccaccagatcgcgggatatcggagacttcgaacaatccgctggagtcctttacagtttaaaaacagaggac

SEQ ID NO: 20943 - DNA, 745 bp, Homo sapiens
  misc_feature 1, 2, 3, 4, 5, 6, 7, 8, 9, 10, 11, 12, 741, 742, 743, 744,745: n = A,T,C or G
nnnnnnnnnnnncggaagtcttctagaattaattaacgcgggggctgatgccattttcagcctcagcacgcctgcacccaggcgctcattaaaacagcatgttgctccccactgcctcgtgttgtctgttggcgcgctgtcggggttcgaaccgatacaagaaccttccacctacctggtgctttggcctcatctataagcttttccactgtcctgaaacaagatagagaatctgagcggccagtcatctgccctaagtgctgccgccgaagactgaatgtcctggaaagtttgctgtcacatctccattatgacaaaagcattgtgccgaacagatgaaaaaatgcattgtcaacggaatcttttatgtttgtttgtcttcctttaagcaacattgccttacttgttataaaagataaataaatatttgttcatttcaaaaaaaaaaaacacccagcataacacacaacaaaaacgtttgttggccgcgcacgagcgaccccgaaaaaaaggctttctacaacccaactcgttggggggcccagcggcacccaaagatgaatatggcgacacgtgcccacacagcgggtcccaagagaacccgtgccgagccactgggcgctggtttccccccaaataaaacgcccgggggaccacgggccgttctggacacactcagaggggctccgagcgccaaacgggctatcaacacggggccaggagctgaaaaccgccccgcgnnnnn

SEQ ID NO: 20944 - DNA, 533 bp, Homo sapiens; identical to SEQ ID NO: 20939
  misc_feature 533: n = A,T,C or G

SEQ ID NO: 20945 - DNA, 505 bp, Homo sapiens; identical to SEQ ID NO: 20929

SEQ ID NO: 20946 - DNA, 1190 bp, Homo sapiens
  misc_feature 1, 2, 1185, 1186, 1187, 1188, 1189, 1190: n = A,T,C or G
nnggagtcgacccacgcgtccgcttaacagtgtggggtaatgccaattatgaaattgtagaaaagtgctacaaagagaattcagatattcctatactcttcagtctacaacgtgtcctgctcattcttggccttttcttcactggcctcttgccctttgtgcccattcgagaacagttttttgaaatcccaatgccttctattatactgaagctaaaagaaccacacaccatgtccagaagtcaaaagtttctcatctggctttctgatctcttactaatgaggaaagctttgtttgaccacctaactgctcgaggcattcaagtgtatatttgggtattaaatgaagaacaagaatacaaaagagcttttgatttgggagcaactggggtgatgacagactatccaacaaagcttagggattttttacataacttttcagcatagaaaaagaggtacttagaagtattgaaggaaaaaatgaagacctaagaaaaaaatatttcatgatcatttccctaagccatttccagaatggtaaaaggtttaatcagtttttattacctcatttttaagcctgtatgagaatgtagaaactatatattatatgtatatttattttaaataatattgtatattttatgtttgtaaattgtttagaaagataattggttatgagatgtaagttttaatttcttaatgtgcatttttgtttctagatcttatacagaaatcttgattaataacatacacagaaatgtacatactgcatcatctgcagaaatcttgatcaataacctagaaactaggttatctaggttgttgatcaagatttctgtagatgatgcagtgttctatcataagtaattctggaatcaaagactattggatacatttggcattgggctgggtgtggtggctcatgcctgtaatcccagcactttgggaggctgagacaggcggatcatctgaagtcaggagttaaagaccagcctggccaacatggcaaaaccccatctctaccaaaaatacaaaaattaaccatgcgtggtggtacacgtctgtcatcccagcagctcttaaggctgaggcacaagaattgcttgaacccgggaggcagaggctgtagttagccaagatagcaccactgcactccagcctgggagacagagtgagactccgtctnnnnnn

SEQ ID NO: 20947 - DNA, 435 bp, Homo sapiens; identical to SEQ ID NO: 20934
  misc_feature 429, 430, 431, 432, 433, 434, 435: n = A,T,C or G

SEQ ID NO: 20948 - DNA, 2968 bp, Homo sapiens
  misc_feature 1, 2, 3: n = A,T,C or G
nnncatttaaagtgcatctgtatgcttatatatcgaggcaaagtattctacagaaaagggatcctttccaaaacggaggttcttgggcaattactttgggaaatcacctccctgatctgtgagcatttcaaattttgtgtcaactgaagttgctccttcacaccttgtcttttcagcaaaatcacaatactcgctctctagccacaccctgaaaaaaacctttgggtttggaggacaatgcatgacctgagacagcgctctgtacagattagtgtttctgttgacagaatgagctcttagtctctgtaaaccaccacaatttcatcaatgaaaattagaagctcaagatcatctcataaatagttcaagaccctcacaaacattccccccaaccataactgcatacaactgcgtactcctctgacaccatctggctcttgtaaacaccggggcaccaagatgagtgagactgatgccactcaaaatacactacctaatttatttatgtttatatattttatttttcaatttcattcttttatatacatgtttttggtaattatagtaaagatgctggtgaaaagtaatttgtttaacatttcataatgcgtgcaaaaggaaaaatactgattcaaagaaaagtcattcttacaactattcagccctgacaattatgacaagcagttaggcaatatcatgacttgcaaagttatacttagcataatgttgcaattcaaaatatggcacaaaattaacaatacagataacagtcctactggctaaacttagccaggtttcgactaatttggtttaaattgaaatttgattatataaaaaggtttctgaaagtattgaaaaagaaacagtgtacatgaaagagaattcaacaatgtttacaaaatgccaaaagttcttactctgccccccattaccataaataattaatgaagccccccttccccccaccccccagactcaaaaagatttacaaagataaatttagctcagtgaacagaaccaaaagatgactgttgttagacagtacctggttaaaagctcaagcactttcataagaattcatatatattgtctcttgagtaatataaataatccgatagtgttgctcttttgagttttggagacttctcacttaggagttataaccgtccttgtgctttgaataaaacatgagctttaaagcagaatgctgatggtattcagaattcaccatcttcaaagttcattgtgagaattcttctctgcagctttgaacatcaggatggaattgaaaattttgagagcagggcccagtttaatgctcataattttaacaatgtctgtttgagtcataagtagaaatgcttctccatcaatttgttcatctttaaatacctttccatgttcttcacacccaggtaagctctgtataaattctgacacctcgtctgtgctccatttggaaactttactggcagggattcctgcgacagttggaagaagtttgctttgctgctcccagcgcaagggcagacatggaattggggacttaaaggacagaaagacagctgaccgacgctgtgcctgctggacggtgggttcttcccgggcacctctggcttcatgtgatgttctcatttcactttctgttctctcttcaaagtcttctttgacatcatcagcatgctggtctctgatttcaggggaagaagagctttcatttgcatctgtccttttatttcttggaaatgacggactagccggaggcatctcaccacttaagcggtctggaaaaatacggtctttattcaaattgatttctgaatagggacagttggcagcactgtgagggcccagatgtctcgctctcttgaaatggccaatccctttacatcccggggttgagcatccaccatgttctgaagcttccattaattctaaggggctcaaaggaggctgaaggggatgtcctgtttttgaacaccagcctacagggtgaatatcaggagaatctgcatctatccagtaatcatagcaattgttccagccatcaaagtgaacttttacccggtgatcatctgtgtctgccacagttgctactctaataaacatagggttccttttgtctacaacctcaagcttcatttttttctggaatccatgaggaggtttcactttgaaagctcttgcaggagcaggtaaagaattggtttcttctaagtatttatcccaagaaaaatgtttcacatttggataacctggtggagtaataagggttcttctatgttccttacaccaaccaactggatgaatatgtggacttgatgcttcacaccaatagtcatagctctcatcccagttgtcataatgtaccaggaaacgattgtccaccatatctgttaccgtagcaacacagatgaatgagggattccttttttgtcgtaactgcctcaaagacttcattaccaactcgaaagcccgatgggatcactgttatattctgattttcaaataatgacttaggagcagcttgagctttacatgtcttaagataggtctgccaattgaattcttcttctttatacccttttggaggatggaagtttgtggccggttttctcacaccacccaactgggtggatatccagagcgtctgcattcacccagaagtcatagcaatcagaatacccatcaaagtgaagctttatccggtatccacaaacctccgcgacggtgaggacacagtacacagactgatgctcaggatccacgccttctaatttcatgccaactttgaatccatttttgttatatggaaaggattgatgctccttgaacagcttcgccggcactgccaccgctttctcctcttccaggtaggatgcccagcaccacgctttctttcctttaggaggcaaaccctgctttagtacagccgaatcccctcgtcttttcctccgtgctctctgcc

SEQ ID NO: 20949 - DNA, 1274 bp, Homo sapiens; identical to SEQ ID NO: 20926
  misc_feature 1271, 1272, 1273, 1274: n = A,T,C or G

SEQ ID NO: 20950 - DNA, 505 bp, Homo sapiens; identical to SEQ ID NO: 20929

SEQ ID NO: 20951 - DNA, 301 bp, Homo sapiens
  misc_feature 301: n = A,T,C or G
agtagaatattgattgtcctatatcccattttcttgaagagattctggcttctaatatatgttcctaaaaaaaaatttatcgtctagtagtgatgtcttcatgtttcacccagctgtctcataggcatgactaagcatctatttcatcacctggctctggatgcctcctctctttaccattggggaaaggcatttgctgattccttttgatatacctgaagtattgatgctagagaaatcacttccaatataacagcatcgtttgcagattttcacttctgtgctgcctcaagattatggn

SEQ ID NO: 20952 - DNA, 362 bp, Homo sapiens
actaaactaagccgtcaactaccagcaagcagaatgaaaaacagggacagatcagcatccaattagtatgtctaagtttttaaacaggaaaagggttgaggggaatcagtaaaactggaaactcatacttcacaattttgcaaatctcactgattaaaaggacggaaattgtgtgctttatcaaatcttgctgtgaagtgcacagtttcattttgtgaggtcctgtataacaattcgtcctgggctggcccactttcaaatgcatgtgaaaatcttggagattcagagcatcatattcagcaagcaaggtcattctagtgatgcccttaacaagtttcaaaagctcatagagatcttcaacc

SEQ ID NO: 20953 - DNA, 620 bp, Homo sapiens
ccccccgcggtggcggccgagagctgaccggcggcgtgggcatcggcttctgggtgtgggacgagtggaacaacctgaacgtagcgaacatcatcatcgccatcgtcgtcatcggcgtggtggggctgctgctcgaacaggcgctggtggcgctggcgcgggcgctgacgcacgaacaagtggctaactgattaaggagcgcgatcatggaagaccttcaaaccaggttcatcgacatcaccggcgtggagatggcgtttcatacgaagaagggcgtgttccaggcactgcagggggtcgacctggcggtgcgcaagggggagttcattacgctgatcgggcactcggggtgcggcaagtcgaccttgctgaacctgattgctggcttgttgaaaccgacggcgggcgtgctgttgtgtgccaatcgcgagatcgcaggaccgtcgccggagcgggcggtggtgttccagaatcattcgctgctgccgtggttgacgtgttacgagaacattcatctcggggtcgagcgggtgtttggcgccggtgagacccgcgcccagctgcgcgaacggacgctggatgcgctggcgctggtggggctgtcgagcgcggagggcaaa

SEQ ID NO: 20954 - DNA, 2199 bp, Homo sapiens
  misc_feature 1, 2, 3, 4, 2198, 2199: n = A,T,C or G
nnnnaggcagcaacagtgctgatgctggactgtggcaggcagagggtgctatcctgacacacttcaccttagtgcaggaaacttcaatttggtggaagaaaggcgatttcgaggttccaatctgggcgacacttcccagttggagagtcagcaaaagggagagggcaattccaagaagagggaaaagcttgtgcacagtgtacctcctttattcctgaagcccgggcagtgcttgacctggtcgaccagtgcccaaaacagatccagaaaggaaagttccaggttgttgccatcgaaggactggatgccacgggtaaaaccacggtgacccagtcagtggcagattcacttaaggctgtcctcttaaagtcaccaccctcttgcattggccagtggaggaagatctttgatgatgaaccaactatcattagaagagctttttactctttgggcaattatattgtggcctccgaaatagctaaagaatctgccaaatctcctgtgattgtagacaggtactggcacagcacggccacctatgccatagccactgaggtgagtgggggtctccagcacctgcccccagcccatcaccctgtgtaccagtggccagaggacctgctcaaacctgaccttatcctgctgctcactgtgagtcctgaggagaggttgcagaggctgcagggccggggcatggagaagaccagggaagaagcagaacttgaggccaacagtgtgtttcgtcaaaaggtagaaatgtcctaccagcggatggagaatcctggctgccatgtggttgatgccagcccctccagagaaaaggtcctgcagacggtattaagcctaatccagaatagttttagtgaaccgtagttactctggccaggtgccacgtctaactagattagatgttgtttgaaacatctacatccaccatttgttatgcagtgttcccaaatttctgttctacaagcatgttgtgtggcagaaaactggagaccaggcatcttaattttacttcagccatcgtaccctcttctgactgatggacccgtcatcacaaaggtccctctcatcatgttccagtgagaggccagcgattgctttcttcctggcatagtaaacattttcttggaacatatgtttcacttaatcactaccaaatatctggaagacctgtcttactcagacagcaccaggtgtacagaagcagcagacaagatcttccagatcagcagggagaccccggagcctctgcttctcctacactggcatgctgatgagatcgtgacatgcccacattggcttcttccacatctggttgcactcgtcatgatgggctcgctgcatctccctcagtcccaaattctagagccaagtgttcctgcagaggctgtctatgtgtcctggctgcccaaggacactcctgcagagccatttttgggtaaggaacacttacaaagaaggcattgatcttgtgtctgaggctcagagcccttttgataggcttctgagtcatatataaagacattcaagccaagatgctccaactgcaaatataccaacttctctgaattatatttgcttatttatatttcttttcttttttctaaagtatggctctgaatagaatgcacattttccattgaactggatgcatttcatttagccaatccagtaatttatttatattaatctatacataatatgtttcctcagcataggagctatgattcattaattaaaagtggagtcaaaagctaaatgcaatgtgtgtgtattttcattacacaaattaattgtcttgttaaataagtacagggatcttggagtgggatttcttgggtaaattatcttgcacttgaatgtctcctgattacatatgaaatcgcttgacatatctttggacagaaaaaagtagtgagtgagggggaaaattatagaggctgtgtgactttagggagtaggttgaaccaggtgattacctaaaattctttcaggttcaaaggcagataaatctgtagttattttatcctattctacaatcttaggaggacttctccaaactaattaaatcagggtatacggctgcgtatgaaactaattcacaagctccgtatgcgcggttacaaaggctggagtcgggaatgggttaacgggcggcgcgacaacaagcgcacaacagctggggggatcann

SEQ ID NO: 20955 - DNA, 567 bp, Homo sapiens
  misc_feature 1, 2, 567: n = A,T,C or G
nnagcagacaaaactctctgacccagtttatgagtatcccatcctctgtgatccacccagccatggtgcgactcggcctgcagtacactgctgctgtggccacatccagtctttccccatgtctccctttgttccctacccctctgaactctgcacttgggtctgctggccatccctctctccttcccttcttccctctgacctcactgttacttcctcaagcccagatcaccatttgcctttgaaacttagttctgttcctactccatccctggcctctgtggattttcataaagatgatgttattgagaaaatttacagactccacaatttgggagcaaaatattactacaatttcttaatggctgaagagtatatatgaggtctctatacacattcaaaaccagtagtatatcaaagggctctttactgtcctatatcaaaactgttgttttattatggttatttaagagacaaggaaattacataaaattaaagcataggagtctaaaacctacctgccgcgcacctgccggcgccgcccccggtgaactcattcgccgatan

SEQ ID NO: 20956 - DNA, 2353 bp, Homo sapiens
  misc_feature 2252, 2280, 2346, 2347, 2348, 2349, 2350, 2351, 2352, 2353: n = A,T,C or G
gtccgcgcccgctggaggagtccaggtaataaggtcccggagaagtgtcactggccctgagtgggacccggtagcccgttcgctccgcgccggcggcctgtccccgcggcttggcgggctagggcaggggaaatgttgcaggaggagtcggacctctctctcattattgcccagatagtccaaaagctcaagggctccaatttgtactctcagctggaacggcaggcctgggccagtcttcagagacctgagattaaacttgaatcactgaaagaagatattaaggaattctttaaaatatcaggttgggagaagaaacttcagaatgctgtttatagtgaactgagtgtgtttcctttacctagtcatcctgctgcacctcctgaacatcttaaagaacctttggtatacatgaggaaagcacagggaagttgggaaaaaagaattttgaagagtttaaatagtatgtgcactgaactgagtatcccactggcacgaaagaggccagttggagaacagaaagaacttcttaataaatggaatgaaatgggaactgatgaaccagatttaagccttttcagacctgtttatgcacctaaggattttcttgaggtattaattaatcttcgcaacccaaattatgaaaacggtgattctcctagtttcaggactcatttgggtttaattcaagttccactgaaagtaaaagacatccctgaattgaaagaatgctttgtggaacttggcttaaatataggacaactgggtatagatgattctacacaagtgcctcctgaactttttgaaaatgagcatgtacgtattgggcaaaaagttctagcagaacaagatagtgctgctgctcaacagtacatcagacaaggaagtcccacggcactgagagctgaattgtgggctctcattttgaatatttccagccaacctgaggatgtcttgtattatgagcagcttaagaccaatgtgatacaacatgaccttttggtggacagtctaatctataaagatgtgaagttgacagcaagcaatgatgattattattttgtatttgaagattatttatatcaggtattactttgtttttcccgggatacatctgtgttgagtcactttgcattcaacagtgcctcgccaccaaaatcatacataagaggaaaactaggactggaagaatatgctgtcttttacccaccaaatggtgttatcccttttcatggattttcaatgtatgttgcaccactttgttttctataccatgaaccttccaaattgtatcagatattccgtgagatgtatgtgcgttttttcttcagactccattccatctcttctcatccttctggtattgtgtcactctgtctgctgtttgaaactcttcttcaaacttatcttccccaactcttttatcatctacgagaaattggggctcaaccacttcgcatatcatttaagtggatggttcgagctttctctggatacttagctacagatcagctcttgcttttatgggatagaatcctaggatacaactctctggaaattcttgctgtgctggcagctgccgtgtttgctttccgagcagtgaacctgatggaggtgacatcactggctgcagctgaagcagttcttgctgacctttctactttaaaagttatgcctcttcttcagatttttctgtttgctactgtcacctgatcttcttcacagtcactggcaacacatctagtttttcattagaaacaaatcatgaactatgcaaactctgcataaaaccaaaatgaaactttgcatataagccaataaagatcatgttccctcttcagttaaacctaagtagtttctcactttttgaaacaataactctgcaccaaatattgcatcgcatgctgctgattttcaagagagaagcaataaacacaacttctgctaaattgagcattatatatataatattataatatatatataatcctgacttgtcaatggcatgtaataatatatgcaataagaactaaagatactgtaataaacttcaagaggtaatgtagcttcttggataattcttttatgtcagtttataaatttatctctagataatgtattgttttgtctcataaattgctcctcactaagagccaggggtggggtagggtgtgagaacacttgaaaaagataatgtttttaagtaggaattcaaaagttgcttaaatggtgttttaagcaactttttacanccccagggatttctacatttctctccantttatttctctctttaaacatctctactggggaaggtcgaatacaattgtctccatttgacaatannnnnnnn

SEQ ID NO: 20957 - DNA, 388 bp, Homo sapiens
acgcggggggtattaaaatgttctttcagttagggccaaagggcatttaacttcaaggtaagacccattccaggacggcagagatcatgtctgtcttgcgtatccctgtgtgaattttgcctgacatgttgcaaacactccgtatggaagtcttgaaggtcctcctgccccagtcagagaacctctgggagaacagttatccccagacctcagacgctcgacggatacatgagaagctttctttgatggattcgatgtcaggatctccatgtgaacttccacttagaggtgtcatgctatggctctctctgttgaaaactgaaaacctgtgtggtggatggcaccagtcctgttgaatggtgcaaacgtcccctgcacaaaagcacta

SEQ ID NO: 20958 - DNA, 2762 bp, Homo sapiens
  misc_feature 1, 2, 2757, 2758, 2759, 2760, 2761, 2762: n = A,T,C or G
nnactatagtttacaagctacttgttctttttgcaggatcccatcgattcgaattcgtcgacccacgcgtccgcagcaggcagaggagcacttagcagcttattcagtgtccgattctgattccggcaaggatccaagcatggaatgctgccgtcgggcaactcctggcacactgctcctctttctggctttcctgctcctgagttccaggaccgcacgctccgaggaggaccgggacggcctgtgggatgcctggggcccatggagtgaatgctcacgcacctgcgggggaggggcctcctactctctgaggcgctgcctgagcagcaagagctgtgaaggaagaaatatccgatacagaacatgcagtaatgtggactgcccaccagaagcaggtgatttccgagctcagcaatgctcagctcataatgatgtcaagcaccatggccagttttatgaatggcttcctgtgtctaatgaccctgacaacccatgttcactcaagtgccaagccaaaggaacaaccctggttgttgaactagcacctaaggtcttagatggtacgcgttgctatacagaatctttggatatgtgcatcagtggtttatgccaaattgttggctgcgatcaccagctgggaagcaccgtcaaggaagataactgtggggtctgcaacggagatgggtccacctgccggctggtccgagggcagtataaatcccagctctccgcaaccaaatcggatgatactgtggttgcaattccctatggaagtagacatattcgccttgtcttaaaaggtcctgatcacttatatctggaaaccaaaaccctccaggggactaaaggtgaaaacagtctcagctccacaggaactttccttgtggacaattctagtgtggacttccagaaatttccagacaaagagatactgagaatggctggaccactcacagcagatttcattgtcaagattcgtaactcgggctccgctgacagtacagtccagttcatcttctatcaacccatcatccaccgatggagggagacggatttctttccttgctcagcaacctgtggaggaggttatcagctgacatcggctgagtgctacgatctgaggagcaaccgtgtggttgctgaccaatactgtcactattacccagagaacatcaaacccaaacccaagcttcaggagtgcaacttggatccttgtccagccagagggttggcattattgttcctaacagtgacggatacaagcagatcatgccttatgacctctaccatccccttcctcggtgggaggccaccccatggaccgcgtgctcctcctcgtgtggggggggcatccagagccgggcagtttcctgtgtggaggaggacatccaggggcatgtcacttcagtggaagagtggaaatgcatgtacacccctaagatgcccatcgcgcagccctgcaacatttttgactgccctaaatggctggcacaggagtggtctccgtgcacagtgacatgtggccagggcctcagataccgtgtggtcctctgcatcgaccatcgaggaatgcacacaggaggctgtagcccaaaaacaaagccccacataaaagaggaatgcatcgtacccactccctgctataaacccaaagagaaacttccagtcgaggccaagttgccatggttcaaacaagctcaagagctagaagaaggagctgctgtgtcagaggagccctcgttcatcccagaggcctggtcggcctgcacagtcacctgtggtgtggggacccaggtgcgaatagtcaggtgccaggtgctcctgtctttctctcagtccgtggctgacctgcctattgacgagtgtgaagggcccaagccagcatcccagcgtgcctgttatgcaggcccatgcagcggggaaattcctgagttcaacccagacgagacagatgggctctttggtggcctgcaggatttcgacgagctgtatgactgggagtatgaggggttcaccaagtgctccgagtcctgtggaggaggtgtccaggaggctgtggtgagctgcttgaacaaacagactcgggagcctgctgaggagaacctgtgcgtgaccagccgccggcccccacagctcctgaagtcctgcaatttggatccctgcccagcaaggtgggaaattggcaagtggagtccatgtagtctcacatgtggggtcggcctacagaccagagacgtcttctgcagccacctgctttccagagagatgaatgaaacagtcatcctggctgatgagctgtgtcgccagcccaagcccagcacggtgcaagcttgtaaccgctttaattgccccccagcctggtaccctgcacagtggcagccgtgttccagaacgtgtggcgggggtgttcagaaacgtgaggttctttgcaagcagcgcatggctgatggcagcttcctggagcttcctgagaccttctgttcagcttcaaaacctgcctgccagcaagcatgcaagaaagatgactgtcccagcgagtggcttctctcagactggacagagtgttccacaagctgcggggaaggcacccagactcgaagcgccatttgccgaaagatgctgaaaaccggcatctcaacggttgtcaattccaccctgtgcccgcccctgcctttctcttcctccatcaggccctgtatgctggcaacctgtgcaaggcccgggcggccatccacgaagcacagcccgcacatcgcnnnnnn

SEQ ID NO: 20959 - DNA, 620 bp, Homo sapiens; identical to SEQ ID NO: 20930

SEQ ID NO: 20960 - DNA, 1468 bp, Homo sapiens
  misc_feature 1465, 1466, 1467, 1468: n = A,T,C or G
cgcgtccggtcctcttcgcgcgacgttcggttcgctgtgtgtgtcgccggctccttgagggtccatgtgatttttacgccagtgctgctgaactgtgcagggtagggagctggcacagtccgattaattgtccttgggtcgaggtgtctcgtcggaccctttggggctcagtggagaattaaggcagagtcactgtaattatttctaataccaattccaaaatagtgactcttggacaatagtgcaattatatggaattatggctggttataagcctgtagctattcagacatatcctatacttggtgaaaaaatcacccaagatacactgtactggaacaactataagacccctgttcagattaaggaatttggtgcagtttcaaaagtagacttttctcctcagcctccatataattatgctgtcacagcttcctcaagaattcacatttatggccgatactcccaagaacctataaaaaccttttctcgatttaaagacacagcatactgtgctacttttcgacaagatggtagattgcttgtggctggcagtgaagatggtggagttcaactttttgatataagtgggagggctcccctcaggcagtttgaaggccatacaaaagcagttcatacagtagattttacagctgacaaatatcacgtggtctctggggctgatgattatacagttaaattatgggatattccaaactccaaagaaattttgacatttaaagaacactctgattatgtgaggtgtggatgtgctagcaaacttaatccggatctctttataacaggatcatatgatcatactgtgaagatgtttgatgcacgaacgagtgagagtgttctctccgttgagcatgggcagccagtggagagtgtcctacttttcccctctggaggtcttctggtgtcagcaggaggtcgttatgttaaagtctgggacatgttaaaaggaggacaattgctagtatctttgaaaaatcatcacaaaaccgtgacatgtttatgtctaagcagctctggacagaggttactctctggctcactggatcaggaaggtgaaaccgtatacagcaccaaattcctacaagtaatacacaagtttgatttatgcggcttcattttgagtcttgccttggcacatgaaagaatgagaccaataagtttggagggaatgacccaatggaatacatgagttgttaaacacctccggaaatcctgcagcacagaaaggaatcaacgtccccaaaaagaagaaaggcctggatattcggaacctttttttaaaggagaacataccatgaaggcacgggatgaccatttgagttaaaggcacagacagagcacctacaatttgttgaacgggattgacaattggagtcccaaggaccataagagtgtgccatggtgttaaaccgatagggccctaaggtagaaggctgcagcatgnnnn

SEQ ID NO: 20961 - DNA, 1022 bp, Homo sapiens
  misc_feature 1, 2, 3, 1022: n = A,T,C or G
nnncgcgcttagggatccggccgtggccgagcgcgcggccgtaagaccgcgggtgactagcatgcagatacccatgctctgactttctgcccctccactgacatggcccaccggggtggggagagggacttccagacttcagctcgacgcatgggcacctcgctgctcttccagctttcagtgcatgaacgggagctggacctggtttttctggatcatagctatgccaagccttggagtgcccacccagatgccagtagtgcccgccccacccgcatgctctttgtcactccccggcggcagcacgaaagtaccatgctctgtacaaaatgagctaagtagctaagtgaatcagacgtcccaatagatgtggagacggtcacatcaacgcctatgccactctatgacaatcagaaggcacgcagcgtgatgaatgagtgtgaacggcatgtcatctttgccaggactgatgcagatgcccctcctccaccagaggactgggaggagcatgtcaacaggactggctggacaatggcccagaacaagctattcaacaagatcctcaaagccctgcagtctgaccggcttgcccgcttggccaacgaaggggcttgtaatgagccagtgctgcgccgtgttgccgtggacaagtgttgcagggagagtgcggcaagctcttggcagtgtgagctgggatacccagctgatcccgtggcttgccacaaccctgtggtgtgaccctgtgggtctggcccttgtggggggccctactggggtgacttgtgcgacgcgtgatgggggggggaatccccacctggtattgtagccaaggatggggttttctccaccccaagacggtcgggttcctctacaacgaagcgcggtgttctcccccgacagacctccaacacagaagagagggtccaccatcaaagacagagaaccggcacatctgataaatacatacgaggccccaccgatctactacaagcaccgcggtgacttcctctgcgtactcacan

SEQ ID NO: 20962 - DNA, 1037 bp, Homo sapiens
  misc_feature 1, 2, 858, 1035, 1036, 1037: n = A,T,C or G
nncgaccacgcgtccggctaaatgcagtgtctgctacaaaaggctgtagttgtaggcagtcggggatgccatgtcctaggttccattcctgcgtgagtctgcagaaggcacacactttgtaagagtagagtggactagtgccagcctgaataggtttaaaactgcaaacagttggagaacatggaacaggttggtgcaggaagcctaagattttgcaatcatattataacattggcttttgacaacataaatgttgtatcttccctaaggtcaggtcggggaacgaaagacttccagcttcttacctctgcgtgcatgggcacgtgtgcattgctcagtccgcaggaggtctcactccgcaggaaacgctctcctcccgcataagtctgtacttccatcccctcatctgtggtagtagtgaaggctaggtgagtaagcgtgggctgttctacccaccagaagtccaggagctgttgtatacctcatttctaactcgtgaccgagtgacttgctttaactttctcgaaatcctacagagttgccaagtctgccctccctcctcagtcatgttaaactctggcctatagcatcatgggacctgtagcctagggtgggaccccctaaagcctctgaatgtcgctgcttaaaagctactgcaaactgagggcaaattgcaatcttctattcctttttgttgcaaggggtcttcacaggtctcttaacatctgctttccctgcacaccctgcctttaggggctggccagctatcccaaaccttacacacctgtgtcctgaagcaggcccacgtcactttgactgcctttcatgtgggatacgcagcgccaaccccttctcctntgaggcctcagggttctgtttcttttcaggactttgggtagaagggaagacaccaaaggctcctttaagctgactgctgcatacacattttacctcttttttctttgccatgaccaaaaaaatccattaaaggtattaataataataatattatttgcccctttttccgggccctcnnn

SEQ ID NO: 20963 - DNA, 540 bp, Homo sapiens
  misc_feature 539, 540: n = A,T,C or G
acttgactcttccccttaagtttgattccatttcctaacattatccttccctcttcctcctcagcaactagtcttctaaattagaacttacacacaatgaccagatatgaccctgcaacagagcatgcccttctgcattgagcatgcaatcatgtatcacaggtataagaccccttgaacagacatggttttggtgattctgtgtaggacttattgcttttacccaagaagatgatcaggcatcctaagtagatcaaaaagttttctggagctcttgaatgtgtataggcaagaaagattcagcaacctgttgccttatatgaggcaaactatcttctcatattttctttcgaattcaggatttcaaggttggggaaggaaggccgggcgcggtggctcacgcctgtaatcccagcactttgggaggccgaggcgggcggatcacgaggtcaggagatcgagaccatcccggctaaaacggtgaaaccccgtctctactaaaaatacaaaaaattagcccggcgtagtggcgggcgccnn

SEQ ID NO: 20964 - DNA, 1022 bp, Homo sapiens; identical to SEQ ID NO: 20961
  misc_feature 1, 2, 3, 1022: n = A,T,C or G

SEQ ID NO: 20965 - DNA, 721 bp, Homo sapiens; identical to SEQ ID NO: 20081
  misc_feature 709, 721: n = A,T,C or G

SEQ ID NO: 20966 - DNA, 435 bp, Homo sapiens; identical to SEQ ID NO: 20934
  misc_feature 429, 430, 431, 432, 433, 434, 435: n = A,T,C or G

SEQ ID NO: 20967 - DNA, 1275 bp, Homo sapiens
  misc_feature 1273, 1274, 1275: n = A,T,C or G
actagataaaggaaagagcaaaacaaagtgcaggatcgagagaaaatcgattgcttgaaaaactgggtattttacttgctgcaagtcccgactgtgtcagctgatgagtttaacactatgacagcacagtcctcacctgcctgctcgctgctgtaatccccacactgttgtgtgccctatagcacctggcacacgggaagcgctcaagagatgtgtgtgaatgaaggagccacatcttgacttgcgacgcggagcagtaagctgcagttatttggtagcggtggaagaataaattctacctcctgcttgcctcgctgcagtggggatgagggagaggggactcagccagatgctgaattccccagacagctgacatgttcccaatttccaggaccagctgttcaggagcatcccggacgagagccaggcacatttgagacttggatccaactaaagaccgccgcagattcttctgcagcaatgtcggtgttagaagaaaatcggccgtttgctcaacaattatccaatgtctactttacaatactttcgctgtctgttttaagctttttgtgaaaatcagccttgccatcctcagtcatttctacatacgtgaaaggcaaccgcaaggaagcggcaaggatagcagctgaattttatggagtaacccaaggacaaggttcctgggcagatcgatcaccactacatgaagcagcaagtcaaggtcgccttcttgctctgagaacattattatcacagggttataatgtaaatgcagtaacccttagaccatgtcaccccattgcacgaagcctgccttggagatcacgtggcatgtgccagaactctgctggaagcaggaagctaatgtaacatgccactcacgaataagatggcgtgacctccgttattcaaacgcatgctcccaaggcagtccaagctgtgaagagctgttctggagttattggtgcccaaaagccccagctggagttcatggtcttccatccccaaagcattgagggccggcagtaaaggtccccatgaatgtctttgacattctggatattctgggggcatatattttgacccagaaattcctccaattgggggaaccctctctatgtagctggatgtcccagcatttacttgtctttggaaagcctattcgtggggcctacaagaagccaatttggtacccctatttgtggcacaccaccgagagtgattttcaatggggatatcgacaagagtggcactagtctacatggagatatannn

SEQ ID NO: 20968 - DNA, 968 bp, Homo sapiens; identical to SEQ ID NO: 20935

SEQ ID NO: 20969 - DNA, 5145 bp, Homo sapiens; identical to SEQ ID NO: 20824
  misc_feature 1, 5144, 5145: n = A,T,C or G

SEQ ID NO: 20970 - DNA, 505 bp, Homo sapiens; identical to SEQ ID NO: 20929

SEQ ID NO: 20971 - DNA, 616 bp, Homo sapiens
  misc_feature 1, 605, 606, 607, 608, 609, 610, 611, 612, 613, 614, 615,616: n = A,T,C or G
ngactggtggagggaccagcagatatttcctccgaaggaaggatggggcaacccttggtcttggggagaatctctacgcccacctcgactgtacacacacctatggtgcccacaggtccagctaggaataaatgcacaaagagctccaccatctgagattaccactcaacttttaaagacaaattcttatttcatccctccaaagataaacatcacatggaaaaatgtttcacatcaattctttattatgccagtgaaggatgcctttcttcaggagatgcaacatggagaaagttttaaaggcaggcagtgaagagaaggacaagacgtctcaacccagctccttagatggagaataagtctgcccatccccacacacacatgcagtgggaatgccagccgctgcctgttcctcggtataatctcacctgtgcttcaagcctgattattaacaaccttagctcagatcatgaggccgagcctaattttccgacgttgcactccaggtcacttccagcttgggccttctaagggactctcattattccccccagccctgagctgcagcagatccccgcgttaattaattctagaagacttccgannnnnnnnnnnn

SEQ ID NO: 20972 - DNA, 4076 bp, Homo sapiens
  misc_feature 4074, 4075, 4076: n = A,T,C or G
gcgcgccggcggcggggcagcctcgctctggctcgcgccgcgcccccgcgcccagtccgcgcgtcagtcggtccgacgcgcggctgcggggcggagagctgcggctggcccagcgcgcccacctgaggaggcggcggggtccgcaggcgtcgcgggacgaggagatcggagccgggagactcgcgcagcgccatggcccccattggcctcaaagctgttgtcggagagaagattatgcatgatgtgataaagaaggtcaagaagaagggggaatggaaggtgctggtggtggatcagttaagcatgaggatgctgtcctcctgctgcaagatgacagacatcatgaccgagggcataacgattgtggaagatatcaataagcgcagagagccgctccccagcctggaggctgtgtatctcatcactccatccgagaagtccgtccactctctcatcagtgactttaaggacccgccgactgctaaataccgggctgcacacgtcttcttcactgactcttgtccagatgccctgtttaatgaactggtaaaatcccgagcagccaaagtcatcaaaactctgacggaaatcaatattgcatttctcccgtatgaatcccaggtctattccttggactctgctgactctttccaaagcttctacagtccccacaaggctcagatgaagaatcctatactggagcgcctggcagagcagatcgcgaccctttgtgccaccctgaaggagtacccggctgtgcggtatcggggggaatacaaggacaatgccctgctggctcagctaatccaggacaagctcgatgcctataaagctgatgatccaacaatgggggagggcccagacaaggcacgctcccagctcctgatcctggatcgaggctttgaccccagctcccctgtgctccatgaattgacttttcaggctatgagttatgatctgctgcctatcgaaaatgatgtatacaagtatgagaccagcggcatcggggaggcacgggtgaaggaggtgctcctggacgaggacgacgacctgtggatagcactgcgccacaagcacatcgcagaggtgtcccaggaagtcacccggtctctgaaagatttttcttctagcaagagaatgaatactggagagaagaccaccatgcgggacctgtcccagatgctgaagaagatgcctcagtaccagaaagagctcagcaagtactccacccacctgcaccttgctgaggactgtatgaagcattaccaaggcaccgtagacaaactctgccgagtggagcaggacctggccatgggcacagatgctgagggagagaagatcaaggaccctatgcgagccatcgtccccattctgctggatgccaatgtcagcacttatgacaaaatccgcatcatccttctctacatctttttgaagaatggcatcacggaggaaaacctgaacaaactgatccagcacgcccagatacccccggaggatagtgagatcatcaccaacatggctcacctcggcgtgcccatcgtcaccgattccacgctgcgtcgccggagcaagccggagcggaaggaacgcatcagcgagcagacctaccagctctcacggtggactccgattatcaaggacatcatggaggacactattgaggacaaacttgacaccaaacactacccttatatctctacccgttcctctgcctccttcagcaccaccgccgtcagcgcccgctatgggcactggcataagaacaaggccccaggcgagtaccgcagtggcccccgcctcatcattttcatccttgggggtgtgagcctgaatgagatgcgctgcgcctacgaggtgacccaggccaacggaaagtgggaggtgctgataggttctactcacattcttactcccaccaaatttctcatggacctgagacaccccgacttcagggagtcctctagggtatcttttgaggatcaggctccaacaatggagtgagagccaaagaaacaaagatccacacacatcctcaccccacagaaactgctggacacactgaagaaactgaataaaacagatgaagaaataagcagttaaaaaaataagtcgcccctccaaaacacgcccccatcccacagcgctccgcagcttcccaccaccgcccgcctcagttcctttgcgtctgttgcctccccagccctgcacgccctggctggcactgttgccgctgcattctcgtgttcagtgatgccctcttcttgtttgaaacaaaagaaaataatgcattgtgttttttaaaaagagtatcttatacatgtatcctaaaaagagaagctcatgtgcaattggtgcacagcaggagaaatttctggactgttaggatgaatggacgccttctccccgttatttaagatttgtgaccttgtacataaccctgggtgacgtgcacattgcttgggtatggaacggtagaaatttgggtgtttttaaaaccttgtttggggttgttcctgtccttgttgagaatcatagagatgtctgtgttcttggagtatttcacactgaggactaatctgctatcttcattccagtccctacccctcagtgcctgctctcatccaaataacctgggaggtgacaatcaggatatctcaggaggtccaaggtggaacagacctctttgcctttcccagcgtctcatacccccggtagtgcagctgtgggtggaggctggggtgtctgcacgaagtcaggccagcgtcctcctccacagcctgtcactgccccctccccagcctgtgtccacagtgctgtgatcccgagggaagtcctccagtctaagtcacagtgccctgacaggtgagaagcaaactcccgctggaagcctccatctctttggaaaaacagttagtctggagcctgtggcccaggcccttctgtccccaggcatcatcccaacagctcattttccctagtccgccttcgttcaagggtcaggaatggaccagaacagatgggttctggaggcccctgaacagagggctatggctgtggagaaggttcttggcccgttggactcacacagaccctgtaccctctcggcaagcatcttcagtcagattatcctcagtttcagatacttcataataccttgtgttgtgtggggtcatacatcatcgtgtttgtaagagaagatggtcattttattctctgtataaaacttagctctaaagcagaaactaaagcagcaaatgcaggaaggctgtctcgccatcctcaagactcagcagctctcattctccagtggtgagcacaccatttgtgctgctgctgttgtcgtgaaatataataacagtggaagtcacaaaaatgtcccctgcccagccccctcgccgcccttgacctcctgcaggccatgtgtgtattacttgtctagtgatgtcctctcaaagtgctgtacgcgagctcggcgccacctccgcctccctttcagagcctgctccccgccctctctgctcgctgcattgtggtgttctcttctcaaggctttgaaatctccccttgcactgagattagtcgtcagatctctccccgtctccctcccaacttatacgacctgatttccttaggacggaaccgcaggcacctgcgccgggcgtcttactcccgctgcttgttctgtcccctccctcggaccaaacagtgctcatgcttcaggaccttgtttgtcgaagatgttggtttccctttctctgttatttatataaaaataatttatcaaaaggatattttaaaaaagctagtctgtcttgaaacttgtttaccttaaaattatcagaatctcagtgtttgaaagtactgaagcacaaacatatatcatctctgtaccattctgtactaaagcacttgagtctaataaataaagaaatcagcaccccttcccggtgtccaaaaagggcggccgctctagaggatccaagctttcgtacgcgtgcatgcgacgtcataactcttctatagtgtcacctaaattcaattcactggccgtcgttttacaaagtcgtgacnnn

SEQ ID NO: 20973 - DNA, 505 bp, Homo sapiens; identical to SEQ ID NO: 20929

SEQ ID NO: 20974 - DNA, 505 bp, Homo sapiens; identical to SEQ ID NO: 20929

SEQ ID NO: 20975 - DNA, 4399 bp, Homo sapiens
acgcgtccgcctgtagcagattgggtttcaaaaagttcggatgtaaacattgacatccagtttccagccattatgtctcagccagatgtcctcttacttgttcaagaatgtttaaagaacagtgactcctttattgatgttgatgcagacttccatgctagggtgccagtggtggtgtgcagagaaaagcaaagtggtcttctgtgtaaagtgagcgcaggaaatgaaaatgcttgtctgacaacaaagcatttaactgcccttggaaaactagaaccaaagctggttcctttggtgattgcatttaggtactgggcaaagctttgcagtatagatcgccctgaagaaggaggtctgccaccttatgtgtttgccctgatggccattttctttcttcagcagaggaaagaaccccttttgcctgtatatctaggatcatggattgaaggattctcattaagcaaactagggaatttcaaccttcaagacattgaaaaagatgttgtgatctgggaacatactgacagtgctgcaggggacacaggcataacaaaagaagaggcaccaagagaaacgccgattaaaaggggacaggtgtcattaatattggatgtgaaacaccagccttcagtaccagttgggcagctctgggtggaattgctgcggttctatgctttagaatttaatttggctgatttagtgataagtattcgtgtcaaagaattggtatctcgggaattgaaggattggcccaaaaagcgcattgccattgaagatccctactctgttaaaagaaatgtggcaagaaccctaaatagtcaacctgtgtttgaatatatacttcattgtttaaggacaacatacaagtattttgctcttccacacaaaattacaaaatccagccttctaaagcctctgaatgcaattacatgtatttcagaacattctaaagaagtaataaatcatcatccagatgtacaaacaaaagatgataagctcaaaaactcagttttggcccaaggtcctggtgctaccagttcagctgcaaatacctgtaaggtacagccacttactcttaaagagactgctgaaagttttggaagcccaccaaaagaagaaatgggaaatgaacacatcagtgtccaccctgaaaactcagactgtatccaagcagatgttaactctgatgattacaagggtgataaagtataccatccagaaacaggaaggaaaaacgagaaagagaaagttggaaggaagggcaagcatctgttgactgttgatcagaaacgtggagagcatgttgtctgtggcagcacacgtaataatgagtcagagagcactttggatttagaaggcttccaaaatcccacagctaaagagtgtgagggacttgccactttagataacaaggctgatcttgatggagaaagtacagaaggtactgaggaactagaagactctctaaaccactttacccactcagtacagggccagacatcagaaatgattccctctgatgaagaggaggaggacgacgaagaagaggaggaggaagaagaacctaggctcaccattaaccaaagggaagatgaagatggcatggctaatgaagatgagttagacaacacctacactgggtcaggggatgaggacgccctatctgaagaggatgatgagttaggcgaagctgctaagtatgaagacgtgaaagaatgtggaaaacatgtagaaagagctctcctagtggaacttaataaaataagtctcaaggaagaaaatgtatgtgaagaaaattcacctgtggatcagtctgattttttttatgaattcagtaaacttatcttcaccaaaggcaagtctcctacggtagtgtgcagcttatgcaaacgagagggtcatctaaagaaggactgtcctgaagacttcaaaagaatccagctagaacctctgccaccattaacacccaagtttttaaatatcttagatcaagtctgtatccagtgttataaggatttttctccaacaattatagaagatcaggctcgtgaacatattcggcaaaacctagaaagtttcataagacaggactttccaggaactaaattgagcctgtttggctcctccaaaaatggatttgggttcaaacagagtgaccttgacgtctgtatgacaattaatggacttgaaactgctgagggattggactgtgtcagaactattgaagaattagcaagagtcctcagaaaacattcaggtctgagaaacatcttacctattacaacagcaaaggtgccaattgtgaagttcttccatttgagaagtggtctggaagtagatatcagtttgtataacacattggcccttcataacacaaggcttttatctgcttattccgccattgatcccagagtgaagtatttgtgctataccatgaaagtatttacaaagatgtgtgatattggtgatgcatctagaggcagcttatcatcgtatgcatatactcttatggtgctatattttctccagcagaggaatccaccagtcattcctgtccttcaagagatatacaaaggtgaaaagaaacctgaaatatttgttgatggctggaatatttatttttttgatcaaatagatgaactgcctacctattggtcagaatgtggaaaaaatacagaatctgttgggcagttatggttgggccttcttcgtttctacacagaggaatttgattttaaagaacatgttattagcatcaggagaaaaagtctgcttacaacttttaagaaacagtggacctcaaaatacattgttattgaagatccctttgatttgaatcataatcttggagctggattatcaaggaaaatgacaaattttataatgaaggcttttatcaatggtagaagagtatttggtattcctgtcaagggatttccaaaggactacccctcaaaaatggaatacttttttgatccagatgtgttaactgaaggagagctggccccaaatgatagatgttgtcgaatttgtggaaaaatcggacacttcatgaaggactgtcctatgaggagaaaagtaagacggcggcgagatcaggaagatgccctgaaccaaagataccctgagaacaaggaaaaaagaagcaaagaggacaaagaaattcacaacaagtacacagaaagggaggtgtcaacaaaagaagataagcccatacagtgcacacctcagaaagccaagccaatgcgggcagctgctgacctggggagggagaagatcctcaggccaccagtagaaaaatggaagagacaggatgacaaagacttaagagaaaaacgttgttttatttgtggaagagaagggcacattaaaaaggaatgcccacagtttaaaggctcttcaggtagcctttccagtaaatatatgactcagggaaaagcctcagcgaagaggacccagcaggaatcatgagggaaggaaaatgcagcactctaaatggccactcaggcgttcctattcactcggaaaattaggttcatttcacaggacacagcagtgtagatcaggcttcaacttaacatttaagggaaatgtcagatttttttttaatttaatgaaattgttaatggggaaaaatttttaatatagtcttatctaccacacatcgccatagatttaaggattttaatagaaagacatgatgtatgtatttaagccacgttaaaagaaaaaatataactatggaccggtattcagtgaatacagtttcatggtttttaattctttcaaagcacattaaaaatggtgtgctgataaaccccaagtaaattaaccctttttccgtataaatccattttttgttttgaagaggggaaattatatttattgttgtttactgaatcctggtgtgaaagcatatcagatatgtatgaactgctactgctgtacttccgatttacggacatcattttattgctatttgtagacgtgataacatgaacatgagtacctatttatgtgggccttcagtggatgggcagtgccactcaggtctctggggtttccctctctaattttaagtaaattgacatataactactatgcttataaaaatgaagtaaggaaaacaagtagtcctgtttgccactaaaaacattttcaaagtaaaaagtactttcattttatgatactcagaaattaggatgaagaacttttaaaattgctgaagatcaaagaggttatctctgccagtcacaagtgtggctggtgtcattctgggtctgactggagccctcctggactgtttctttaatttcaaaagccctgcagacatagtacctggtcagaactatgcctcggtttatttatcattttgaaataaaatcaaaatttcaacctg

SEQ ID NO: 20976 - DNA, 493 bp, Homo sapiens
  misc_feature 487, 488, 489, 490, 491, 492, 493: n = A,T,C or G
acgcggggagcggcggcggctccgaagcgcttgttcttttttgtgaaaggcgattcctccaccacctcttaggatcttgggcaagtcactcagcctcgctgagcctgtttgcatcagtagggttttgtgaggctccagcccttcaacagaacatttgctgagcatctactgtgtgcccagcagggccttcttagatcaggtataaggcaggagggaagcgtcgggagtcccaggcctgctgcctctgtaaccatgggcaggtggttcaacattacctccccttcttccccactgctctgccccatcctggcttttattgtatctcctctaaaagggtgtgagctccacggggaggtacccatgtgctttgaggaaggtctgccccaggttatattcaataggtactttttgaataattattgcaaagactagttctcagcacagagcttaacacataagaggtgtttgataaatggcaattgttcannnnnnn

SEQ ID NO: 20977 - DNA, 505 bp, Homo sapiens; identical to SEQ ID NO: 20929

SEQ ID NO: 20978 - DNA, 546 bp, Homo sapiens; identical to SEQ ID NO: 20353

SEQ ID NO: 20979 - DNA, 510 bp, Homo sapiens
  misc_feature 1, 2, 509, 510: n = A,T,C or G
nnccgaggtacgcggggacacaataccaggactgtctgagtgtaaagcctgctgtctttcactaagttacactggggctgagtgatttccctgccactcaggtgtctttgctgtggaggaattaacgggtctgaagactgaagctgggaagaagcagcagggaagactgatctgagctttcagggaaaagagtgaagttggactttaaggtttttatattgtcaagacaatttacaaacacaggaagagaaagaatgacaaagaggagaactcctagctggaaagaagagaaaaaaaattggatgcaagtaactgcatttatatatcttgagaatttaaataatcagcaacagttagaggtgcaaatgcaacagaagctaaaagaaacttagtatctggaatagttgacaagataaaaccccaaaatctgagagctgcaatcaaagagccatcttctctactaaattgaattagctcagttatatagcgcttctcaacaataaaaagtnn

SEQ ID NO: 20980 - DNA, 681 bp, Homo sapiens; identical to SEQ ID NO: 20120
  misc_feature 1, 2, 12: n = A,T,C or G

SEQ ID NO: 20981 - DNA, 399 bp, Homo sapiens
gtgaccatgaggcccagctgagagcagctcagctcggtgcagccttctgtaatggggagagacacagtcaaagaaaggaacatcccagtcgcccagctccagtgtcagcttcatgcagtaggccagcgactggagccagatgtgagctgagcccaagcggacgacctcgacaggatcccagaaagggtcgtcatctcgagccacagggccgtgatctccatctagaaagcgctggtaaagttcctgcattaggaatttcctattgatgaacttggcttttgaccatatccacacctggaaacacagaggtaggtcaccagtatttgattcatctgctgctctcacaattcatcactctgattttcccagcatgctcccttcattgactgggtttgcggt

SEQ ID NO: 20982 - DNA, 435 bp, Homo sapiens; identical to SEQ ID NO: 20934
  misc_feature 429, 430, 431, 432, 433, 434, 435: n = A,T,C or G

SEQ ID NO: 20983 - DNA, 2968 bp, Homo sapiens
  misc_feature 1, 2: n = A,T,C or G
nnagacgacccacgcgtccttaactgtagaatgttgattccgctgcagtgagaggcatgcttccttagaccaggcaacatttcatttgttgcatttccagtttccaataccaactcacctacaaagattttaccaaaaaccttaggaccaataaatgtgaatgttggaccccaaatgattataagcacaccacagagactaaccagttcaggaagtgttctgattgggagtccatatacccctgcaccagcaatggttactcagacacacatagcagaagctactggctgggtccctggtgatagaaaacgggctagaaaatttatagactctgatttttcagaaagtaaacgaagcaaaaaaggagataaaaatgggaaaggcttgagacacttttcaatgaaagtgtgtgagaaagttcaacgaaaaggtacaacatcgtacaatgaagtcgctgatgagctggtgtcagagttcaccaattcaaataaccatttggctgctgattcggcttatgatcagaagaacattaggcgaagagtttatgatgctttaaatgtgctaatggcaatgaacataatttcaaaggaaaaaaaagaaatcaagtggattggcctgcctaccaattctgctcaggaatgtcagaatctggagatagagaagcagaggcggatagaacggataaagcagaagcgggcccagctgcaagaacttctcctacagcaaatcgctttcaaaaacctggtacagagaaatcgacaaaatgagcagcaaaaccagggcccgccggctctgaactctaccattcagctgccattcataatcatcaatacaagcagaaaaacagtcatagattgcagcatctccagtgacaagtttgagtatcttttcaattttgacaacacctttgagatccatgatgacatagaagtactaaagcggatgggaatgtcgtttggcctggagtcaggcaaatgctctctggaggatctgaaacttgcgaaatccctggtgccaaaggctttagaaggttatatcacagatatctccacaggaccttcttggttaaatcagggactacttctgaactctacccaatcagtttcaaatttagacctgaccactggtgccaccttaccccagtcaagtgtaaaccaagggttatgcttggatgcagaagtggccttagcaactgggcagttcctggccccaaacagtcaccagtccagcagtgcggcctctcactgctccgagtcccgaggcgagaccccctgttcgttcaatgatgaagatgaggaagatgatgaggaggattcctcctccccagaataaagacaagagaaagcctacgtttcaatatgtgatgctcatgtgtgtttgtagtgtgagctcttgtttttgaaatgattgcttcagtctttgcctttgtttgcactgtgtgttcagtgaaaactagagaaacacaataagcaaatcacatgaaggctgagatgattgagatgaaagttaacatagtgtgaatgaaagtctggccaacagagcagtagatgatataacaaagaaagcatgctttctgaggagatagtggggataatccctgaagagttggcagtgtgagtgcaactcatttatcttctgtgaggtgggatttttgtgttcctcacacccatgtaattattcttagaattgagattgctacacggagcagtccttgacgatcgtgtttctgacgtttctcttccttgcctggactgcctttgacaaggcagaaatgaacatgaaaagtccccaggagaggggagctgtgtagtgagggatactgagggcagtcctgtggctgaggggcacagattgaactgctgaactagttggaggtctagatgaggtgctttacgcatcagctgccttagacagcttctagaaaggagcgagcgctacttcttaagtacttaagtgacatttagataatttatagtaaaactgaaattattattagccaatgcattggtgcatagaatttactagggctacttctggaagccaaaatagaatagcatttccatgtgcattaaatactttgccagcactgcctttgccagcatcctaaatctggagttttacaaagaaggaaactgtatctttaggttaatcaaagctatgcatttcatatagctttttcatttaaaacaagacaaagaaacaaattcctatgaccaaattgcttgcctacagttccctgcagtaattgtatgatctcacccagtgtgcaatttgtgaaaatgaaccaaatgtcattacttttgtcttaaagaaaagtctatttcaagaatatggacagcagtgtttccttgtacatgtcaccttttttcacattttcattaatcagaatgaccttattgagcctactcctggggtcaattgcatttcaaactaatccaatatttagtgtttcacagaaacactagaaaacgttgaacactcctactgcctggatatatggtagtgcagttatgttgtttatggctcaagatgtcattagaaatactgcagtggtgtattcacagctgctccttctctgaatgaaagagtgtagggacacctgccaccatggccagaccctgactgaatttcacattaaggctttggaaaggagcaaataataatgggagaattaactccaaaactttgacctgaatcatgtggatttgtcccaagattatgctagatgcaccaagcatggcccaaattggttctttttttaaatcccatgggggaagtgcaggctccttcctgtggtgcctctttatagcctcaccaccatgctaacactgagcatggtgaggaggaggaagctttggctagctaaacatgtttaataaggccataaaaactgagaaagaaaaacattcaactttagctgaagctcctttgatacaaaagtttcattctgtcagaaataagccatagt

SEQ ID NO: 20984 - DNA, 579 bp, Homo sapiens; identical to SEQ ID NO: 20440
  misc_feature 1, 2, 578, 579: n = A,T,C or G

SEQ ID NO: 20985 - DNA, 633 bp, Homo sapiens; identical to SEQ ID NO: 20941
  misc_feature 1, 2, 598, 632, 633: n = A,T,C or G

SEQ ID NO: 20986 - DNA, 409 bp, Homo sapiens
  misc_feature 402, 403, 404, 405, 406, 407, 408, 409: n = A,T,C or G
gacaggccaggcctcacaaccaagagccccgggaagagctgcatgcacacggctggagagaggctctgcacccgagcacagtctgctgcgactcctcatagacccggaaaactgattagaaggcagaggtgagtttctgagggtggctgtgcacaaaattcagagtcaggaatcagcatctttcaaattcaagcacttccagttaggagagacaatgaagaaagaaaagggaccattcccaacagcaacaaaaattgtaaatttctaggagcaaacggcgggcacatctatacctgttatagagggtctgaggcctgactgaggaccacagaccatcaacaagcccggtctgtcctgggcgtaacgaggtgccgtcccttgtgctggccggctgccacagcnnnnnnnn

SEQ ID NO: 20987 - DNA, 379 bp, Homo sapiens
  misc_feature 379: n = A,T,C or G
acataattggagatgaataatgattctcttagataaagaaacttgtccacccacctctaccacaaatgaaaatcctttttcttatagaactttttggccaagcaaaggctcatgatatctgtaatatctgtgatagagaaagcagtgaggataagttcttattccacagttccagcatgaaattctagaatgatgattggccttttctgttcactttcactctcttggagggaaggaggaatgtgaataattgaaaaacgagttacaactcaaacaaaacacatatgaatttggctttgctctgtggtgaatcccacaactcgatagtgccctccactcttttctgtctatccttaactcaaacctctgtctagttgan

SEQ ID NO: 20988 - DNA, 1275 bp, Homo sapiens; identical to SEQ ID NO: 20967
  misc_feature 1273, 1274, 1275: n = A,T,C or G

SEQ ID NO: 20989 - DNA, 546 bp, Homo sapiens; identical to SEQ ID NO: 20353

SEQ ID NO: 20990 - DNA, 493 bp, Homo sapiens; identical to SEQ ID NO: 20976
  misc_feature 487, 488, 489, 490, 491, 492, 493: n = A,T,C or G

SEQ ID NO: 20991 - DNA, 505 bp, Homo sapiens; identical to SEQ ID NO: 20929

SEQ ID NO: 20992 - DNA, 479 bp, Homo sapiens; identical to SEQ ID NO: 20927

SEQ ID NO: 20993 - DNA, 1274 bp, Homo sapiens; identical to SEQ ID NO: 20926
  misc_feature 1271, 1272, 1273, 1274: n = A,T,C or G

SEQ ID NO: 20994 - DNA, 391 bp, Homo sapiens
ttcccatttactgtctcattctcctagtcctccagtaaaccttccctgaccacttctctctacaatagttttatggtggcatttcttataatgtacagttacgtttgttgtttcctagtatctagtgcagaccttggctacacttgagtttgaatgcctactttgggcaaggtgctgagaatgagtataggtcctttatctataaactgactgctgctggttaccttttaataataattactccttggtggctcacacctgtaatcccagcactttgggaggcggaggcaggtggatcacttgaggtcaggagctcaagaccagcctggccaacatggtgaaaccctgtctctactaaacatacaaaaattagctgggtgtggtggcaggt

SEQ ID NO: 20995 - DNA, 505 bp, Homo sapiens; identical to SEQ ID NO: 20929

SEQ ID NO: 20996 - DNA, 1972 bp, Homo sapiens
  misc_feature 1935: n = A,T,C or G
cgtccgcgtcgagcgatgggtgagtgtcgctctgcattgaggcgggtgaagggaggttgagctcaatcaggccccatcctgcttcacagcctactgaggagtccagacgccccgacccccggccagggacagccacgaggagtggtggccctcgggtttcggccgcccagcccgtctctgggggctgcgaaggctctgggctccgggttccgggccgcgggctgcgggctccgagcggcgccaacatggctgccgcgaggaggaggccccggcctggccgcacgtgtatgatgacaactcggtaatgctgcatactcccgagtgcgcggtggggaagccaaccttggagagctgagcgtgcgaccggcccggcgcgggggtctccgggagctggcgagtcgctagcaccgagtcacagtggctcaagcttccttccccgcttccacatgcaggcatctctcgggacaactggcacaagcgccgcaaaaccgggggcaagagaaagccctaccacaagaagcggaagtatgagttggggcgcccagctgccaacaccaagattggcccccgccgcatccacacagtccgtgtgcggggaggtaacaagaaataccgtgccctgaggttggacgtggggaatttctcctggggctcagagtgttgtactcgtaaaacaaggatcatcgatgttgtctacaatgcatctaataacgagctggttcgtaccaagaccctggtgaagaattgcatcgtgctcatcgacagcacacccgtaccgacagtggtacgagtcccactatgcgctgcccctggggcccgcaagaagggagccaagctgacttcctgaggaagaagagattttaaacaaaaaacgatctaaaaaaattcagaagaaatatgatgaaaggaaaaagaatgccaaaatcagcagtctcctggaggagcagttccagcagggcaagcttcttggtgagaaggctgttgtgttggaggtggggagtcgcagagattgagtgtggccgaggcacttttcccttgtctcagttcctttgactgccagccatgcagtctaaagggttcactgataacaggctgcgagcacaaaggggaacgtttggtcaccctattcgtatgaagctgaaatgggaagcattgggtagaagagtctgcataggcccgtgcttggagtctttgtatttggggaagtctctgcccaggctgagggggctgtctcagtgatgaaaactttgtccagttctgctactgacagtaagtgaagataaagtgtgtctgaggagacagctggcttcatgcttgcccccagggtacctgaacccacagagattcttaaggcgggtggagaggtttgggtagggccaccttgtcgttgtgctaaggatcacctactctcttgcagcgtgcatcgcttcaaggccgggacagtgtggccgagcagatggctatgtgctagagggcaaagagttggagttctatcttaggaaaatcaaggcccgcaaaggcaaataaatccttgttttgtcttcacccatgtaatatcaagaaaaaaaaacaaagttcacagcagaagtgttttatacatacttcccatttcatcatacagattaaagttgtgtagtcacaggttgaaattcaataaatattttttactccctcatcaacaacactcttcaatgaaactgtctttaactctaagtgtgtaacagtgaagaatacagtacacttttgtgccacagccttgatttctattaaggcaccagcagttttaccatccattgcttttgtaccatcattgtaaaatttacagtgaaaaaggcaagttatgtcttagtatgttatggggccatagggttcccagattaaacattatatttctgggtttctctgtgagggtgtttctggataagattagcattngaatcagaggacagtatcctgccatccccaatgtgag

SEQ ID NO: 20997 - DNA, 271 bp, Homo sapiens
  misc_feature 271: n = A,T,C or G
actgttttcctgatcttactgtttaattcgaatcagataagagaaaaataaagaccctgactatctccatctctatcatttaggtttaactgcgtaagaaacaactgcaaaaccagtggctaaaaacaataaagaattattaggtaatgatgtgggttggaaattttcctgggatctgctggaccttgctttgctgctgttgccttgactcacttgtgcagcgccactctgcttggaacttccctgataagctagcagatggcttgggcan

SEQ ID NO: 20998 - DNA, 662 bp, Homo sapiens
acgcgggattgctatgttggatgatttggagcatgcagaggcagatacagtagtagaatcagctttctgcctccatcttttactccgctccctgtcgctctttaactcagcagtttttctctctcagtctcccaacttgtgtgagtgttttatattctacataaattgagggtggagggcaacttctggttgtgttgaatgaggagattggcagaattgacaaaagcaaaatgaaacaatctcagcattctggaaaaattgagcaggggcatacaacaatctgagaagtatttatgcctgtaactgctgaatttcaggtgagaacagtgagactgtatggcatttggcctggagctattcctatgccctctcccatctgtttggtaaagaggttctgtccagccactgtcagctgtgaggaccaacagcttcgctgtgtgggtgaaaaggaggactgttcattttagagtggtagcaaccctgcctgtggtcttgtagatgagagtgacagtcttggagatgggcaagtggggagacacagcggctctgttttagcccaaggttggggcaagatagaaaaactatttgaagaaataatgggcaaaaacatacttgaggagaaactcatccaggaatcccaacaaaccctaaatagcataagt

SEQ ID NO: 20999 - DNA, 681 bp, Homo sapiens
  misc_feature 1, 2, 3, 4, 5, 6, 7, 8, 9, 10, 675, 676, 677, 678, 679, 680,681: n = A,T,C or G
nnnnnnnnnnatagtgtataaacaatattaccctaacaacaccaggcttcgagagaggagaggcccagggcagacactctaggagaaaaacttgagtggtataagtggagttttaatttttattctgtgaatgtagtggaataatacccatgcaaattagaaaccgtgaaagtataaatggaagtaacaactttccattcctggaagcctgttggatgttgagcaggtctgccaggagttagaagaccattccggaagagctgactccagcctgtccatgcacggctacaatgtttaggattggggggagacagctctggaagcagagcgtcactcgagttttaacgcaaagactgaagggagaggaggaagccaagcgggctcctttggatgcgaggcataactacttatttgcaattgtggcttcctgtttggacctgaacaaaaccgaagtggaggatgccattcttgaagggaatcagattgaaagaattgatcaactttttgctgttggaggtctccgacacctcatgttttactatcaagatgtggaggaagcagaaacaggacaacttggctctctaggaggggtaaatcttgtttctggaaagattaaaaaacctaaggtgttcgtgaccgagggaaacgatgtggctcttactggggtatgtgtgnnnnnnn

SEQ ID NO: 21000 - DNA, 435 bp, Homo sapiens; identical to SEQ ID NO: 20934
  misc_feature 429, 430, 431, 432, 433, 434, 435: n = A,T,C or G

SEQ ID NO: 21001 - DNA, 763 bp, Homo sapiens
  misc_feature 1, 2, 759, 760, 761, 762, 763: n = A,T,C or G
nnggccaccctcagggagataggtcccaggagcaacatgggacattttatttccgggccagttttgcttttctgagtagtagttttctctgcttttattatttcacatatctctgttttgaaaaatagcttttgcagtaatgagcttcagaattgcttttagccattatttcattttcagctaaggcctagtatgtctttacctttttgtgttggtctctgaaatgtgatttatgaaggtatggccatctcattttctaatcaccttttggtatttaggggcttaaaatgacagtttctgaaatgtgagagtgatgatgtgctgtgtatttaataacagagatctcttatccttgcagctgtgacccatactcttctgtgaaatgattttgtgaatacaaatgagttggggattcactgtgaagtgaaaagaaagagcactggattgggagtggatgatagtcctgttctgccatgagttggctgagtgactttgggctggtcactttacctctctgggcttcatctgcaaaacggaagcatcagactaaagtccctgaggcttgcccagttctaatagccttcctcccttatatttgaaatcacttttagagtattgggttgtgctgtgtttaattagcaccaggaaccaaagggggaaaaatggccattatgttgcaagcctgagtacatctttaccctggatggccattgcccttcgtagcctgggtttgtttttgtgtctttagcaccattcacnnnnn

SEQ ID NO: 21002 - DNA, 3351 bp, Homo sapiens; identical to SEQ ID NO: 20872
  misc_feature 1, 3351: n = A,T,C or G

SEQ ID NO: 21003 - DNA, 698 bp, Homo sapiens
  misc_feature 697, 698: n = A,T,C or G
tgtttcgactatgtgtgttgtattaataatatgtatctcatgttatccagactggtgactggacatggttgaaagagttttatcaaagactcattgatcagaagtggcagaggaagaaaaagagcaaagagcactggtatcaaaaggcaattctttccaagtttttatattacagtatcaatggtgatggagccgctcagcctgtctcatccaccgcagaacagcaggaatcgtccagttcagatcagacaaatgattcggaaggggcttcatggcctgctcccttcgaaatgccttcttcagtttctgaagatcccagtgcttccagtcagggtcttaaaaatgattttgttcggaatattctatggacatttgaagatatccatatgttggtcggctccaacatgcccatatttggaggaggcagatacccagcagtcagcttacgtctcagggataacaacaaaccaattaatgtgctaactggaattgactattggttggacaacttgatatgcaatgtgccagagcttgtgatgtgttttcatgtaaatggaattgtacagaaatatgaaatgataaagacagaagaaattcccaatttggaaaattctaatttttctactaaagtcataaaagacattgcacaaaatattttatcatttttgaaatctaattgtaccaaagaaggacatann

SEQ ID NO: 21004 - DNA, 505 bp, Homo sapiens; identical to SEQ ID NO: 20929

SEQ ID NO: 21005 - DNA, 505 bp, Homo sapiens; identical to SEQ ID NO: 20929

SEQ ID NO: 21006 - DNA, 1274 bp, Homo sapiens; identical to SEQ ID NO: 20926
  misc_feature 1271, 1272, 1273, 1274: n = A,T,C or G

SEQ ID NO: 21007 - DNA, 1896 bp, Homo sapiens
  misc_feature 1, 2: n = A,T,C or G
nnctgtccatcaagagtccaaattcctggtttgagttttcaggaaatgtgcacagagggagtaacgtcatgcgcaaggtaccccagagtgtgtaatcttaggtaagccatcccagcatttctgcacatgttgatagggaactgaagactgtttggacttgctcgatcttgcccaccttctccaaccctcacgcagagattccaatcaaaagtccagctctgtgccatgtgccaattgtcatcggaatgtggtcatacctctggtggtgctttcagaatatcagtggcaacagtatgacagggatagtcagcaaaacagaagatctctggatttataagggaatgttgaatgaaggagagctggccttcagcatgtttccaaggtctatatatgaggtctactgggaacacttccatacccaaacccctctgaatgccataaaccacattatgaagtcctttactgtcacgaatttgaaatccaggatggtccagttcataagttacttccttgaaattcaaacttggattcagttctttaagaacgtcaatcaagacttctacattgccatgtgtgtgcctgtgctccatcacttttatctttcccatcactccagatcccactgcccggagcagaaatactctgtaatggaatgccatctgttaaccctgaatgagttcgagccatcattcccaaaacccttgcaacctgggcagctgtgacctcccgaacaccaaactgcacgattatattgcgacattcttcaatacttgcacaaaagccatagcctacttcttgcatgaaatcagccaaagagctctccatcatggttttagctacccctccggaatcaggcaggatcctgtccattagaatgtcccgtttttcagggtataaaagtggtgcgagcaccacgggacagcgttcttggggaaaatctctgcgcagcgtcttaagaaaagcgtctatctgttcttgtccaactccaaaggctcccttctgcccaaagaggagatgggagaggaggaggtgtaggacctctattgctatatcttggaagccaccttcttgatttccactgacgtctgcgtcaatgtaagaacgcagaagatctggaagcttctgtttgataaactgggcagcgaaacctctaagatctgagctggaagaattcaacagggcaaggccaaaaattacctcttgtactttgcttaatttgagcactttactcagctgggcaaataagtggggtgcaggctttaaactcttctgatagtgcaatggattatcaatggcataggacagcgtcgagataaaatttggctttgtaatcagcaacgcacactcctgaatcagaaactgagtctgatggaaatctttgccactgcttttaccatcgccactgaaatccacatgcgaaaataggcagcgtaataaatgcctgtctgcctcaggaccgtgccgattcacaatatgctgtatttcctgctggctggctcggtaatttttcttggttaaattgtccaccaggtagctgatttgagacaaggccagcgagagcgagtcaagattcattgctggttggggcggaagcaggcggccgagcccggcgcaaaatcaccattattcccctttagtcacctcagaggcaggttaatgctttctttgtaattaggctatatctggtatctgtataatatcttcagttcttctttaccaggggtcttactctgttctgaaacatggcacctcaggcggctccggcagcgctggacacaggaaactcctgggtccccgactccggctctcctcgaccccctcttcggttaactccgcttgtttctctacaaaatggcgccggccgcctacctcggccgccaccgcggtgagctccaa

SEQ ID NO: 21008 - DNA, 596 bp, Homo sapiens
  misc_feature 596: n = A,T,C or G
acgcgggaggccacttaaaattgagacacagtatattaagcagtttttgtaaggtgttagaataaaacttcaataatatcagaaacagaaatgtagaggatgcatgaggaacttactggattttatgacttcatcattatgttatttattacttctgataaataggcttgcttcatctgaatgcaaagtaatatataacctggaatttttaaagttttttttgtttttggcacgagagtatcacaggaaattcaaaggtttaactgcgtaagaaacaactgcaaaaccagtggctaaaaacaataaagaattattaggtaatgatgtgggttggaaattttcctgggatctgctggaccttgctttgctgctgttgccttgactcacttgtgcagcgccactctgcttggaacttccctgataagctagcagatggcttgggcattcaggaaactgagccatgagtatccaaaagcaatgagaaaggacatctaccaatgagcaatcactgcccaagcctcttcctgtcacatttagaaatctcttattatataagccaaaacaagttacatggtcaagatttgagatggggagcn

SEQ ID NO: 21009 - DNA, 4742 bp, Homo sapiens
  misc_feature 1, 4740, 4741, 4742: n = A,T,C or G
nagcgaccacgcgtccgtgataagccacctagaggcgactctgtgcgcgcgcgctccccagtggctcccgcccgccctctgatcatgttgacatattcacaggacaggcagtagtaccgatgcggcgctgcgacgttacagtttccgacaccttctttttataactcagctctatcccccagcactcgacctgtgaaaaccacgcctatgcagcaacacaattggtccgaaagcgtcaaagagccaatcaagaggcctccggctccccgcagcccacagcgcagcccgaccttctagagccgccgagcacgcgtccgcggagggtggcgaggagctctcgctttctctcgctccctccctctccgactccgtctctctctctctctctctctctctcccctccctctctttccctctgttccattttttccccctctaaatcctccctgccctgcgcgcctggacacagatttaggaagcgaattcgctcacgttttaggacaaggaagagagagaggcacgggagaagagcccagcaagatttggattgaaaccgagacaccctccggaggctcggagcagaggaaggaggaggagggcggcgaacggaagccagtttgcaattcaagttttgatagcgctggtagaagggggtttaaatcagatttttttttttttaaaggagagagactttttccgctctctcgctccctgttaaagccgggtctagcacagctgcagacgccaccagcgagaaagagggagaggaagacagatagggggcgggggaagaagaaaaagaaaggtaaaaagtcttctaggagaacctttcacatttgcaacaaaagacctaggggctggagagagattcctgggacgcagggctggagtgtctatttcgagctcagcggcagggctcgggcgcgagtcgagaccctgctcgctcctctcgcttctgaaaccgacgttcaggagcggctttttaaaaacgcaaggcacaaggacggtcacccgcgcgactatgtttgctgatttttcgccttgccctctttaaaagcggcctcccattctccaaaagacacttcccctcctccctttgaagtgcattagttgtgatttctgcctccttttcttttttctttcttttttgttttgctttttccccccttttgaattatgtgctgctgttaaacaacaacaaaaaaacaacaaaacacagcagctgcggacttgtccccggctggagcccagcgccccgcctggagtggatgagcctctccatgagagatccggtcattcctgggacaagcatggcctaccatccgttcctacctcaccgggcgccggacttcgccatgagcgcggtgctgggtcaccagccgccgttcttccccgcgctgacgctgcctcccaacggcgcggcggcgctctcgctgccgggcgccctggccaagccgatcatggatcaattggtgggggcggccgagaccggcatcccgttctcctccctggggccccaggcgcatctgaggcctttgaagaccatggagcccgaagaagaggtggaggacgaccccaaggtgcacctggaggctaaagaactttgggatcagtttcacaagcggggcaccgagatggtcattaccaagtcgggaaggcgaatgtttcctccatttaaagtgagatgttctgggctggataaaaaagccaaatacattttattgatggacattatagctgctgatgactgtcgttataaatttcacaattctcggtggatggtggctggtaaggccgaccccgaaatgccaaagaggatgtacattcacccggacagccccgctactggggaacagtggatgtccaaagtcgtcactttccacaaactgaaactcaccaacaacatttcagacaaacatggatttactttggccttcccaagtgatcacgctacgtggcaggggaattatagttttggtactcagactatattgaactccatgcacaaataccagccccggttccacattgtaagagccaatgacatcttgaaactcccttatagtacatttcggacatacttgttccccgaaactgaattcatcgctgtgactgcataccagaatgataagataacccagttaaaaatagacaacaacccttttgcaaaaggtttccgggacactggaaatggccgaagagaaaaaagaaaacagctcaccctgcagtccatgagggtgtttgatgaaagacacaaaaaggagaatgggacctctgatgagtcctccagtgaacaagcagctttcaactgcttcgcccaggcttcttctccagccgcctccactgtagggacatcgaacctcaaagatttatgtcccagcgagggtgagagcgacgccgaggccgagagcaaagaggagcatggccccgaggcctgcgacgcggccaagatctccaccaccacgtcggaggagccctgccgtgacaagggcagccccgcggtcaaggctcaccttttcgctgctgagcggccccgggacagcgggcggctggacaaagcgtcgcccgactcacgccatagccccgccaccatctcgtccagcactcgcggcctgggcgcggaggagcgcaggagcccggttcgcgagggcacagcgccggccaaggtggaagaggcgcgcgcgctcccgggcaaggaggccttcgcgccgctcacggtgcagacggacgcggctcgcagctcggtgcaccgccaccccttccgcaatctgaacaccatgcgcccgcggctgcgctacagcccctactccatcccggtgccggtcccggacggcatggacggcaaagtcgccgccctggccgccagcccggcctcggtggcagtggactcgggctctgaactcaacagccgctcctccacgctctcctccagctccatgtccttgtcgcccaaactctgcgcggagaaagaggcggccaccagcgaactgcagagcatccagcggttggttagcggcttggaagccaagccggacaggtcccgcagcgcgtccccgtagacccgtcccagacacgtcttttcattccagtccagttcaggctgccgtgcactttgtcggatataaaataaaccacgggcccgccatggcgttagcccttccttttgcagttgcgtctgggaaggggccccggactccctcgagagaatgtgctagagacagcccctgtcttcttggcgtggtttatatgtccgggatctggatcagattctgggggctcagaaacgtcggttgcattgagctactgggggtaggagttccaacatttatgtccagagcaacttccagcaaggctggtctgggtctctgcccaccaggcggggaggtgttcaaagacatctccctcagtgcggatttatatatatatttttccttcactgtgtcaagtggaaacaaaaacaaaatctttcaaaaaaaaaatcgggacaagtgaacacattaacatgattctgtttgtgcagattaaaaactttatagggacttgcattatcggttctcaataaattactgagcagctttgtttggggagggaagtccctaccatccttgtttagtctatattaagaaaatctgtgtctttttaatattcttgtgatgttttcagagccgctgtaggtctcttcttgcatgtccacagtaatgtatttgtggtttttattttgaacgcttgcttttagagagaaaacaatatagccccctacccttttcccaatcctttgccctcaaatcagtgacccaagggagggggggatttaaagggaaggagtgggcaaaacacataaaatgaatttattatatctaagctctgtagcaggattcatgtcgttctttgacagttctttctctttcctgtatatgcaataacaaggttttaaaaaaataataaagaagtgagactattagacaaagtatttatgtaattatttgataactcttgtaaataggtggaatatgaatgcttggaaaattaaactttaatttattgacattgtacatagctctgtgtaaatagaattgcaactgtcaggttttgtgttcttgttttcctttagttgggtttatttccaggtcacagaattgctgttaacactagaaaacacacttcctgcaccaacaccaataccctttcaaaagagttgtctgcaacatttttgttttcttttttaatgtccaaaagtgggggaaagtgctatttcctattttcaccaaaattggggaaggagtgccactttccagctccacttcaaattccttaaaatataactgagattgctgtggggagggaggagggcagaggctgcggtttgactttttaatttttcttttgttatttgtatttgctagtctctgatttcctcaaaacgaagtggaatttactactgttgtcagtatcggtgttttgaattggtgcctgcctatagagatatattcacagttcaaaagtcaggtgctgagagatggtttaaagacaaattcatgaaggtatattttgtgttatagttgttgatgagttctttggttttctgtatttttccccctctctttaaaacatcactgaaatttcaataaatttttattgaaatgtcaaaaaaaaaaaaaaagaaaacctctgggcgggcccggtcgcatgatcctttggtgggcggttccaattactggtcggctttaccaccctggaccnnn

SEQ ID NO: 21010 - DNA, 871 bp, Homo sapiens
  misc_feature 1, 2, 3, 4, 5, 6, 7, 8, 9, 871: n = A,T,C or G
nnnnnnnnncgcagagttgggagaaggcagggtggggggtgtggaaaaataaaaggaaaagtccttgcaccatgtagatcagcgtcccccactttggcatcccggccggccggggacctcccagtctgcggccatgaacgcgagcagcgagggcgagagcttcgcgggctcggtgcaaattccaggtggcacaacggtgctggtggagctgactcccgacatccatatctgcggcatctgcaagcagcagtttaacaacctggatgcctttgtagctcacaagcaaagtggctgccagctgacaggcacatccgcagcagcccccagcacggtccagttgtatcggaggaaacagtgcctgccacccagactcagaccaccaccagaaccatcacctcggagacccagacaatcacagatggagcctcgctctgttgcccaggctggagcgcaatgacgcgatcttggccactgcaacctccgcctcccgggttcaagcaattctgcctcagcctcccgagtggctgggattacaggtacccaccacacgcccagctaattttgtatttttagtagagacaaagttttgccatgttggcaggctggtctcgaactcccgactcaggtgatccgctgctcagcaacaaaagtgttgggattacaggcgtgagccacgtcccgggcctaaaatatattttctatatattaaaagaggttagcctttagtgatcttaattaacaatgttctttgagctcctcccttcacctggtctgtggtggtggccggggcacgcggggccgaaacacggtggggcccttatctctcgcaaaaaaaaagctttaatttaaatttacacgaggagggggtaan

SEQ ID NO: 21011 - DNA, 638 bp, Homo sapiens
atagctgtttcctgtgagaaaaagaacggccagaagcatgggccatcggtgttccctgtgatgaaaaaaatggaattcgccgtgcggccggccgcccggccaggtacagatgtccagtagacctactggatatgcaggcctgcagctcaggggagagctgggttaagaaccgtcaaggcagtaatcatctgcatttagatggcgagtgaagccatgacaggggctgaaatggcccagcaagaataaatcaaaccatgagaaacacatacatttaagaataaggagatgtggtcaggcgcggtggctcacacctgtaatcccagcactttgggaggccgaggcgggtggatcacttgaggtcagtagtttgagaccagcctgggcaacctagtgaaatcccgtctctgctaaaaatacagaacttagctgggtgtggtggtgcgtgcctatagtcccagctgcttgggaggctgaggcacaagaatcgcttgaacccgggaggtggaagctgcagtgagccgagatcacaccaccgcactccagcctgggcaacagagaaacaacctgtcccaaaaaaaataataataaggagatgtcatgggctcgggggagggggaaatggggagcgctgttgtttg

SEQ ID NO: 21012 - DNA, 905 bp, Homo sapiens; identical to SEQ ID NO: 20936
  misc_feature 904, 905: n = A,T,C or G

SEQ ID NO: 21013 - DNA, 745 bp, Homo sapiens; identical to SEQ ID NO: 20943
  misc_feature 1, 2, 3, 4, 5, 6, 7, 8, 9, 10, 11, 12, 741, 742, 743, 744,745: n = A,T,C or G

SEQ ID NO: 21014 - DNA, 368 bp, Homo sapiens
  misc_feature 364, 365, 366, 367, 368: n = A,T,C or G
aatatttgcttttaaacatttgattttcatcaatctttggatgatttgactttattgtcaatatctagtaaatttgccaaaatattttttttattccttgctcccctttatcccactaaaaacttgggcgggtagaattttctgttttcctaaacaggaaggaggcaaagctggtttcaccttgtcgtctaactgtaagcccataaaggaaatattggtccaaaattttgcttgagcaaagttctattaattcatttgtacccaagaaatttaattcaagaaacttaaatatgtagtgaaaaaaaaataataattttttttaacaagaaaaaaatattctagcttaaaagtcaaagtaaaaacnnnnn

SEQ ID NO: 21015 - DNA, 1189 bp, Homo sapiens; identical to SEQ ID NO: 20185
  misc_feature 1179, 1180, 1181, 1182, 1183, 1184, 1185, 1186, 1187, 1188,1189: n = A,T,C or G

SEQ ID NO: 21016 - DNA, 505 bp, Homo sapiens; identical to SEQ ID NO: 20929

SEQ ID NO: 21017 - DNA, 505 bp, Homo sapiens; identical to SEQ ID NO: 20929

SEQ ID NO: 21018 - DNA, 5893 bp, Homo sapiens
  misc_feature 1, 2, 3, 4, 5, 6, 7, 8, 9, 10, 11, 12, 13, 14, 15, 16, 17,18, 19, 20, 21, 22, 23, 24, 25, 5892, 5893: n = A,T,C or G
nnnnnnnnnnnnnnnnnnnnnnnnnacccctggcggtcctcctggctggggtccgcgcgctcgcggcagctccccgtggaggtcactgtccgtgccagtccctcccgctgtcccgccctctcccgctgccgccgccgccgccgccgcgcccgcctcagcgcccccactccgcgcttgggagcgaggagccgccagcgcccccgccccgccgccgccgcagcgccctcaggccgccattcgccaccgaaactttccagcgcccgcgctctctccgggactcggcggcggcggggcgggggcggcccgggggcggcgcgcggctgctccggggcgccgggccctcttcggccgccgcacggccgggactcggaggctgccggctggagggaggttcggagcgcggccgggcgcgcggcgccgccacaagttgcgctgctcgcgacgagatttccgtgagggtggaagaaaatcataccatatcagatgcctcgcagagcaccaggcccaccgtgaaaggctggtccctgcagacggcttcccatttttatgaccggatgctgggaagcctgctggtccacaggtccatacatgaagtcaccataaggagccctggcctccttgcagaaacatcgaggtgacatgtagcatgaccgagctcgctggcgcctcttcatcgtgctgccaccgccctgcaggaagaggggccatgcagtcagtcttgcaccactttcaacgtttgcgagggagagagggtggttcccacttcatcaacacctcatcgccgcgaggtgaggctaagatgagcataaccagtgacgaggtgaactttctggtgtatcggtatctccaggagtcaggtttttcccactcggctttcacgtttgggattgagagccacatcagccagtccaacatcaatgggacgctagtgccaccggccgccctcatctccattctccagaagggcctgcagtatgtagaggccgagatcagtatcaacgaggatggcacagtgttcgacggccgccccatagagtccctgtcactgatagacgccgtgatgcccgacgtggtgcagacgcggcagcaggcattccgagagaagctcgctcagcagcaagccagtgcggcggcggcggcggctgcggccacggcagcagcgacagcagccaccacgacctcagccggcgtttcccaccaaaatccatcgaagaacagagaggccacggtgaatggggaagagaacagagcacattcagtcaataatcacgcgaagccaatggaaatagatggagaggttgagattccatccagcaaagccacagtccttcggggccatgagtctgaggtgttcatttgtgcctggaatcctgtcagtgatttgctagcctccggatctggagactcaactgcaaggatatggaacctgaatgagaatagcaacgggggctccacccagctcgtgttgaggcactgtatacgagaggggggccatgacgtcccgagtaacaaagacgtcacctcactggactggaataccaatggaacactcttggctacgggttcatatgacggttttgcaagaatatggacggaagatggtaacctggccagcaccttaggccaacataaaggccccatctttgccttgaaatggaaccgaaaggggaattacattttgagtgctggtgtagacaaaacaacaataatttgggatgcccacacaggagaagccaaacagcagtttccttttcattcagcccctgcccttgatgtggactggcagaacaacacgacctttgcctcctgtagcacagacatgtgtatccatgtgtgcaggctcggctgtgaccgcccagtcaaaaccttccagggacacacaaacgaggtcaacgccatcaaatgggatccgtctggaatgttgctggcatcctgctcggatgacatgacattgaagatctggagcatgaaacaggaggtgtgcatccatgatcttcaggctcacaataaagagatctacaccatcaagtggagccccactgggcccgccaccagcaacccaaactccaacatcatgttggcaagtgcttcgtttgattctacggtgcgactgtgggacatagaacgaggcgtctgcacccacacgctcacgaagcatcaggagcctgtctatagcgtagctttcagccctgatgggaagtacttggccagtggatccttcgacaagtgcgtccatatctggaatactcagagtggaaatcttgtccacagctaccgaggcactggcggcatcttcgaggtgtgctggaacgcccgaggagacaaagtgggtgccagcgcgtccgacggctctgtgtgtgttttggatctgcggaagtaaccacaaaatattatcgaaaaaagaaaagaattctaatgaccagccgtgaatgtgtagggttgcagctctattctccaaaactgtaggaacttgacttgcgttagagtgtactctgaaaccaactcgtctctggccgcaggagtctatatgttttcgtaatcttcatcaagaagtttttaaaaggcaagcaaaaacagaagcaaatcatatcaaacggggatagaatggtttccactgaggacattcagcctgggaaggaggaagtcaccagctcgaggcgtgtggattggtttccacccggaacaggctctgtgatggctgaatggaaagaaacgtaaaaagctgtgccaaaaaaaaagcaaaatgctgtgataaaccaaacagggaagggggaaaaaccctcctccttgggatttttttttttttgttttccctaacaatttggacactacaattgctctcacaaaggaggttcaaagaccagtttgtaccgatgaaacgcgcaactttgtaatcccaacactttctattttctagaatcttctttgttcattgggtggtttttcagtcggctggaattctatcttctgggggccttccgtctgagatggaagctgtcttgggcttgttgtctcttccttctgttgctccctgcccctccccctgcctttccactctgtctggtgagctctgctttttcagtgcaccatcaagagatgcagccccgtggacatgaagacacaatctcccacggacagctttcccccttccgccctctcccaccctctcctccccttgcgctcgcgctcgcgctcgctttctcactggcgtgctctctttctctctctctctccctctgtacctttctcatagttgcttcagatcttaggtctcaagggcactttggcgcgtagtaagtgctttatgtaagaaggcagggcaggggggctttttacaggagaaaaaaaaatgacttataagagaaagagcctggagtatttttggaaaaaaaaataatatttttatgttaaaacaattttaaaatcttaaaatggccatcagacatagagagctttgtgtgattcatgttttaaaaagaaccgaagaagccacaggcagggcctgagggagcccctggctttcccctcagcctcaggaaaggtggtcaggaaaactctggctggacaagggtcagtcttcggggtcagcagcgagattgctctgcagccagtgagggaggtccccgccatgccggctggaagaagaacctcgcatcttttggtgtgtatgcaccttggcagccagcaggaaagcagcgaagagccgcgcgccctctggcctcaagggagcattggcagaaccataaggtactgcagaagccgtcgaaaccgactgctcggctggattaggcgtgttggctacatctttcccacaaccgtataacgaccgatggtcatttctccaagagcaggcttggcgagtccttgcagagctgacatagaggcgcccgcatgtcacttagtctaacgctgacagaaatgaatgcagaaggaagattttcagtcctgaacgtgaattatagaggtagaacgtcgctaataatttctgccatctttataatttctttgtctcacagaagactaggagaaagatcttttttaaataatctttttgctgtttttaaaaaattaaacaaggctttgtgttcctagaagagcttcatttcagtgaatctggtgacctccatctgcttgctgtcataacccgacacggacttatttttgtcattagcaagggggaaaaggccaaaggacaagggcctcttctcccattggttttcctgtgggcagaagggctgaggaagatggcccagcccgtgggggctgctgggtcaccagcagtgggtagggtgcaatctggtgtgtgttccagcagtgagacggtgttattgtgaaggtggcattcatctgcggagccaaaacccagccatcggggaagggtcagggcttctgtggaacttggaacgtgccaggaccacctgcaaaagccagggtgcgttgatcattctcagatcattgattggcctccacttgggtatgtgaattattcatgtcccagaagaccaaaaagtgctctggttctgagatgagtattttattcgtgttctgtttccgaaacacttagcaaagaaggtcacagtgatgtggagtcgccgcacccatctttgaagatagccagtgtccctggatgaggtgatgatttcccgtcccaaggactctgtgaagtttagagtacagtttgttggggtccaaaagacaccatctctaccccacccaaataaaaatgcactcatctctgtagaacatctgctgtcaaaggccagcctgtcgttagggcatggcttatgcttgacaaaccagtaacaactgtgggatggcgatggtgggatgtgtcgcaagcaattcactagacaatcttcacatgaatgtcggtagccagggtctctcccgagggatggctttagtcttgatgaatgtgaaccatgtcggaattgttaggtagaaacctgggctgggaggcctcggaccccaggctccatccctggcttccccagcctgcggccgcaagcaaaaccaagcgcgagatgcagctagcacccttcatatccatccccgttctcagcgggacaacaccatggacagccgttttcagagcctccagcatttgcacaccactactcaccctctctgctgctggcatgttggtagagtcatccctgtaatcaagaaatggcctgtggaatgttattgttcaacgttgtttacagctcttaaaacatggtgaggaatgcctaagtcttagtgaccaaacgtgaccttgaaagcagacatagcatgacagaccttcctagagtgtttggtcgggttcacagtgaccgagagtcaggtccagcacacacctgggaaagggatgctgccccaagggggaccaaaagggccggacgttacagggtgaaaccctctgacccctcgcgacaccgtaggacttgacttttgtttagtctttctaagaaatagatcatggagccaagtgaagtgcactttgtcaaatgtaagggtctgctttgttcttgttgcttttctgttttttaaccttttgttccgccatttaaaaaaagaaaaaaaaaaagcttatgtttcttgtcaaatgcagaaatgttccttccgccactcactgaagttttgcattctggcttgtgcagtttttattgtctgtgtcagacgtacagccagacatgttctctattggcatttttccgattctgttcagatgacagcgaccgccttttcattccccccgccacctgtactcaccctcacgctctttgaagaaaaaaaaaaaaatcaccttgtgtgttgtagctcatttgtttcaagagagaatcaacagatcatattcagtgtcttgaataaattgctctattttgatattaaaaaaaaaaaaaaaaaaann

SEQ ID NO: 21019 - DNA, 1275 bp, Homo sapiens; identical to SEQ ID NO: 20967
  misc_feature 1273, 1274, 1275: n = A,T,C or G

SEQ ID NO: 21020 - DNA, 516 bp, Homo sapiens
  misc_feature 1, 2, 3, 516: n = A,T,C or G
nnngcatcagctagaataatggagcatatatagcatcacaaagcgtgattgcaacacagcatctaaagatgaggctcaaggatgtgataccgtgtctaccacagatgaatgagtagtgcccatgacagcaaaataacatacctgggaagtccagactaatatctgataaaggatactgctgtcattactaagcatattgaatttggctgaacgctgacatatgagtggaaaacgaccatgaaatgtcatccaccaatcctggatctggggagctctggaggtggagagagaacttttaagatgcattaatgttatgtaagcaacatacgatggtatctggaacttaacaggagtccataattgctgccagaattattagcatagaattcggttttaaacattgactaaattgaatgggcgaggtgggggaggcatggcgccagttaaatagccaggagaggctggactggggacagaaaagtgtgcttgactgcacaagaaatcagagataatggn

SEQ ID NO: 21021 - DNA, 579 bp, Homo sapiens; identical to SEQ ID NO: 20440
  misc_feature 1, 2, 578, 579: n = A,T,C or G

SEQ ID NO: 21022 - DNA, 505 bp, Homo sapiens; identical to SEQ ID NO: 20929

SEQ ID NO: 21023 - DNA, 748 bp, Homo sapiens
  misc_feature 1: n = A,T,C or G
ncgtccgcttaatcccatctgcgtgtttcttcagctatgtattctaataatctgctaaagtagaaagtaaaagacctgctattttatctcattgggaccgtacgttttagagatcgggaagtaaacagtccactaaccctgccgataactatcatctggcccggaggagaaccctgcaggtggttgtgagctccttgctgacagaggcagggtttgagagtgccgagaaagcatccgtggaaacgctgacagagatgctgcagagctacatttcagaaattgggagaagtgccaagtcttactgtgagcacacagccaggacccagcccacactgtccgatatcgtggtcacacttgttgagatgggtttcaatgtggacactctccctgcttatgcaaaacggtctcagaggatggtcatcactgctctgattgctgccagacctttcaccatcccctacctgacagctcttcttccgtctgaactggagatgcaacaaatggaagagacagattcctcggagcaggatgaacagacagacacagagaaccttgctcttcatatcagcatggaggattctggagccgagaaggagaacacctctgtcctgcagcagaacccctccttgtcgggtagccggaatggggaggagaacatcatcgataacccttatctgcgaccggtgaagaagcccaagatccgcaggaagaagtccctctcctgagctgagaaggaaacctggcttgt

SEQ ID NO: 21024 - DNA, 505 bp, Homo sapiens; identical to SEQ ID NO: 20929

SEQ ID NO: 21025 - DNA, 362 bp, Homo sapiens; identical to SEQ ID NO: 20952

SEQ ID NO: 21026 - DNA, 4409 bp, Homo sapiens
  misc_feature 1, 2, 4400, 4401, 4402, 4403, 4404, 4405, 4406, 4407, 4408,4409: n = A,T,C or G
nncgacccacgcgtccgcccacgcgtccgcaacatggctgcggcgcctgggctgctcgtctggctgctcgtgctccggctgccctggcgggtgccgggccagctggaccccagcactggccggcggttctcggagcacaaactctgcgcggacgacgaatgcagcatgttaatgtaccgcggtgaggctcttgaagatttcacaggcccggattgtcgttttgtgaattttaaaaaaggtgatcctgtatatgtttactataaactggcaagaggatggcctgaagtttgggctggaagtgttggacgcacttttggatattttccaaaagatttaatccaggtagttcatgaatataccaaagaagagctacaagttccaacagatgagacggattttgtttgttttgatggaggaagagatgattttcataattataatgtagaagaacttttagggtttttggaactgtacaattctgcagctacagattctgagaaagctgtagaaaaaactttacaggatatggaaaaaaaccctgaattatctaaggaaagggaacctgaacctgaaccagtagaagccaactcagaggaaagtgatagtgtattctcagaaaacactgaggatcttcaggaacagtttacaactcagaagcaccactcccatgcaaacagccaagcaaatcatgctcagggagagcaggcttcatttgaatcttttgaagaaatgctgcaagataaactaaaagtgccagaaagtgaaaacaacaaaaccagcaatagttctcaggtctcaaatgaacaggataagattgatgcctataaacttttgaaaaaagaaatgactctagacttgaaaaccaaatttggctcaacagctgatgcacttgtatctgatgatgagacaaccagactcgttacttcattagaagatgattttgatgaggaattggatactgagtattatgcagttggaaaggaagatgaggagaaccaagaagactttgatgagttgccattacttacctttacagatggggaagatatgaaaactccagcaaagtctggcgttgagaaatatccaacagataaagagcagaattcaaatgaagaggacaaggttcagctaactgtgccccctggcatcaaaaatgatgataaaaatatactaacaacctggggggacactatcttctctattgtcacaggaggtgaagaaacaagagatacgatggatttagagagctctagttcagaggaagaaaaagaagatgatgatgatgcattagtcccagatagcaaacaggggaaaccacagtcagcaacagattatagtgaccctgacaatgtagatgatggtctttttattgtagacattcctaaaacaaataatgacaaagaagtaaacgcagaacatcacattaaaggaaaagggaggggagttcaggaatccaagaggggcctggtacaagatgagacagaattagaggatgaaaatcaagaaggcatgactgtgcacagttctgttcacagcaataacctcaactctatgccagctgctgaaaagggtaaagacacattaaaatcagcttatgatgatacagaaaatgacctaaaaggagcagctattcatatctcaaaaggaatgctccacgaagaaaagcctggagagcagattttggaaggtggctcagagagtgaatctgcacagaaagctgcagggaatcaaatgaatgacagaaagattcaacaggaatccctgggtagtgcaccactcatgggagatgaccaccctaacgcatccagagacagtgtggagggagacgctttggtaaatggggccaaactgcacacgctttcagtggagcatcaacgtgaggaattgaaagaggaattagttcttaaaactcaaaaccaacctagattctcctctccagatgagattgatttgcccagagaactggaagacgaggttcccattctgggaagaaatcttccctggcaacaagaaagagatgtggctgccacagccagtaagcaaatgagtgagaagataaggctctctgagggagaagccaaagaggactccttggatgaagagttttttcatcacaaggcaatgcagggcacagaggtaggacagacagaccaaactgacagcacaggaggaccagctttcctttctaaagtagaagaggatgattatccctctgaagaactactagaggatgaaaacgctataaatgcaaaacggtctaaagaaaaaaacccggggaatcagggcaggcagtttgatgttaatctgcaagtccctgacagagcagttttagggaccattcatccagatccagaaattgaagaaagcaagcaagaaactagtatgattttggatagtgaaaaaacaagtgagactgctgccaaaggggtcaacacaggaggcagggaaccaaatacaatggtggaaaaagaacgccctctggcagataagaaagcacagagaccatttgaacgaagtgacttttctgacagcataaaaattcagactccagaattaggtgaagtgtttcagaataaagattctgattatctgaagaacgacaaccctgaggaacatctgaagacctcagggcttgcaggggagcctgagggagaactctcaaaagaggaccatgagaacacagagaagtacatgggcacagaaagccaggggtctgctgctgcagaacctgaagatgactcgttccactggactccacatacaagtgtagagccagggcatagtgacaagagggaggacttacttatcataagcagcttctttaaagaacaacagtctttgcagcggttccagaagtactttaatgtccatgagctggaagccttgctacaagaaatgtcatcaaaactgaagtcagcgcagcaggagagcctgccctataatatggaaaaagtcctagataaggtcttccgtgcttctgagtcacaaattctgagcatagcagaaaaaatgcttgatactcgtgtggctgaaaatagagatctgggaatgaacgaaaataacatatttgaagaggctgcagtgcttgatgacattcaagacctcatctattttgtcaggtacaagcactccacagcagaggagacagccacactggtgatggcaccacctctagaggaaggcttgggtggagcaatggaagagatgcaaccactgcatgaagataatttctcacgagagaagacagcagaacttaatgtgcaggttcctgaagaacccacccacttggaccaacgtgtgattggggacactcatgcctcagaagtgtcacagaagccaaatactgagaaagacctggacccagggccagttacaacagaagacactcctatggatgctattgatgcaaacaagcaaccagagacagccgccgaagagccggcaagtgtcacacctttggaaaacgcaatccttctaatatattcattcatgttttatttaactaagtcgctagttgctacattgcctgatgatgttcagcctgggcctgatttttatggactgccatggaaacctgtatttatcactgccttcttgggaattgcttcgtttgccattttcttatggagaactgtccttgttgtgagtaaattaatgcatactttaactcataaattcaagtatggttttataatcacagtccttttgtttctttttcagtttctaatatgaacagaaattaatgcttttaattcaagctaaccttgtaaaataatttagtataatttttgtgttggtaaattcttaagtgaataagacaacatgtataatctcaatgggaaaacttcagtttatatgtctcatatcaaagtctaaattttaagaattaggtgggtctgtatttcaactcacaaaggatgaaaagaaagaattagataggtcatatgtacactgttagtagaactaggaattcttagagccatcctgaaaaatagtttcatgatgtgtatgataagccttaaaaatggttatatccttttatattgtattaatgtcatgtctagtaatcgatcctaaagaaataaccagtcagccggcacagtggctcacacctgtaatcccagcactttgagagtccgaggcaggcggatcacttgaggccaggagttcgagaccagcttagccaacatgatgaaaccccatctcttctaaaaatacgaaaattagccaggtgttgtggcacatgcctgtaatcccagctactcgggatgctgaggcagagaatcgcttgaacctgggaggcggaggctgcagtgagctgagatgtgccactgcactccagcctgggtgacagagtgagactccatctcaaaaaaaaaaaaaaaaaaaaaaaaaaaaannnnnnnnnn

SEQ ID NO: 21027 - DNA, 3055 bp, Homo sapiens
  misc_feature 1, 3055: n = A,T,C or G
ntagggagtcacccacgcgtccgcgtaatggggcactggagctggagaggaacgggcatgcttctgaggggatgaccaggcctagagatgccctcgggccagagttgcacaagatcaacctggtggtgtccaaggggatgatgttaggggtctgcggcaacacggggagtggtaagagcagcctgttgtcagccatcctggaggagatgcacttgctcgagggctcggtgggggtgcagggaagcctggcctatgtcccccagcaggcctggatcgtcagcgggaacatcagggagaacatcctcatgggaggcgcatatgacaaggcccgatacctccaggtgctccactgctgctccctgaatcgggacctggaacttctgccctttggagacatgacagagattggagagcggggcctcaacctctctggggggcagaaacagaggatcagcctggcccgcgccgtctattccgaccgtcagatctacctgctggacgaccccctgtctgctgtggacgcccacgtggggaagcacatttttgaggagtgcattaagaagacactcagggggaagacggtcgtcctggtgacccaccagctgcagtacttagaattttgtggccagatcattttgttggaaaatgggaaaatctgtgaaaatggaactcacagtgagttaatgcagaaaaaggggaaatatgcccaacttatccagaagatgcacaaggaagccacttcggacatgttgcaggacacagcaaagatagcagagaagccaaaggtagaaagtcaggctctggccacctccctggaagagtctctcaacggaaatgctgtgccggagcatcagctcacacaggaggaggagatggaagaaggctccttgagttggagggtctaccaccactacatccaggcagctggaggttacatggtctcttgcataattttcttctttgtggtgctgatcgtcttcttaacgatcttcagcttctggtggctgagctactggttggagcagggctcggggaccaatagcagccgagagagcaatggaaccatggcagacctgggcaacattgcagacaatcctcaactgtccttctaccagctggtgtacgggctcaacgccctgctcctcatctgtgtgggggtctgctcctcagggattttcaccaaggtcacgaggaaggcatccacggccctgcacaacaagctcttcaacaaggttttccgctgccccatgagtttctttgacaccatcccaataggccggcttttgaactgcttcgcaggggacttggaacagctggaccagctcttgcccatcttttcagagcagttcctggtcctgtccttaatggtgatcgccgtcctgttgattgtcagtgtgctgtctccatatatcctgttaatgggagccataatcatggttatttgcttcatttattatatgatgttcaagaaggccatcggtgtgttcaagagactggagaactatagccggtctcctttattctcccacatcctcaattctctgcaaggcctgagctccatccatgtctatggaaaaactgaagacttcatcagccagtttaagaggctgactgatgcgcagaataactacctgctgttgtttctatcttccacacgatggatggcattgaggctggagatcatgaccaaccttgtgaccttggctgttgccctgttcgtggcttttggcatttcctccaccccctactcctttaaagtcatggctgtcaacatcgtgctgcagctggcgtccagcttccaggccactgcccggattggcttggagacagaggcacagttcacggctgtagagaggatactgcagtacatgaagatgtgtgtctcggaagctcctttacacatggaaggcacaagttgtccccaggggtggccacagcatggggaaatcatatttcaggattatcacatgaaatacagagacaacacacccaccgtgcttcacggcatcaacctgaccatccgcggccacgaagtggtgggcatcgtgggaaggacgggctctgggaagtcctccttgggcatggctctcttccgcctggtggagcccatggcaggccggattctcattgacggcgtggacatttgcagcatcggcctggaggacttgcggtccaagctctcagtgatccctcaagatccagtgctgctctcaggaaccatcagattcaacctagatccctttgaccgtcacactgaccagcagatctgggatgccttggagaggacattcctgaccaaggccatctcaaagttccccaaaaagctgcatacagatgtggtggaaaacggtggaaacttctctgtgggggagaggcagctgctctgcattgccagggctgtgcttcgcaactccaagatcatccttatcgatgaagccacagcctccattgacatggagacagacaccctgatccagcgcacaatccgtgaagccttccagggctgcaccgtgctcgtcattgcccaccgtgtcaccactgtgctgaactgtgaccgcatcctggttatgggcaatgggaaggtggtagaatttgatcggccggaggtactgcggaagaagcctgggtcattgttcgcagccctcatggccacagccacttcttcactgagataaggagatgtggagacttcatggaggctggcagctgagctcagaggttcacacaggtgcagcttcgaggcccacagtctgcgaccttcttgtttggagatgagaacttctcctggaagcaggggtaaatgtagggggggtggggattgctggatggaaaccctggaataggctacttgatggctctcaagaccttagaaccccagaaccatctaagacatgggattcagtgatcatgtggttctccttttaacttacatgctgaataattttataataaggtaaaagcttatagttttctgatctgtgttagaagtgttgcaaatgctgtactgactttgtaaaatataaaactaaggaaaaaaaaaaaaaaagggcggccn

SEQ ID NO: 21028 - DNA, 1275 bp, Homo sapiens; identical to SEQ ID NO: 20967
  misc_feature 1273, 1274, 1275: n = A,T,C or G

SEQ ID NO: 21029 - DNA, 528 bp, Homo sapiens
acacatagtgacattgcaaagggagactttggggtcgggcggatatcttaggatcaactctggctaggtcgcagaagacaggacttgttcccacagacaccagaaggtggaagttttgtcttccctgataacttgctcttcggtatcttggtttggttcactgggtgtttaatgagaatgtcttaccaacgtgctatgtcgtcgttcatcctgacaacattaaacatcagtatagaaaatactggaaagaacaaaagaaaaaaagaaccagggaggtgatcttgccacccccaattcttttcagtaacatccttgttagcacatctttcgccttggcgaattgtaaactccaaaactgaaattcttaggttgttggcagcctggtaaagtggaaagagcagtggcctggaagtcaggaaccttgcatccagtcttagctcttcagaggagctgtgcatgatcaattttcaggacctcagttttcttgtcgtaaaccagatcttatggttcatggtttaataccacagt

SEQ ID NO: 21030 - DNA, 505 bp, Homo sapiens; identical to SEQ ID NO: 20929

SEQ ID NO: 21031 - DNA, 364 bp, Homo sapiens; identical to SEQ ID NO: 20925

SEQ ID NO: 21032 - DNA, 984 bp, Homo sapiens
  misc_feature 1, 2, 3, 966, 967, 968, 969, 970, 971, 972, 973, 974, 975,976, 977, 978, 979, 980, 981, 982, 983, 984: n = A,T,C or G
nnncggttctaccatgatgttaggtgtaatctgtttttattgttgagaagatttgactagttttatatgtaaatttactgattaataataacatattaaagtacatttttaaaattaaatgggctttaaccaagaattgcaactgcacgtagaagtgaaaccatgactaaatcatcacatttgaaacaggacgtgtgactcgtgtgtaaaatgtgaacttgttactcacatgtttctggctcatagctcagaagctagttccagtgtggggattgttctgtctgaatggacagagttgagatcaggaaatagctgtttggtgtttcttggggttgtcttcttacagttcaggagacccttcctaaagccggtcttttctcacttccagtcattcctgtattccatcaaccagacaatctgcttgcggttggatagcattgaagccaaattgcaagccctggaggctacttgtaaatccttagaagaaaagctggatctggtcacgaacaagcagcacagccccatccaggttcccatggttgccggctcccctctcaggacaacccagatgtgcaacaaagtgcgatggtgaacccgtgagcaactgtggtacctccacctgtcccacaacctacaactcagcagtaccaagggctggacgctggtgccaccacacgggtcccgcgaagcctgctgcgaagtgaaggaagccagacacaaaagtctccatcctgcgggagtcactcacaggacaattctggaggacgcaaagctgtaggagcgaggagagacaggtggtggttgggggccgggaaggggcctgactgcagaggggcaaaatgtgggctgcctctgtcggggcagaagtgccccactctagacccttaccaagtcgtcggctgtacatcgaaaacgggtgagccttatgtgtgtacgtgataccgcaataaacctgacttgtaaaannnnnnnnnnnnnnnnnnn

SEQ ID NO: 21033 - DNA, 905 bp, Homo sapiens; identical to SEQ ID NO: 20936
  misc_feature 904, 905: n = A,T,C or G

SEQ ID NO: 21034 - DNA, 2506 bp, Homo sapiens; identical to SEQ ID NO: 20323
  misc_feature 2503, 2504, 2505, 2506: n = A,T,C or G

SEQ ID NO: 21035 - DNA, 533 bp, Homo sapiens; identical to SEQ ID NO: 20939
  misc_feature 533: n = A,T,C or G

SEQ ID NO: 21036 - DNA, 1275 bp, Homo sapiens; identical to SEQ ID NO: 20967
  misc_feature 1273, 1274, 1275: n = A,T,C or G

SEQ ID NO: 21037 - DNA, 715 bp, Homo sapiens
  misc_feature 711, 712, 713, 714, 715: n = A,T,C or G
ttttttttttttttgagcctgggtgacagagcgggaccctgtctcaggaaagaaaaaaaaaaaaaaaaaatggaagttgtggtcacaatgcccaggcttctttgttatagtggcacgctgggttacttgccacacacagatcactcctcccagggctgctggcacacactgattgtggggagttcaagaggccttttccccttgagggtgtggctgtccccctttcaggcgtgtggcgtcattcatggaggaagtgctggctctacgtagcacacgcacagtggcactaggacctgcgtgcctggccctcagtgggtagggcggtgctgcctaggcacacagcagcgcttacgggccccaggtgcctactaggctgccttcctcttccccgctgtcagtctgtgtcctccacgtgcttatttcctgtggtgagagcagttgtggtgtttgtataccttgtgccttatgatcaaggtgggccttggaggagggcgggaaaggagcgaccaacatggcggtcctccacccctcagcgacacccaccgcccgagaaactacagacaatggccacaagtttggcgtccttcaatttaattctttaaagaagtgctgggaagaaaaagctatgtggtttctaccattttagcaggataaagaggataactccttccattagcaaattttacagttgttaacagtactctgccatannnnn

SEQ ID NO: 21038 - DNA, 1275 bp, Homo sapiens; identical to SEQ ID NO: 20967
  misc_feature 1273, 1274, 1275: n = A,T,C or G

SEQ ID NO: 21039 - DNA, 2412 bp, Homo sapiens
  misc_feature 1, 2212, 2213, 2214, 2215, 2216, 2217, 2218, 2219, 2220,2221, 2222, 2223, 2224, 2225, 2226, 2227, 2228, 2229, 2230,2231, 2232, 2233, 2234, 2235, 2236, 2237, 2238, 2239, 2240,2241, 2242, 2243, 2412: n = A,T,C or G
nccgggcagaatcggggggtgatgggattatgagaccagaaccgggagcgtcatcattcctagcggttgatagtgaccagtaggacaaagccacgtgccgacttcctggctgcttcacctttgcatagctgggttgcagctgcgaacctcattctgactgtgaactaagcaagctttgaggaggcaggagattcccgggggtccctgtgacatattgcattaagatcgtggcacttgctttttcgtctttcacatcggctgtcttgcaaggagcttgacatttccaaattccattgctctgtttggggaagacttaggacagcactccaggaaacagatgacaatttacagacagttgtctcagtggtttccagaatctcaccagcctcccgtatagcttcttgtattgaggctcatgagcgtattcacactctttcctcccccgcgcacgcctctgcttgctctcgatcagcatccagacctccgtggcaccaggttgcctctgttgtgaacttcttttgtaacctaccaggccagttgtatatacagtgttgtcaggtttttccgggtttcagttttgaggcagtttattcaaagtgagacagaagtgccacggaaaagaggcaggagtgtgttaggtggtgggtccattagacctctgctgtgacattgcatattcagctctgcagacactggcttcctttacaaatctaagagatgctggattagaaaagaggagaagctcatcgggccatcagagagatgctcctacagggtcctgatgtttttgtacctccaggtcagctggatcgctgttttcccagttccctttgctcatgcttacttagaggaagaaagaaaggggggtacctcttccaagtaccttctaaatgaaacactcaagagagtgctactcaggaaactttgcttggatcctaaaatggactggtcttgggtgtgtaaccccggtgaagttatagcctccccaaattgaggtgacagaaggaagacaagaggtgtaagctggagagggaagggaagaaatcagtggctttggccagcctctgtgccacccagtacgacagaggagtgggaactggccctctggggctctgcttggccataggcactgcacattgtgccacctgctcatcacctcctctagtctcacactgagcatcggagtacctgttgtgcagacaggaaaactgaggagctctgagaggctgagcatggagctcaccccatgccatagggtgtgggaagagggcacaggaggcctcatccatgggggaaagggttgaggatggacatgggtggggagagggcatagacatcccttcctaatctctgttcccaccacatttcataggagatgagttaggagatgacagctaactctcttaaggacattttgaccccagtttatgttggggatggaccagaaaggaaaatgtctagagataggaaggtaaatcaactctgccagcccctaccatcaggtctgggccaccccaaacttgggctgcctcccttagacataggttagagtgagagacccagctgtttctcccgaagcctcgtcttcatgccccagacacctgattgccccaatcaggtgtcagacttgcttgctcttcgaggtccccctgagctgccaagtgttttcattgtaaacagacacatcgccatgtttcagggcttcaacggcattgtattttggactttgaccgtattttttttctcttaacctactgagactcttccttaagaacaggatctatagctttaaaatgtcttcttctatgggaaatttcctgccaagccagggcactaaattctttcatcattagagctttcctgaagtccggccatatactgagtacctgctctgagttctgggcagcttacaatatcttaaacagattttcagaaaaataatgcaactatattttctagtgtcaactgtatgcaaacagtgtggtaaataccttttaattagtcctccacccacctggagtacagggggtgcgtttattattctgatttcactgatgaggaaatgggctcagaaaggttaagtcccttcctgaaatctcacagccaggagaagctaggatgatttaaaacaaagtttggagaggcactgggcatagaccctggctgtacagcctctaacatgcggcactgcatcttggcagtctctatgccnnnnnnnnnnnnnnnnnnnnnnnnnnnnnnnntcatgtacacttggctgtcaggctttctgtgcatgtactaaaaaaggagaaattataataaattagccgtcttgcggcccctaggcctaaaaaaaaggtatttaccacactgtttgcatacagttgacactagaaaatatagttgcattatttttctaaaatcgcgtan

SEQ ID NO: 21040 - DNA, 1551 bp, Homo sapiens
agggagtcacccacgcgtccgcgctttcattttttctgctaccgtgactaagatggaagcgtttttggggtcgcggtccggactttgggcggggggtccggccccaggacagttttaccgcattccatccactcccgattccttcatggatccggcgtctgcactttacagaggtccaatcacgcggacccagaaccccatggtgaccgggacctcagtcctcggcgttaagttcgagggcggagtggtgattgccgcagacatgctgggatcctacggctccttggctcgtttccgcaacatctctcgcattatgcgagtcaacaacagtaccatgctgggtgcctctggcgactacgctgatttccagtatttgaagcaagttctcggccagatggtgattgatgaggagcttctgggagatggacacagctatagtcctagagctattcattcatggctgaccagggccatgtacagccggcgctcgaagatgaaccctttgtggaacaccatggtcatcggaggctatgctgatggagagagcttcctcggttatgtggacatgcttggtgtagcctatgaagccccttcgctggccactggttatggtgcatacttggctcaggtaagtagtaagtctagaggtgggggaaagggaagacaaaaggaaatggattagtggttgtctgcttttctcctgaaattctgatatgagggatgggctgggatcgctattactgggcagatggtcttctttgtagtctgggggctgtaggtgttgacactgattccagtgacaagatgacatgactgggagtcagtagacatgcaaagagaggacaccctagaacttcttcctgaagtggctcttagcttattttctaagcagagttcattctggtgaggcaagaagtagaatgtcatctttcactctaatgctttttataccatagatttgagacaactagcctgttattcagcccaatatccccccatggttttcccccaatctccctagcctctgctgcgagaagttctggagaagcagccagtgctaagccagaccgaggcccgcgacttagtagaacgctgcatgcgagtgctgtactaccgagatgcccgttcttacaaccgggtgagggatgtgctgggaacctaattggcgggctctggctacttgcaatccctgggtctctatgctttgaagaacagattgccttacttgtgtgactcctattttcacattggggaagacctccacctgacctttcatttaaggacttaaggcgtgggcattattgaatgctctgctttcttccagtttcaaatcgccactgtcaccgaaaaaggtgttgaaatagagggaccattgtctacagagaccaactgggatattgcccacatgatcaggtgagtaatagggaaaaaattggtgacagacttgggaggtctttggcttacactaagctgggcttttctgggaggctcacccaggaaaattttcccttgtggaaagttttggttggacagtacctcggccgccaccgc

SEQ ID NO: 21041 - DNA, 727 bp, Homo sapiens; identical to SEQ ID NO: 20324

SEQ ID NO: 21042 - DNA, 875 bp, Homo sapiens
  misc_feature 875: n = A,T,C or G
agctattatggacagaggtattgtaaggcttagtgcaagtgtatgcaaaaggtgcagttttcttggttattttttgcaggagctatccctgtatttttttcattttttattgtaactctcctatgccattataataattgggatcctgtgatggtgggaatcagaagaatatttgcttttatatgcagaaaacatcgaattcagagagttccagaagacagcgaacagtgtgagagtctcatttctatgcacagtgtttctcaggaggatggagctagttagctgtctgttgtctgtagcccagatggaatcttgctctgtcgcccaagctggagtgcagtggcgagatctcgggtcactgcaacctctacctcctgggctcaagcgattctcctgcctcagcctcccgagtagctgggactacaggcgcacgccaccacacccagctaatttttgtatttttagtagagacggggtttcactgtgttaaccaggatggtctcgatctcctgacctcgtgatccgcccgcctcggcctcccaaagtgctgggactacaggcgtgagccaccacgcccggcccaaaagcatttactgttaaggctgcctcatttttcagctttgttgtagttgagattctgatgttcacctaacaaagtccctgacaaaacagacttccttcaatccaggtcataatttgaaacgttatacaataatgagatttaagtgatgaatggaaagaaaagaaggagactgaaaagatatcacaaatttctatttgtttttagattcagaaaaatataattacaggccaacatgggtctgacagaaaggaaggacgtcagcagttacttgaatgtaaccccttcccagcan

SEQ ID NO: 21043 - DNA, 968 bp, Homo sapiens; identical to SEQ ID NO: 20935

SEQ ID NO: 21044 - DNA, 526 bp, Homo sapiens
  misc_feature 1, 2, 3, 4, 5, 6, 7, 8, 526: n = A,T,C or G
nnnnnnnnccggccgggcaggttttacatgagccagattatttgagcattttttcacagaatagtatggcaaagagctcaaggatgatgccgaggtgggatacctggctaccaggtgaatgatagtgcccctgacagaaaagaacatacagggaaaatccaagctaatatctaagaaaagatacggaggtcttttctaagcatcttgaatttgggtgatggctgacagctgagtggaaatggaccatgaaatggtcatccaagcagccctggatctggggagctttggggttggagttagaacttttaaaatgcattaatgttaggtaagcaacataggatggtatctggaacttaacaggagtccataattgctgtcagaattattagcatagaattcggttttaaacattgactaaattgaatgggcgaggtgggggaggcatggcgccagttaaatggccaggagaggctggactggggacagaaaagtgtgcttgactgcacaagaaatcagagataatggn

SEQ ID NO: 21045 - DNA, 604 bp, Homo sapiens
  misc_feature 1: n = A,T,C or G
nacgcggggagagcaaagacagttgcttacatgatgcagagcttatctactgtagagctgggaagcagaaggatttgtagtttctttttaaagtgattccttccttttccctttcatttttcactgtgggtgttattatcctgacaatttgtcatacatttcctgtctttaaaaaataactgtatactaagcaaaactcaggtcttaaaaataaatatgaatttagattccatacatcgattaattgaggaaacacagatcttccagatgcaacaatcatcaattaagtcacgcggcgacatggtggcccctgcctcaccccccagggatacctgtaatacctgcttcccacttcatgggctacaatctcatgctgctcacaatttctgtgctcactcatataacaccaacaaatgggatatttgtgaagaacttcgcctgcgggagcttgaagaagtcaaggccagagctgctcagatggaaaagaccatgcggtggtggtcggactgcactgccaactggagagaaaaatggagtaaagttcgagctgaaaggaacagtgccagagaggaaggaagacaactcagaataaaactagagatgg

SEQ ID NO: 21046 - DNA, 520 bp, Homo sapiens
  misc_feature 1, 2, 3, 4, 5, 6: n = A,T,C or G
nnnnnnaaagcaaaaagtaggaatcatgatcttaatattggacaaattagaatacaagccaaaaagcaataaccgttagataaagaagaattcttcataatgatgaaatagaaacattcatagaatagaaattacaggagaaacggacagtcacttaaagtttaaaactttaagacaaactttaattgacctatttcagtccacaaaaagccaagaagtatctgaaatggtgggataaatcttcttgtccttaaacttttgtgggtcggtgtgtaggaagattggagtgctacgatgctggcttcacgggctcatggtgcaggacttacagcttgctaagttttatactacaagtcagtaagtttagagggtgctttgcccgacaccacctgtggggatctcatcatttaaaattcacagccatgagatttgaccttgactctgtggatagtgaaaaatagcaactcatctaaaggggcctactagccagaagcaggatgagagaatcatcaaactatgt

SEQ ID NO: 21047 - DNA, 968 bp, Homo sapiens; identical to SEQ ID NO: 20935

SEQ ID NO: 21048 - DNA, 671 bp, Homo sapiens
gcatgagagagaaaactgaaaacaaaggcagggaaaccagatatattaagcaaatataattaaatggctatattaatatcaggcaaaactgactttgagataaaaacatcttttttgccgcgggtcataaatcaagataagggattcaatttgcagagaagatataacaaatttaaatatgtatgcacctaatagtatataacagcctaaaaataaagcaaaaacttgatataagtacaagagaaattaagataaatctgtcatcatgttgggcaatttcaacaccctttctcaagtggtaagtcaagcagcacaaaaactcagcaaggtcaagatttgaataatgttaacagtagagctttatctactgaataaatgtaaaattccccatccaataattagtccactttcttccaaaatgcatgtggaagatgcataaacttgattatgcactaagcaagtgttaacaattttcaaaaactatgcattgtaaaaattacattatctaaccacaatgcaattaagtcaggtgtctataataaaaaggattaaaagacaaaaacacacaccacttccaaatactgtatagaaaacacactttcaatgatgaaaattatattggaaattaaagacactctgataatgaaaacatgatgaattaaaacctgtca

SEQ ID NO: 21049 - DNA, 546 bp, Homo sapiens; identical to SEQ ID NO: 20353

SEQ ID NO: 21050 - DNA, 528 bp, Homo sapiens; identical to SEQ ID NO: 21029

SEQ ID NO: 21051 - DNA, 505 bp, Homo sapiens; identical to SEQ ID NO: 20929

SEQ ID NO: 21052 - DNA, 505 bp, Homo sapiens; identical to SEQ ID NO: 20929

SEQ ID NO: 21053 - DNA, 721 bp, Homo sapiens; identical to SEQ ID NO: 20081
  misc_feature 709, 721: n = A,T,C or G

SEQ ID NO: 21054 - DNA, 1468 bp, Homo sapiens; identical to SEQ ID NO: 20960
  misc_feature 1465, 1466, 1467, 1468: n = A,T,C or G

SEQ ID NO: 21055 - DNA, 493 bp, Homo sapiens; identical to SEQ ID NO: 20976
  misc_feature 487, 488, 489, 490, 491, 492, 493: n = A,T,C or G

SEQ ID NO: 21056 - DNA, 2412 bp, Homo sapiens; identical to SEQ ID NO: 21039
  misc_feature 1, 2212, 2213, 2214, 2215, 2216, 2217, 2218, 2219, 2220,2221, 2222, 2223, 2224, 2225, 2226, 2227, 2228, 2229, 2230,2231, 2232, 2233, 2234, 2235, 2236, 2237, 2238, 2239, 2240,2241, 2242, 2243, 2412: n = A,T,C or G

SEQ ID NO: 21057 - DNA, 442 bp, Homo sapiens
  misc_feature 442: n = A,T,C or G
acaggtggaaagtgaggtggttttatttctagttcaccattgtccttaggctgtatagacctctggaatcccagcttatgtggagaaggtatcctgttagacttccctcctttggtcagcactgggccttaacttctggcccctcaaagctgctaaaactgaaggccaggcttgcctggcttggcaaaggacgtcgggcagaagcagcttctcctctcctcttgtttctctgtttcccctcaccataggctttggcctgggagtttcctacaattttgtcagctatttgacactgttaaggagacatttagaatatttaaattagagctttggtcgttttcatggggagaattggttgcaaataactcggctgaaatttctataagaaaaaaatctctgttgttattttattattgttctgtctgacagaacctgcccggan

SEQ ID NO: 21058 - DNA, 459 bp, Homo sapiens
  misc_feature 1, 2: n = A,T,C or G
nnactatagggcgaatagtagctgcacgcgcggtggctgcaccgcggcaggcggccgaggcacgcgggggctgatgccattttcagcctcagcacgcctgcacccaggcgctcattaaaacagcatgttgctccccactgcctcgtgttgtctgttggcgcgctgtcggggttcgaaccgatacaagaaccttccacctacctggtgctttggcctcatctataagcggccagtcatctgccctaagtgctgccgccgaagactgaatgtcctggaaagtttgctgtcacatctccattatgacaaaagcattgtgccgaacagatgaaaaaatgcattgtcaacggaatcttttatgtttgtttgtcttcctttaagcaacattgccttacttgttataaaagataaataaatatttgttcatttctaaacacagaccaagaagaaaaagaacaaagt

SEQ ID NO: 21059 - DNA, 546 bp, Homo sapiens; identical to SEQ ID NO: 20353

SEQ ID NO: 21060 - DNA, 3518 bp, Homo sapiens
  misc_feature 1, 2, 3, 4, 5, 3510, 3511, 3512, 3513, 3514, 3515, 3516,3517, 3518: n = A,T,C or G
nnnnncaaaaaggtaagggaaagtttccaagctttaggaagaattattttttttcaagacgctgtcttccgtactttcgttattaaacatacggctcatgtgatcaccggtttagacagtgacatcagacatctttcattagccctactcaaaaatggcggcaacgtaagtatcctgggccggaggtcggttgtaacccggaagtgcctttgtaaaggagggggtggttagacaatccggaagtggatggaatgaagagatgccacttggcggccatggcagctgtagtatcggcgactccgggtcaaggcccggtcgagtgcagtaccatgggcagcaccgggtatagggcagagacagctttgtgtcaactttgctgctgaacccctaggacccatcgttagagacctgcaggactcctttcctcatcccaggctcggaggagagtttgctgggactggtgggctggtttcctgctctggggggcggatcaccttcggggccgcctcttggagacaggggcgcctagggaacgaacaggttcgcttgagtcacttacccgccgccgcctaagacattgtgccaccctcaatccgacaatcgaagaaatcgatcattcgcacattttccccattgacttttcccatctctgttaacccacgagaatctaatgactggcatctgagaacccagagcctgggaccttagattgctgtaagctttctctggtgctaatatcagcaaaaagggtctgttgccgggtacgttcaagaggaaggtgcctcgtgaacacatctgctggtgggaaggcctaaagaactggaaagcccactctcttggaaccaccacacctgtttaaagaacctaagcaccatttaaagccactggaaatttgttgtctagtggttgtgggtgaataaaggagggcagaatggatgatttcatctccattagcctgctgtctctggctatgttggtgggatgttacgtggccggaatcattcccttggctgttaatttctcagaggaacgactgaagctggtgactgttttgggtgctggccttctctgtggaactgctctggcagtcatcgtgcctgaaggagtacatgccctttatgaagatattcttgagggaaaacaccaccaagcaagtgaaacacataatgtgattgcatcagacaaagcagcagaaaaatcagttgtccatgaacatgagcacagccacgaccacacacagctgcatgcctatattggtgtttccctcgttctgggcttcgttttcatgttgctggtggaccagattggtaactcccatgtgcattctactgacgatccagaagcagcaaggtctagcaattccaaaatcaccaccacgctgggtctggttgtccatgctgcagctgatggtgttgctttgggagcagcagcatctacttcacagaccagtgtccagttaattgtgtttgtggcaatcatgctacataaggcaccagctgcttttggactggtttccttcttgatgcatgctggcttagagcggaatcgaatcagaaagcacttgctggtctttgcattggcagcaccagttatgtccatggtgacatacttaggactgagtaagagcagtaaagaagccctttcagaggtgaacgccacgggagtggccatgcttttctctgccgggacatttctttatgttgccacagtacatgtcctccctgaggtgggcggaatagggcacagccacaagcccgatgccacgggagggagaggcctcagccgcctggaagtggcagccctggttctgggttgcctcatccctctcatcctgtcagtaggacaccagcattaaatgttcaaggtccagccttggtccagggccgtttgccatccagtgagaacagccggcacgtgacagctactcacttcctcagtctcttgtctcaccttgcgcatctctacatgtattcctagagtccagaggggaggtgaggttaaaacctgagtaatggaaaagcttttagagtagaaacacatttacgttgcagttagctatagacatcccattgtgttatcttttaaaaggcccttgacattttgcgttttaatatttctcttaaccctattctcagggaagatggaatttagttttaaggaaaagaggagaacttcatactcacaatgaaatagtgattatgaaaatacagtgttctgtaattaagctatgtctctttcttcttagtttagaggctctgctactttatccattgatttttaacatggttcccaccatgtaagactggtgctttagcatctatgccacatgcgttgatggaaggtcatagcacccactcacttagatgctaaaggtgattctagttaatctgggattagggtcaggaaaatgatagcaagacacattgaaagctctctttatactcaaaagagatatccattgaaaagggatgtctagagggatttaaacagctcctttggcacgtgcctctctgaatccagcctgccattccatcaaatggagcaggagaggtgggaggagcttctaaagaggtgactggtattttgtagcattccttgtcaagttctcctttgcagaatacctgtctccacattcctagagaggagccaagttctagtagtttcagttctaggctttccttcaagaacagtcagatcacaaagtgtctttggaaattaagggatattaaattttaagtgatttttggatggttattgatatctttgtagtagctttttttaaaagactaccaaaatgtatggttgtcctttttttttgttttttttttttttaattatttctcttagcagatcagcaatccctctagggacctaaatactaggtcagctttggcgacactgtgtcttctcacataaccacctgtagcaagatggatcataaatgagaagtgtttgcctattgatttaaagcttattggaatcatgtctcttgtctcttcgtcttttctttgcttttcttctaacttttccctctagcctctcctcgccacaatttgctgcttactgctggtgttaatatttgtgtgggatgaattcttatcaggacaaccacttctcgaactgtaataatgaagataataatatctttattctttatcccccttcaaagaaattacctttgtgtcaaatgccgctttgttgagcccttaaaataccacctcctcatgtgtaaattgacacaatcactaatctggtaatttaaacaattgagatagcaaaagtgtttaacggactgggataaatgtttcttccttttggccaaattttgtgaacccggtttgtcaataaggcgttcaatgggtctgcaccattttacttcttcccattcaagccattactaggggccccacatttttccacgaggagactcacgtaaacatttttacaaaacagcaagtataccatatagaccgcacgggcaaacattgctctgtcctgaagacaagagcnnnnnnnnn

SEQ ID NO: 21061 - DNA, 435 bp, Homo sapiens; identical to SEQ ID NO: 20934
  misc_feature 429, 430, 431, 432, 433, 434, 435: n = A,T,C or G

SEQ ID NO: 21062 - DNA, 4294 bp, Homo sapiens
  misc_feature 1, 2, 3, 4293, 4294: n = A,T,C or G
nnncgccatgcagtgagcgagcaggcggcaggcacggtccgtgcggagcaggcgagcgagcgggaagacgcagccaccttcctcaccagccagcccacagcggtttgttccccttctcgggagtgcgccaatgcctgggccgacccaaaccctgtccccaaatggcgagaacaacaacgacatcatccaggataataacgggaccatcattcctttccggaagcacacagtgcgcggggagcgttcctacagttggggaatggcggtcaatgtgtattctacctcgataacccaagagactatgagcagacatgacatcattgcatgggttaatgacatagtatctttaaactacacaaaagtggaacagctttgttcaggagcggcctattgccaattcatggacatgctcttccctggctgcattagtttgaagaaagtaaaatttcaagcaaagctggaacatgaatatattcacaattttaaacttctgcaagcatcatttaagcgaatgaacgttgataaggtaattccagtggagaagctagtgaaaggacgtttccaggacaacctggattttattcaatggtttaagaaattctatgatgctaactacgatgggaaggagtatgatcctgtagaggcacgacaagggcaagatgcaattcctcctcctgaccctggtgaacagatcttcaacctgccaaaaaagtctcaccatgcaaactcccccacagcaggtgcagctaaatcaagtccagcagctaaaccaggatccacaccttctcgaccctcatcagccaaaagggcttcttccagtggctcagcatccaaatccgataaagatttagaaacgcaggtcatacagcttaatgaacaggtacattcattaaaacttgcccttgaaggcgtggaaaaggaaagggatttctactttgggaagttgagagagatcgagctactctgccaagaacacgggcaggaaaatgatgacctcgtgcagagactaatggacatcctgtatgcttcagaagaacacgagggccacacagaagagccggaagcagaggagcaagcccacgaacagcagcccccgcagcaggaagagtactgacccaccccggctgctcttgacacttccattgtgtgtgggaacgtttcttctggagaattggaacatgtgtggccccaagctcaacagaaaccagttgttcccaatctgccgttaccatcaacgcactgttgcatatgccagccactgcgcttggttcccattttctttgccaaggtgtattagcggacggccctctggccacctacccgagagatcgtagggtcacatacatccaacttcaccacttggctgcttgagattggttctgctcttttcttcatttctttccagaacaactctttcccaccccaacaccactgccaccacccctctttttatcctggtgtgaaacaatggtaatttgatatatggtatttatattggcatttttcaacccagtgtcactagatgtcacacacatttgtggtgctttgatgtttgcaagtctaacctctgaacataaatttggtcaaataattggaacaaagggaaacagatacttgatatgaaagccataatgacggtgacttgtgtcgtgggggaaaacataaggtcattttctccctctactcacaatactaaagggaaaaaatggattcaaagctaggatttcagggcccagcagtgttcctccatcagcatgttagacaactacacagtatgttgttagttttgaaagacattcactcaaggaaaacaccatctcaactttgcccgctcaccatgtcccttgcccccatgtagcccatttcccaggttatgctcttttctttctcagggtcctctttggtgggcagccactccccgagatgttgccatcagttttctgcagtccaaagagggtatggttaggtacgggtcttcctgcctcattcctcttcctctttgtgtaggtttcagccacaaaactgtcattcactctaggggacccctactaaagggtaacttcaggtgtgcagccctgagctccaaggctctgcaccatgccacacacttgctgtaaggctagaagtgaagaccttattaataggagcataattgcgagggagaatcatggttctgcagtctggtgtagacactggaataacagcacagaaaaatctatgactcccaatatcttctagaataaagaattttccctctttaacacaagggccctccttgtcattgaccttagctaaaccatggcaattcataaatagaggaaacattaatgaattaaaagcattccttattttttaactaatatttgtacattttcttagtctctttccaagtctttgcctcttttttttctttatttttattttttcctttgacagatggtatcccttcctggatcattcatttcaccttggtttctaactttaggtttactttcacttgttatttgacttagcaggtgcaacaaaaacaagaaacaaatgtgcccaccccactttccgcttaactgaaaagcttaaaataaatttctgaattatgtatcctgaagctttgaaatttctttattaatcgatgaaatatgaattctaaattctagcattgaagcttttcaccaaaagaagtctctccaaaataaatcttttgcagcaaagtgatatttattgagttatgtggaaaagatggcttgtatttttcagattattacaacacactgtgcagaattagacagatgttccgtggtgtttggtttccctttcttctctctcctgctcactctgcattatagcagcagcttatttctctaaggctggacagcctggctctcggcagtgacgtcctcccacacctggtcacaagtagtagtggctgtgctatacccagcatcatgcttaacagcgtgttgcccttctgagcctgttgtactcactgatctctttaaaaacaaaaaatagctcttgtaaaaggtcacaataactctatgcacctgatactgcagtggttcctaggccattcttcatctgctctggacatctcagtcatacccaatgctcagtggatcatgaccaaactcctgtcatgtggatgcacgtgagtgggtagcagggagtcaggatcctgccttctccagcaaccccttactgctgtataacttgcataagcctccctggtgactcttgcaggaaccactccattgccctccagctccccagccttctcagttataaacatgctggccagatctcttagcctgcaaagagaactttccccagtcaccatagaccattctccttcctgaaggcttggggcagaccattcgtttatttagagaagagctatacattcttctttctggtcccatcttaaacgtcttctgttgtgctgcaccccagatggtgtctcagatgctttggggaatctttaacagctgaatttgagtcagtcctcttaggctgcacctccagcctctgcagatcccccctcatttcccatggatggtgggaccccattattctctcatctcggcattcagggaacagtttccttagcggcccctggtcacatgtcatcgggctgggcaggaagcgtccctgggtgcgtgctccacttctccctctcaggaagcccagtttcatccttagtaccccccctcgtgcccgctgtcggctggttatagcacttccactgctactgtcagataggaagtgatcgaagcagggggcaaagagaaagcccatatttgttctaagcagaaaagcaggaaaaaaaaaaaaaaaaaggaaggaaaaacacctgttgacctgagagaagtaaatttccagaagggaaccaagaactcttcccttccctgggtgagtatttccattatcccgtagggttaaatatgctttcagattacttttactaaatttggacaccataaagcctgtggttatcttttcccggctccctgcggggcgctgtacccctttggttttggtctttctaccctcttggcataggctgtggccttattgcgtgcaccaagtctttttgccggcttgtttccccctttccttttgaatttacccccctatggtgccctgggtgaacacagtttcggtctcccgcatttgttgatcccggacctggcctggctcttcccttttctcaacgcaccgcctttcgtctgccacccacaacgagggggggctagagatctcgggcccgttcgcgccggttttaagggcctcgggcgnn

SEQ ID NO: 21063 - DNA, 2487 bp, Homo sapiens; identical to SEQ ID NO: 20922
  misc_feature 1, 2, 3, 4, 5, 6, 7, 8, 2459, 2460, 2461, 2462, 2463, 2464,2465, 2466, 2467, 2468, 2469, 2470, 2471, 2472, 2473, 2474,2475, 2476, 2477, 2478, 2479, 2480, 2481, 2482, 2483, 2484,2485, 2486, 2487: n = A,T,C or G

SEQ ID NO: 21064 - DNA, 4646 bp, Homo sapiens
tatagggagtcgacccacgcgtccgcctggaccaaacagcggaacaacagctgggtgaaaagcaaggatgtcttctccaagcctgttaacatattttgggcattagaagattccgtgcttgtggtgaaggcgaggcagccaaagcctttctttgctgccggaaatacatttgagatgacttgcaaagtatcttccaagaatattaagtcgccacgctactctgttctcatcatggctgagaagcctgtcggcgacctctccagtcccaatgaaacgaagtacatcatctctctggaccaggattctgtggtgaagctggagaattggacagatgcatcacgggtggatggcgttgttttagaaaaagtgcaggaggatgagttccgctatcgaatgtaccagactcaggtctcagagcgcagggctgtacctgctgcatggtgacagcctggtctcctgtcaggggcacgcctttggcgagaagcagcaaccagtctctccaatcctattgagatagacttccaaacctcaggtcctatatttaatgcttctgtgcattcagacacaccatcagtaattcggggagatctgatcaaattgttctgtatcatcactgtcgagggagcagcactggatccagatgacatggcctttgatgtgtcctggtttgcggtgcactcttttggcctggacaaggctcctgtgctcctgtcttccctggatcggaagggcatcgtgaccacctcccggagggactggaagagcgacctcagcctggagcgcgtgagtgtgctggaattcttgctgcaagtgcatggctccgaggaccaggactttggcaactactactgttccgtgactccatgggtgaagtcaccaacaggttcctggcagaaggaggcagagatccactccaagcccgtttttataactgtgaagatggatgtgctgaacgccttcaagtatcccttgctgatcggcatcggtctgtccacggtcatcgggctcctgtcctgtctcatcgggtactgcagctcccactggtgttgtaagaaggaggttcaggagacacggcgcgagcgccgcaggctcatgtcgatggagatggactaggctggcccgggaggggagtgacagagggacgttctaggagcaattggggcaagaagaggacagtgatattttaaaacaaagtgtgttacactaaaaaccagtcctctctaatctcaggtgggacttggcgctctctcttttctgcatgtcaagttctgagcgcggacatgtttaccagcacacggctcttcttcccacggcactttctgatgtaacaatcgagtgtgtgttttcccaactgcagctttttaatggttaaccttcatctaattttttttctcccactggtttatagatcctctgacttgtgtgtgtttatagcttttgtttcgcggggttgtggtgaggaaggggtgatggcatgcggagttctttatcttcagtgagaatgtacctgcccgcctgagagccagcttccgcgttggaggcacgtgttcagagagctgctgagcgccaccctctacccggctgacagacaacacagacctgtgctgaaggctaatttgtggcttttacgaccctaccccaccccctgttttcaggggtttagactacatttgaaatccaaacttggagtatataacttcttattgagcccaactgctttttttttttttttttttgcttctctgccccttttccatttcttttgtatttgttttctgtgagagcactgaaatggcggccctggaatctacaatttggctctccactgagcaccttatcttgccaccttagccttaagaatgaatatgaagaaaaatacacagccacctctgtccagggcagtaagaagggctgcaaggaaggggaggatggggacaaggaaaggatcagatacctgctccagtagttgtgaggccactgtgtctcaggggactccaggaagagcagaagagggatcccacgaagttatttttatgcagctggggccaggagggtcagagtggtgccaggtgcaagttaggctaaagaagccaccactattcctctctcttgcccattgtggggggcaaaggcattggtcaccaagagtcttgcagggggacccacagatatgccatgtccttcacacgtgcttgggctccttaacctgaaggcaaattgctacttgcaagactgactgacttcaaggaatcagaaattacctagaagcaccatgttttttctatgaccttttcagtccttcaggtcattttaaggtccactgcagggggttagtgagaaagggtatactttgtggtatgttttgctttcctaatagggacatgaaggaaacccagcaatttgctgttatgtgaatggcctgtagagcagagtcaagagcggtgtgctttgcccgactgctcccatcaggaataggagagtagacagagatcttccacatcccaggcttctgctgctgctttaaaagctctgtccttggagcctcccgctccctgaagtgtctcgccccctgcacagcactggcctttcggaagcatcccagtagggttttctgaggctcgctggtgactcatgccctaattgcaatcctctgcttttatcttgactttgaaggatctaacactgctctctcttccaaaggggaaaaaaagattcatttgttttgagcaataaactaatacaaaatgatggccattcatgtgcagctctttgtcaccatgggccggatgagttgtgctcctcctggctcaccatttccccctgctcccccacagccggttctgcacttatcaccgagtcgcccctggaagcagattcccattgagttttccccaccaaggggaccatgcacatggtagaaacattagattctgcattgacagtagcctttccttggcccgggcctgtggtgggaagacgggcaacaagtataccccaccagggcctgagtgactagaggaagaggacgaggccttgttggcactagatttgggtattttctgcatgtcataacatatcctaactgctatttcagaagaggcagcttgtaggtgattgtacaagtgagaattaaagagagaacagatatttaaacaggtgctgtattagtaacagccagtgccctttcagcccttgcatctattaaaaggagattcaggattttattggcacaggcccttcttagtaggaagaaagggtgcttagctttggacctgaccgggtgtgtgtaaaaccatggactgagtcacagcagacactcgatggtggtaaatgtgatgggtgcttacacactgtaccttttcctttcatactgatgctgcagttcagggctggagttgttaaggcattgacctccacccacctgccccatgtccgctgggctgcccaagctgcatgtcacctgagggctggcaggaaggggcgagaaatcccagggcattgtaccaaggacctagttccttctagggatataaatttccaggaatgtgtatttttaatgtggtgagatgcactcttttgttgtaccaaatagggctccccaccccacccctgcgacaagtgctcttctagaacaggttcctaccagcagcactggtgtgaatgaaagagagacccagccgcgtctcacacaggtggaattgcacttcttaacaaaaaggaactttataaaagtttgggattttttttcctaatcataaaaatagccccagaaagagcctaagctatgttcagatagaagcctcgaaattcctgtaaattgtttactttatgatgtttacatacacgtttcactttgaaaaaaaatgcaaatcgactttttaacaactgttgagatgtttcatgggacagtagaactctgactcaccaactgggctaaattttaatttaaaaatgtatttatttgagtgtctttccccccctcaccctcaccatctgaggggctccctgagatcttggtagaggaggcccctcctgcccagaccttcgtttgtttccccggtggcccttgcttcttgctttgcagactgcctgcagccatgattttgtcactgacatctgtgagccaaagactgagcctttttggcaggaataataagcaatactacacaacttgctactttcagaaaacttttttttagcttcaccgatgacaacagaggaagaagggaactgggatttgggtaagttctcctccactgtttgaccaaattctcagtgataaatatgtgtgcagatccctagaagagaaaacgctgactttctttttaagtgtggcacataaggatctgcagaattttccgtagacaaagaaaggatcttgtgtatttttgtccatatccaatgttatatgaactaattgtattgttttatactgtgaccacaaatattatgcaatgcaccatttgttttttatttcattaaaggaagtttaatttagcagagaagggcaagctaggagaaaggcccacgggaacccttgaaccacgaccaaataggacaccgagtcccgattacacccccggggcatcagcttgttcctggcaaatcaatacgggccccccggacccgggtcattcgagctgacc

SEQ ID NO: 21065 - DNA, 2061 bp, Homo sapiens
  misc_feature 1, 2054, 2055, 2056, 2057, 2058, 2059, 2060, 2061: n = A,T,C or G
ngcgtccgccagcgacacgttgggccgaagagcggtgttgggtacccgagagacccggcggtggggaagtcacttcctcccgaagacgctgtttcctagcaaccgccctccgcctctgttattagcccctcctcctcgctcggtccaggaccggctctgcgggcgccgccaggcccagaccaagctactatcagaagttgaattctaataattagctattttataaaggtaacgagaaaaaatacactatgtctgatgaagtttttagcaccactttggcatatacaaagagtccaaaagttaccaaaagaactactttccaggatgagctaataagagcaattacagctcgctcagccagacaaaggagttctgaatactcagatgactttgacagtgatgagattgtttctttaggtgatttttctgacacttcagcagatgaaaattcagttaataaaaaaatgaatgactttcatatatcagatgatgaagaaaagaatccttcaaaactattgtttttgaaaaccaataaatcaaacggtaacataaccaaagatgagccagtgtgtgccatcaaaaatgaagaggaaatggcacctgatgggtgtgaagacattgttgtaaaatctttctctgaatctcaaaataaggatgaggaatttgaaaaagacaaaataaaaatgaaacctaaacccagaattctttcaattaaaagcacatcttcagaaaacaacagccttgacacagatgatcactttaaaccatcacctcggccaaggagtatgttgaaaaagaaaagtcacatggaggagaaggatggactagaagataaagaaactgccctcagtgaagaattggagttacattctgcaccttcttcccttccaacgccgaatggcatacaattagaagctgagaaaaaagcattctctgaaaaccttgatcctgaggattcatgcttaacaagtctagcatcatcatcacttaaacaaattcttggagattctttttcaccaggatctgagggaaacgcatctggaaaagatccaaatgaagaaatcactgaaaaccataattccttgaaatcagatgaaaataaagagaattcattttcagcagaccatgtgactactgcagttgagaaatccaaggaaagtcaagtgactgctgatgaccttgaagaagaaaaggcaaaagcggaactgattatggatgatgacagaacagttgatccactactatctaaatctcagagtatcttaatatctaccagtgcaacagcatcttcaaagaaaacaattgaagatagaaatataaagaataaaaagtcaacaaataatagagcatccagtgcatctgccagattaatgacctctgagtttttgaagaaatctagttctaaaaggagaactccatcgacaactacctcttctcactatttagggactttaaaagtcttggaccaaaaaccttcacagaaacagagcatagaacctgatagagcagataacataagggcagctgtttatcaggagtggttagaaaagaaaaatgtatatttacatgaaatgcacagaataaaaagaattgaaagtgaaaacttaaggatccaaaatgaacagaaaaaagctgctaaaagagaagaagcattagcatcatttgaggcctggaaggctatgaaagaaaaggaagcaaagaaaatagctgccaaaaagaggcttgaagaaaaaaacaagaagaaaactgaagaagaaaatgctgcaagaaaaggagaagcactacaagcttttgaaaaatggaaagagaaaaagatggaatatcttaaagagaaaaatagaaaggagagagaatatgaaagagcaaagaaacagaaagaggaggaaactgttgccgagaaaaagaaagataatttaactgctgttgagaaatggaatgaaaaaaaggaagcttttttcaagcaaaaggaaaaagaaaaaataaatgagaaaagaaaggaagaactgaaaagagctgagaaaaaagataaagataaacaagctattgatgaatannnnnnnn

SEQ ID NO: 21066 - DNA, 1670 bp, Homo sapiens
cacgcgtccggggggcggcttttcccggcacatgcgcaccgcagcgggtcgcgcgccctaaggagtggcactttttaaaagtgcagccggagaccagcctacagccgcctgcatctgtatccagcgccaggtcccgccagtcccagctgcgcgcgccccccagtcccgcacccgttcggcccaggctaagttagccctcaccatgccggtcaaaggaggcaccaagtgcatcaaatacctgctgttcggatttaacttcatcttctggcttgccgggattgctgtccttgccattggactatggctccgattcgactctcagaccaagagcatcttcgagcaagaaactaataataataattccagcttctacacaggagtctatattctgatcggagccggcgccctcatgatgctggtgggcttcctgggctgctgcggggctgtgcaggagtcccagtgcatgctgggactgttcttcggcttcctcttggtgatattcgccattgaaatagctgcggccatctggggatattcccacaaggatgaggtgattaaggaagtccaggagttttacaaggacacctacaacaagctgaaaaccaaggatgagccccagcgggaaacgctgaaagccatccactatgcgttgaactgctgtggtttggctggggggcgtggaaccagtttatctcagacatctgccccaagaagggacgtactcgaaaccttcaccgtgaagtcctgtcctgatgccatcaaaagaggtcttcgaccaataaattccacatcatcggcgcagtgggccatcggcattggccgtggtcatgatatttggcatgatcttcagtatgatcttgtggctgtgctatccgcaggaaccgcgagatggtctagagtcagcttacatccctgagcaggaaagtttacccatgaagattggtgggatttttgttgttgtttgtttgttgtgttgtgttgtttttttgccactaattttagtattcattctgcattgctagataaaagctgaagttactttatgttggggtcttttaatgcttcattcaatatgacattgtagttgagcggggggttggttgcttggtttatattttttcagtgttgttttgcttgttatattaagcagaaatcctgcaatgaaaggtactatattgctagactctagacaagatattgtacataaaagaattttttgtctttaaatagatacaaatgtctatcaactttaatcaagttgtaacttatattgaagacaatttgatacataataaaaaattatgacaatgtcaaaaaaaaaaaaaaaaaaaaaaaaaaaaaaaaggggggggggggaaaaaaaccccgggggggccatggccccttttgtgcaaggggggccccaacgagggacgctaaaaaagccagcggggccgggaaacccggcgggccggcaacatcgcgtcggctccgggaggacccctccttcgggggccataggggccccccgagaataagccgggaaaaaactcgcgttgcggggaccccgctctcgggggaatccgcgtaataataggacgccaccaaacacccccgcccccctggccaccgcacgaccatcccacgacaccacccagcgacacgcacgcaacacaaccaaagcggcttac

SEQ ID NO: 21067 - DNA, 387 bp, Homo sapiens
ggcgcagtggctcacgcctgtaatcccagcactttggaaggccaaggcgggcggatcacaaggtcaggagatcgagaccatcctggctaacacagtgaaaccctgtctctactaaaaatacaataatagtgtattgcacatttttaaactgaaagtaaatttaaaatgtgcttctcacaaaaaataagtatttgaaatgatggattagcttgatgtaattacttcatattgttcataaatcagaacatcactctactctataaatatatgccaattataaattgtcaatttaaaataaaattaaaaaataaaaaattgtaaaattgttactaacatgagttacagctgtcaatcatactagtctataacattttttagctatgtggt

SEQ ID NO: 21068 - DNA, 1150 bp, Homo sapiens
  misc_feature 1, 1142, 1143, 1144, 1145, 1146, 1147, 1148, 1149, 1150: n = A,T,C or G
ngtactcttgactgattagactttgcaagatattcagatgatggttacaggtaaacatatgaaaaagtggcagtactggagtttgaactacggatagccaaggagaccattcaggccctccgagccaacctgacaaaggccgcagaacatgaagttcctttacaggaacgaaaaaattacaaatcaagtcctgaaattcaggagccaatcaaacctcttgaaaagagagctctaaacttcttagtcaatgaatttttattgaagaataactataagcttacatcaataaccttttcagatgaaaacgatgatcaggattttgaattatgggatgatgtaggattaaacattccaaaacctccagacttattgcaactctaccgggattttggaaatcatcaagtaactggaaaagatcttgtagatgtggccagtggagtagaagaagatgaattagaggcccttacaccaattataagcaaccttcctccaactcttgaaactccccagcctgcagagaactccatgttagtacagaaattagaagataaaattagtttgttaaatagtgagaaatggtcattgatggagcaaatcagaagacttaaaagtgaaatggacttcctcaaaaatgaacactttgccatcccagcagtttgtgactctgttcagcctcctttggatcagttgccccacaaagactctgaggacagtggacagcatccagatgtaaatagttcagacaagggaaaaaacacagacatccatctttcaatatcagatgaagctgattccactattcctaaagagaattccccaaattcattccccaggagagaaagagaaggaatgccaccttcttctctatcaagtaaaaagacagttcattttgataaacctaataggaaattgtctcctgcattccatcaagcactactctctttttgtcgaatgtcagcagatagtcgtttaggatacggggtgtctcgtattgcagacagtgaaaaaagcgttatgttaatgctgggacgctgcctgccacacattgttcccaatgtgctattggcaaagagagaggagttgatccccctcatattgtgtacagcatgtctacatcctgagcctaaagagcgagatcagcnnnnnnnnn

SEQ ID NO: 21069 - DNA, 3122 bp, Homo sapiens
  misc_feature 1, 3113, 3114, 3115, 3116, 3117, 3118, 3119, 3120, 3121,3122: n = A,T,C or G
ncgacccacgccgtccgaagaaacggaggagggaagcctggtgggggggagggagcccgcaggatcaggggtcagagttagggggcttccctcctgctgcagccaaagctcagggccgccaacttccagctgcagcggcgactttcagtttcatttccacggaccctcctgcctgggccgcagccgccgccgcgatgcccagtaagttcagctgccggcagctccgggaggcgggccagtgtttcgagagtttcctggtcgttcggggactggacatggagacagatcgcgagcggctgcggaccatttataaccgcgacttcaagatcagctttgggacccccgcccctggcttctcctccatgctgtatggaatgaagattgcaaatctggcctacgtcaccaagactcgggtcaggttcttcagactcgaccgctgggccgacgtgcggttcccagaaaagaggagaatgaagctggggtcagatatcagcaaacaccacaagtcactgctagccaagatcttttatgacagggctgagtatcttcatgggaaacatggtgtggatgtggaagtccaggggccccatgaagcccgagatgggcagctccttatccgcctggatttgaaccgcaaagaggtgctgaccctgaggcttcggaatggcggaacccagtctgttaccctcactcacctcttcccactctgccggacaccccagtttgctttctacaatgaagaccaggagttgccctgtccactgggccccggtgaatgctatgaactccatgtccattgtaagaccagctttgtgggctacttcccagccacagtgctctgggagctgctgggacctggggagtcgggttcagaaggagccggcacattctacattgcccgcttcttggctgccgtcgcccacagccccctggctgcacagctgaagcccatgactcccttcaagcggacccggatcaccggaaaccctgtggtgaccaatcggatagaggaaggagagagacctgaccgcgctaagggctatgacctggagttaagtatggcgctggggacatactacccacctccccgcctcaggcagctgctccccatgcttcttcagggaacaagtatcttcactgcccctaaggagatcgcagagatcaaggcccagctggagacagccctgaagtggaggaactatgaggtgaagctgcggctgctgctgcacctggaggaactgcagatggagcatgatatccggcactatgacctggagtcggtgcccatgacctgggaccctgtggaccagaaccccaggctgctcacgctggaggttcctggagtgactgagagccgcccctcagtgctacggggcgaccacctgtttgcccttttgtcctcggagacacaccaggaggaccccatcacatataagggctttgtgcacaaggtggaattggaccgtgtcaagctgagcttttccatgagcctcctgagccgctttgtggatgggctgaccttcaaggtgaactttaccttcaaccgccagccgctgcgagtccagcaccgtgccctggagctgacagggcgctggctgctgtggcccatgctctttcctgtggcacctcgggacgtcccgctgctgccctcagatgtgaaactcaagctgtacgaccggagtctggagtcaaacccagagcagctgcaggccatgaggcacattgttacgggcaccacccgtccagccccctacatcatctttgggcctccaggcaccggcaagactgtcacgttagtggaggcaattaagcaggtggtgaagcacttgcccaaagcccacatcttggcctgcgctccatccaactcaggggctgacctactctgtcaaaggctccgggtccaccttcctagctccatctaccgcctcctggcccccagcagggacatccgcatggtacctgaggacatcaagccctgctgcaactgggacgcaaagaagggggagtatgtatttcccgccaagaagaagctgcaggaataccgggtcttaattaccaccctcatcactgccggcaggttggtctcggcccagtttcccattgatcacttcacacacatcttcatcgatgaggctggccactgcatggagcctgagagtctggtagctatagcagggctgatggaagtaaaggaaacaggtgatccaggagggcagctggtgctggcaggagaccctcggcagctggggcctgtgctgcgttccccactgacccagaagcatggactgggatactcactgctggagcggctgctcacctacaactccctgtacaagaagggccctgatggctatgacccccagttcataaccaagctgctccgcaactacaggtctcatcccaccatcctggacattcctaaccagctctattatgaaggggagctgcaggcctgtgctgatgtcgtggatcgagaacgcttctgccgctgggcgggcctacctcgacagggctttcccatcatctttcacggcgtaatgggcaaagatgagcgtgaaggcaacagcccatccttcttcaaccctgaagaggctgccacagtgacttcctacctgaagctgctcctggccccctcctccaagaagggcaaagctcgcctgagccctcgaagtgtgggcgtcatctccccgtaccggaaacaggtggagaaaatccgttactgcatcaccaaacttgacagggagcttcgaggactggatgacatcaaggacttgaaggtgggttcagtagaagaattccaaggccaagaacgaagcgtcatcctcatctccaccgtgcgaagcagccagagctttgtgcagctggatctggactttaatctgggtttccttaagaaccccaagaggttcaatgtagctgtgacccgggccaaggccctgctcatcatcgtggggaacccccttctcctgggccatgaccctgactggaaagtattcctggagttctgtaaagaaaacggagggtataccgggtgtcctttccctgcaaatggactgcaaaggcacaaattctggggttgggaatagccttattagggcaagagaaatcccgannnnnnnnnn

SEQ ID NO: 21070 - DNA, 252 bp, Homo sapiens
acatccaaaatcatttcagcatataacctgtaaagactgcatcatcccagctactttcctgctgacttccacttgggtttactcaatgggtgacactcacaggacataagagattagaaagagggataaggttttttatatatctgctccctccttacttaaagccatggttttagcagaggcccaaggtcccccatttccaccccaaccctgcacactgagcaaaggcagcagatcccaaacccaccccac

SEQ ID NO: 21071 - DNA, 5145 bp, Homo sapiens; identical to SEQ ID NO: 20824
  misc_feature 1, 5144, 5145: n = A,T,C or G

SEQ ID NO: 21072 - DNA, 411 bp, Homo sapiens; identical to SEQ ID NO: 20409

SEQ ID NO: 21073 - DNA, 1490 bp, Homo sapiens
tatagggagtcgacccacgcgtccggtgacatccgccatcttgagagtcaactactgactggactgagttgtgtggtatatgcttctgtttacttctcttctgtcttttttaagtggccaaatagcaaacgcttaaataggaaatctctgggagacttgaataaaagactttgcttggtagaaaatcatgtcacagaaaggctaatagacagcaaagtaaatcagcaagtccctgagcagtaggattaggattcctgtctcctttcagattcaaatgcatctgtttctggggttaacagtggactgttaagaggctgtgcagcttgggttaagtcattcttatctctgggcttcaggagcttagaccagatagtttctacaggctctcttggtgctgatgccttgggattctgtggctgttttctgtaagatctgcaagggggaaacaggattttggcagcaatcctttcattactaaagcttcctttcttttcgggtacagtgaaaagagccaaggctgtgtgaccccctcatcacttagccaggcgtatggtcctggtttctgaggctgccagaaagcatcttagcaatttgtgtttggatggtccatgcctgactattctaggctggaggttcctaaagagtaacaagaggaagagaaacaagaatctctgacacttgttgagaatagagcacagtcccatttgtttgaaaagagacaccaggcagccatgtttatgtgccagaaatgcattccacctcaaggaggacttaatttatggacccgtgtgtgccaggctgagctgggcaagatctttctcaggacaaactctgccatgcagctaaaagcctggaaactaaaggatttcatgtagtaaactatctcccaacccctgtaggcatcagaccacaggatgaggtttcagaaggtcataaggcagaatagttaagcctacagggcttacagtctgacagacctgggttcagttcttgggtcttcatcactagttttgtgacttcgggaagatgactcccggagcctcagtgagcctcagttacttcatatgtaaatgaagtaatactatctacttcacaaggctgttgaaaggattaaatggagaatgggtgtaaaacccttagtgcagtgccgtgcacacaccgtagatgccgaacgtgtgatgttggcactacacaatgtgtaatcccaatcaggcagagctaggcaggcaaatctaatccaggatctttgtaaggggactgagaaccagagactggagaaagccagtgtaaacaccatgagcaaaggagcaagagaaggggcattgtgtaagtaggagatggagcttggacttactaagtggatcagggtagaagaatccagtcaggaccaagggaggagagtccaggaaaatgccatgagcagctctgtagcatgaccttgttgggctgggttaaagtagggtctgccaccagtcatgtgacagaaaggt

SEQ ID NO: 21074 - DNA, 968 bp, Homo sapiens; identical to SEQ ID NO: 20935

SEQ ID NO: 21075 - DNA, 540 bp, Homo sapiens; identical to SEQ ID NO: 20963
  misc_feature 539, 540: n = A,T,C or G

SEQ ID NO: 21076 - DNA, 520 bp, Homo sapiens; identical to SEQ ID NO: 21046
  misc_feature 1, 2, 3, 4, 5, 6: n = A,T,C or G

SEQ ID NO: 21077 - DNA, 505 bp, Homo sapiens; identical to SEQ ID NO: 20929

SEQ ID NO: 21078 - DNA, 3281 bp, Homo sapiens
  misc_feature 1, 2, 3280, 3281: n = A,T,C or G
nnctcacgtgacaaagctcccggaggtgggagccctgggccaaaatggcggcctacctgcagtggcggcgcttcgttttcttcgacaaggagctggtgaaggagccgctgagcaatgatggggccgctcccggggccacacctgcttctggatccgctgcttccaagttcctttgcctccctcctggcatcactgtctgcgactcaggccgagggagcctggtctttggagatatggaaggccagatctggttcttgccacgttccctacagcttacaggcttccaagcctacaaactacgggtgacacacctgtaccaactgaagcagcacaatattctggcatctgttggagaagatgaagagggcatcaaccccttggttaagatctggaacctggagaagagagatggtggcaatccactctgcactcgaatcttccctgctattccaggaacagagccaactgttgtatcttgtttgactgtccatgaaaatctcaactttatggccattggtttcacagatggcagtgttacattgaacaaaggagacatcacccgggaccggcatagcaagacccagattttgcacaagggcaactatcctgtaactggattggcctttcgccaagcaggaaagaccactcacttgtttgttgtgacaacagagaacgtccagtcctatatagtttctggaaaagactaccctcgcgtggagttggacacccatggttgtggcctgcgctgctcagccctaagtgacccttctcaggacctgcagttcattgtggccggggatgagtgtgtctacttgtaccagcctgatgaacgtgggccctgcttcgcctttgagggccataagctcattgcccactggtttagaggctaccttatcattgtctcccgtgaccggaaggtttctcccaagtcagagtttaccagcagggattcacagagctccgacaagcagattctaaacatctatgacctgtgcaacaagttcatagcctatagcaccgtctttgaggatgtagtggatgtgcttgctgagtggggctccctgtacgtgctgacgcgggatgggcgggtccacgcactgcaggagaaggacacacagaccaaactggagatgctgtttaagaagaacctatttgagatggcgattaaccttgccaagagccagcatctggacagtgatgggctggcccagattttcatgcagtatggagaccatctctacagcaagggcaaccacgatggggctgtccagcaatatatccgaaccattggaaagttggagccatcctatgtgatccgcaagtttctggatgcccagcgcattcacaacctgactgcctacctgcagaccctgcaccgacaatccctggccaatgccgaccataccaccctgctcctcaactgctataccaagctcaaggacagctcgaagctggaggagttcatcaagaaaaagagtgagagtgaagtccactttgatgtggagacagccatcaaggtcctccggcaggctggctactactcccatgccctgtatctggcggagaaccatgcacatcatgagtggtacctgaagatccagctagaagacattaagaattatcaggaagcccttcgatacatcggcaagctgccttttgagcaggcagagagcaacatgaagcgctacggcaagatcctcatgcaccacataccagagcagacaactcagttgctgaagggactttgtactgattatcggcccagcctcgaaggccgcagcgatagggaggccccaggctgcagggccaactctgaggagttcatccccatctttgccaataacccgcgagagctgaaagccttcctagagcacatgagtgaagtgcagccagactcaccccaggggatctacgacacactccttgagctgcgactgcagaactgggcccacgagaaggatccacaggtcaaagagaagcttcacgcagaggccatttccctgctgaagagtggtcgcttctgcgacgtctttgacaaggccctggtcctgtgccagatgcacgacttccaggatggtgtcctttacctttatgagcaggggaagctgttccagcagatcatgcactaccacatgcagcacgagcagtaccggcaggtcatcagcgtgtgtgagcgccatggggagcaggacccctccttgtgggagcaggccctcagctacttcgctcgcaaggaggaggactgcaaggagtatgtggcagctgtcctcaagcatatcgagaacaagaacctcatgccacctcttctagtggtgcagaccctggcccacaactccacagccacactctccgtcatcagggactacctggtccaaaaactacagaaacagagccagcagattgcacaggatgagctgcgggtgcggcggtaccgagaggagaccacccgtatccgccaggagatccaagagctcaaggccagtcctaagattttccaaaagaccaagtgcagcatctgtaacagtgccttggagttgccctcagtccacttcctgtgtggccactccttccaccaacactgctttgagagttactcggaaagtgatgctgactgccccacctgcctccctgaaaaccggaaggtcatggatatgatccgggcccaggaacagaaacgagatctccatgatcaattccagcatcagctcaagtgctccaatgacagcttttctgtgattgctgactactttggcagaggtgttttcaacaaattgactctgctgaccgaccctcccacagccagactgacctccagcctggaggctgggctgcaacgcgacctactcatgcactccaggaggggcacttaagcagcctggaggaagatgtgggcaacagtggaggaccaagagaacagacacaatgggacctgggcgggcgttacacagaaggctggctgacatgcccagggctccactctcatctaatgtcacagccctcagaactaaagcggactttctttccctgccttcttatttagtcagcttgccatccctcctcttcactagcagtgtagatcattccagatcagtgggggagggcacctcagcaacctctgagtgtggacaatagctgctttcttctctatccaagagcaccaggctgtgcttgggtccttgctctcagagtctataaataaaagaatataatgattgggaaaaaaaaaaaaaaaagcggccgttaatcgacagcaacaaaaaataggggaccccccgggccnn

SEQ ID NO: 21079 - DNA, 435 bp, Homo sapiens; identical to SEQ ID NO: 20934
  misc_feature 429, 430, 431, 432, 433, 434, 435: n = A,T,C or G

SEQ ID NO: 21080 - DNA, 4037 bp, Homo sapiens
  misc_feature 4026, 4027, 4028, 4029, 4030, 4031, 4032, 4033, 4034, 4035,4036, 4037: n = A,T,C or G
cacgcgtccgcaagagtgtgcttgtggggtgactgcattttttttccctgccaaaccagaattagccggtataggaatgaacgagcatgaagatttgaaattgctccgattggaaggaagcccaggttaggtttgggcacctccaaacgcacccgttttaaagccacctggactgaggcgtcgagctttcagctccaccaaacgctcacctggcctggcagcgagcggcggaagagcccgggagcccctcacagagcgcaccgagccgggcggagagctgagccgcaggcacccgcgtctccaggatgataggcgacattgcaacaaatctctacacccagcagctcagggggctccaagcagagcagcaagttcgaggatccgggcgtggagccgagtgaggccgcagcccagcgggcctcgggcgaaaaatcttggaaaatgtataccagtcatgaagatattgggtatgattttgaagatggccccaaagacaaaaagacactgaagccccacccaaacattgatggcggatgggcttggatgatggtgctctcctctttctttgtgcacatcctcatcatgggctcccagatggccctgggtgtcctcaacgtggaatggctggaagaattccaccagagccgcggcctgaccgcctgggtcagctccctcagcatgggcatcaccttgatagtgggccctttcatcggcttgttcattaacacctgtgggtgccgccagactgcgatcattggagggctcgtcaactccctgggctgggtgttgagtgcctatgctgcaaacgtgcattatctcttcattacttttggagtcgcagctggcctgggcagcgggatggcctacctgccagcggtggtcatggtgggcaggtatttccagaagagacgcgccctcgcccagggcctcagcaccacggggaccggattcggtacgttcctaatgactgtgctgctgaagtacctgtgcgcagagtacggctggaggaatgccatgttgatccaaggtgccgtttccctaaacctgtgtgtttgtggggcgctcatgaggcccctctctcctggtaaaaacccaaacgacccaggagagaaagatgtgcgtggcctgccagcgcactccacagaatctgtgaagtcaactggacagcagggaagaacagaagagaaggatggtgggctcgggaacgaggagaccctctgcgacctgcaagcccaggagtgccccgatcaggccgggcacaggaagaacatgtgtgccctccggattctgaagactgtcagctggctcaccatgagagtcaggaagggcttcgaggactggtattcgggctactttgggacagcctctctatttacaaatcgaatgtttgtagcctttattttctgggctttgtttgcatacagcagctttgtcatccccttcattcacctcccagaaatcgtcaatttgtataacttatcggagcaaaacgacgttttccctctgacgtcaattatagcaatagttcacatctttggaaaagtgatcctgggcgtcatagccgacttgccttgcattagtgtttggaatgtcttcctgttggccaacttcacccttgtcctcagtatttttattctgccgttgatgcacacgtacgctggcctggcggtcatctgtgcgctgatagggttttccagtggttatttctccctaatgcccgtagtgactgaagacttggttggcattgaacacctggccaatgcctacggcatcatcatctgtgctaatggcatctctgcattgctgggaccaccttttgcagggtggatctatgacatcacgcaaaaatatgatttttccttctacatatgtggtttgctttacatgataggaatactctttttacttattcagccgtgcattcgaattatagaacaatccagaagaaaatacatggatggtgcacatgtttagtatcatgtaatgttccgtgtaggtttcattgtaatactcatgcctacctcgcatggttgctgtgaggcacctatgacaggacgtgggaaagcattttgtacggtaactggcactgtcatttgtaaatgccattgtcacagcctcatttgtaagcagcactgcctctctgtttggggagatgtaatgctggaagatcttaaggactacatacattctagagatgacagtgttgttcaaagacagcctagtaagtaattggtagaaatgcccttataaaaaccattctcttgtcatctactgggactagggttttaaatacagcttttaaaaacaaaaacagggaataaaagcttttcaactcaaccacttctttgtaagacaaaactgaagtatctgtgtgcttccagaaagcttacagataaatgggtttcaagcacaagaatatgactagatttcagaaattaattattacagggagctattgatctactagcatcaaacaaaggcaagctctaattccacaggtaatacaatttagtgcaattaaagaaacacggcttgtatttttatgagggaattctgcagctagggattgtgactcctaaatcctcctctaaaagaaggcacttgccattaatcctaattcagtgctatccagttataaatggaatcttgagacaaaaccttaacaaagaaataacagtaatgatttccttagcagaagccgtatttgtacgcacaacattaaatcaagggctacaattcaagcacttttattcgtatcattggcctcttagatgatataagcatgaggtggggcctgtaatatttttttctgagtttcttctgcccaaaaatataatatagaactaattgctaactgacaaataaagttaatagttaaatcatctccaaggaatgttgctaatccaaagtataacactatcaatttgtgaggataataaatggaatgccattagtgtagatgtctgtgccacatctgacactggagtagtgataacaaatagcccatctctagactctcgtgttgttatatagaccattcatttgcctgagcgtggcacagttttaaaaatagttctcttgattgatttcatacagaagatgactgtgatccatgacatctaataatgccctttctttatctgagatgtctatttttctaagccaaacgtttttcagactgcagaatgttcttcccagatcatttgaaatttctggctgccttacttgtttacagatagtttaagactatttaaatttctactcacaatttgatcatcacacacacacaaatccttgaatatcattgccagtgtcttaggtcaaatttacctaaagtgaatacagcccattctcaattatccttcacaattagacgcaggaatgctactaggaattggaatcaaacaatgccaccccaagcgtaattttagccagcagtttcagttatactcaaccatgcccttctgagctgttaacaagtgattcaatggacaagttctctttttgttccatctccattatttcctgctctaatgtatagtgggagtggttgtgtaatgaaaggaccaccaaaataataaaaggcagctaatggaaaggagagacaaaagcatggttaatatatatacttaatattacctccaatgactcgggaattgcctgtaaattattatagacaatagattgcatgtcatactccattggttcaacacaaaactatgtgttatcattacagtttggctgctgttaaagaaatccagctctctatttgataaaagataatctttaaagctgaggccaatgtccctctctatctctctctgtgttattaccatagaattgggatgattgattgcacccctgttgctgttttaacaccacttgctcgtacttcctttcgacacattaattacagagggcgctaatttaagggttgccagttggaagtgcgccgggggccccaaaagtcagagcccaaccagaggcccacggtgtggtcttaaggccccaagacgcaaaaacgcnnnnnnnnnnnn

SEQ ID NO: 21081 - DNA, 374 bp, Homo sapiens
  misc_feature 371, 372, 373, 374: n = A,T,C or G
acgtattaccaaagaaaccaaaaactgcctttgactaaggggggtgttgaaagagaacttaaccttattaggaaaccctgacaaaatgatggaagactattgccttattttgcactatttgtgaatcatcttacactgcatttttttatgaatgctttattcaaaaggcagttcgctttacggtgaaaaagccttccaagattcaaagcagattcctctggtcttatattatatccttcttaaaaaccagagttcttaagtaacagtatattgaatggcatcacaaaacattttcatccttaatggatttctttaacaagtggttaaaaaaagtgtccaatcagccgggcgcagtggcttacacctgtaannnn

SEQ ID NO: 21082 - DNA, 332 bp, Homo sapiens
accattttagcaaacaacaacaacaacaacagaaactggatttctttttggtttaaactccatttgattgtctgtatcaatgatcacaggaaatgattaaatgtcgtgcatttaatgtaatttgggttatgaagctcatttgggttatgctcttcacttttctctgtaaaattacaacatgcagtatgcactttcccacgacagaattgtttatgtgttattatggcgtctttgcagacttgtaactttatcctagaacctcagtggtatgacccgctagcatgcatacttcatgggtctgtcattatagggcctttcaaatatcacctatc

SEQ ID NO: 21083 - DNA, 5145 bp, Homo sapiens; identical to SEQ ID NO: 20824
  misc_feature 1, 5144, 5145: n = A,T,C or G

SEQ ID NO: 21084 - DNA, 905 bp, Homo sapiens; identical to SEQ ID NO: 20936
  misc_feature 904, 905: n = A,T,C or G

SEQ ID NO: 21085 - DNA, 505 bp, Homo sapiens; identical to SEQ ID NO: 20929

SEQ ID NO: 21086 - DNA, 505 bp, Homo sapiens; identical to SEQ ID NO: 20929

SEQ ID NO: 21087 - DNA, 650 bp, Homo sapiens
  misc_feature 650: n = A,T,C or G
aggtacacgccaccttccgagcgcgggctgcggcccagtctcgcgcccctcctgctctttgcttcctccctcctgattcctgacccaaagttcaaccccgggagactggagaatacagacttttttttttctttcctcctgagagcttcagactagaaaagggaaaaagccccacttttgcttcgtcactagaaaccgggtcatctgagtcagccgagccaagtgacgttaggccgacccgggccccgggctagcagagcggaggcgctgccacgaaactcgtacctgcggctaagagcaggaaaaccctttcctgtatgccatctgttttctgtggggccctgagtgatgaggagaggaacaaggattcatggaagtgaggtcaaatttgtcaagatgtccacaatcccgagacactttggcctgaaatacaaagaggaatcgtatatgtttaaagagcttgagaaagttcggcaggaaactaaaaaggattttctccgattcaagcagaagttggcctccaagccggctgtagatgaaagcccagtccacagcctccatgcccccggcccggcccgccccgcgcgcgtttcctgcgccgcagcccggacgtcgagaagatacccttcgcttaaaggccctgcgatgan

SEQ ID NO: 21088 - DNA, 387 bp, Homo sapiens; identical to SEQ ID NO: 21067

SEQ ID NO: 21089 - DNA, 364 bp, Homo sapiens; identical to SEQ ID NO: 20925

SEQ ID NO: 21090 - DNA, 3399 bp, Homo sapiens
  misc_feature 1, 2, 3230, 3231, 3232, 3233, 3389, 3390, 3391, 3392, 3393,3394, 3395, 3396, 3397, 3398, 3399: n = A,T,C or G
nncggaaaagcaccttgagttactggcttcccctttacctattccatcaaccttccttccacacagtagtactcccgctttgcatcttacagttcagaggctaaagttgccaccaccacagggatcttctgagagctgcacagttaacatcccacaacaaccacccggaagcctgagcatcgcatcaccaaacactgcctttattcctatccataacccaggtagtttcccaggctctcctgttgctaccacggaccccatcacaaaatctgcatcccaagtggtaggactcaatcaaatggtgcctcaaattgagggaaacacagggacagtccctcagcctaccaatgtgaaggtagttcttccagcagctggcctctcagctgctcagccaccagcttcctaccccttaccaggctctccccttgctgccggcgtgttacccagccagaactccagtgtgctcagcacagcagcaacttctccccagccagcgagcgcaggtatcagccaggcccaggcaactgttcctcctgcagttcctacccacaccccaggccctgccccgagcccaagccctgccttgacacacagtaccgcgcagagtgacagcacctcttacatcagtgctgtggggaacacgaacgctaatgggacagtagtgccaccgcagcagatgggctcaggtccttgtggttcttgtgggcgaaggtgcagctgtgggaccaatggaaaccttcagctaaatagttactattatcctaatccaatgcctggaccaatgtaccgagtcccttcattctttactctgccatccatttgcaatggcagctacctcaaccaagcacatcagagcaatggaaaccaacttcctttttttctgcctcagactccatatgcaaatggactggtacatgacccagtcatggggagccaagccaactatggcatgcagcagatggcaggatttgggagattctatcctgtatatccagcacctaacgtagttgccaacaccagtggttcggggcccaagaagaatgggaatgtctcatgttacaattgtggtgtaagcggacactatgcacaggactgtaagcagtcgtccatggaggccaatcaacaaggcacttacagactgagatacgcacctcccctccccccttctaatgatacgttggattctgcagactgaaacgagtaaagcttgcctacttaatacactcaagtgtggggagtcatggggtgtggaggggaggaaaggaaaggtattttgtttctttgtctatacatttcctagatttctatgcagttgggatttttcatttctcttgtaccaatgtccaaaacaagaaagaatgcaatgcttttgagcctctggtctcctggttcaacaacaggcttatatgtatgatacatgtaatttaaaccttcagacaaacttaaatgttggtgcgtgctttttttttttttttacactgaatacttgctgtgtgcaatgtttactgaatctttaaaactgtgtatttgaccttttttttacaacactggtgacagtcatatggttttgaaaaaaaaaagaaattttgcttcttcccagcttttctcactttcaccctaaacgacacttcctccccagccagcctcactctgtctccggcccgcagcaggagcagccagcagtgcattcaccccacttttgtaaactgctctgcatataaaccaagggcagaatgtttcaccctgatcttatgggaggaatcaaactcccaaaatagtgtgtatatatgtaataaacagcgtcacgtaaatacatatatgcagtgcttgttgtccaaatagaaatgaaaataagtggaagagagaggaagaagtcaaaccatatgaaactgaaaaaatatgacgtacgaaatggacaaaaagctttttctgaaaccaactttttacttccatcatccttttttagcctgttgcttcagagagacacaaagtgaacacactggtgtgaatgtcgctctctgtgtgcttgtgtttgtaatgaaagtctacagccaattttacttgtctaccaccgtgttgtgctcaaagagacactacttgagtgaagatttcttctttccctgtaccagctgttacagtgttacgttgtgtttaaaatgtgtatggtttattgcaatctgaacagagctatgggtttctaccataagtcaggttgtttgttccctaacctgtctctcgtagcaaagtcacttttataacagtttaccactatgcttgattataatgtgaaaggcggaattctgagtgtgttaagatggtattaatcatgtcggtgtcatgtcactaagtttaatgctgctgtttttaaaaaaaaaaaagtttttttaaaaagccaatctatgtactaaattgcttccaggtaatttttgatttcctaaagtgcactgaggttatctggaagattgggtgtattttttggtgactgctgcattcatcagcaatgaacagtttccactgtatagtcctaggggtcagggggtgggggtttcattttccattcctcagcacagagcagaaatgatagatttttattgtttggagtaacgttggtatgcagcagaggaacataaacatttggtcttggttcagaagcctaacagattgctagacaagagaaaaaacttgaagaaaaaagaagcttaatttcatgcttcataagtagcatttatatttatagcaccaatgtacattttgaaactttctttcaggggtgggagttatggggaaggggtgggtgtgaaggggtagatgaaagctttaatttagaaagaaagttcaagtaaaggaaattattttgattaaatatattttatttgatctgggtatttttggaccacattattaaattaattgttaagctgcagttgagttgttcaagtgagagttttgataagccacttatgggccgcgttgtgaatcacttgccagttgtactttatggagcttattttatgatttaaaatactgtactgtacataggaggtatgttaccttctccttatttgtatgtttaccatatactttgatatttgaaatgttatgtactggaaaggccacttatatttctagaacagattggattttatgcaaccttttttccttgaattaacagcaataaaaaaatgaaaaacagcttaaaaaaaaaaaaagagaatgataagcaaaaaaannnnggggggggcttttatttttttaaaaaaaaaaaattccaagcttttccgggggcctggaaaaaaaaaaaaaacccaaaggggtgcccaaacttttttttgggcctttattgggggtcaaaaaaaggcaattccctccccatttccaaaaaaaaggannnnnnnnnnn

SEQ ID NO: 21091 - DNA, 505 bp, Homo sapiens; identical to SEQ ID NO: 20929

SEQ ID NO: 21092 - DNA, 505 bp, Homo sapiens; identical to SEQ ID NO: 20929

SEQ ID NO: 21093 - DNA, 1274 bp, Homo sapiens; identical to SEQ ID NO: 20926
  misc_feature 1271, 1272, 1273, 1274: n = A,T,C or G

SEQ ID NO: 21094 - DNA, 1275 bp, Homo sapiens; identical to SEQ ID NO: 20967
  misc_feature 1273, 1274, 1275: n = A,T,C or G

SEQ ID NO: 21095 - DNA, 1275 bp, Homo sapiens; identical to SEQ ID NO: 20967
  misc_feature 1273, 1274, 1275: n = A,T,C or G

SEQ ID NO: 21096 - DNA, 2487 bp, Homo sapiens; identical to SEQ ID NO: 20922
  misc_feature 1, 2, 3, 4, 5, 6, 7, 8, 2459, 2460, 2461, 2462, 2463, 2464,2465, 2466, 2467, 2468, 2469, 2470, 2471, 2472, 2473, 2474,2475, 2476, 2477, 2478, 2479, 2480, 2481, 2482, 2483, 2484,2485, 2486, 2487: n = A,T,C or G

SEQ ID NO: 21097 - DNA, 526 bp, Homo sapiens; identical to SEQ ID NO: 21044
  misc_feature 1, 2, 3, 4, 5, 6, 7, 8, 526: n = A,T,C or G

SEQ ID NO: 21098 - DNA, 528 bp, Homo sapiens; identical to SEQ ID NO: 21029

SEQ ID NO: 21099 - DNA, 505 bp, Homo sapiens; identical to SEQ ID NO: 20929

SEQ ID NO: 21100 - DNA, 360 bp, Homo sapiens
  misc_feature 1, 2, 3: n = A,T,C or G
nnngagcatggcagtacaccgcataggaaggactctcttactagatgagctagatattcaagaactctttatgagatcgtctcagactggtgactggacatggttgaaagagttttatcaaagactcattgatcagaagtggcagaggaagaaaaagagcaaagagcactggtatcaaaaggcaattctttccaagtttttatattacagtatcaatggtgatggagccgctcagcctgtctcatccaccgcagaacagcaggaatcgtccagttcagatcagacaaatgattcggaaggggcttcatggcctgctcccttcgaaatgccttcttcagtttctgaagatcccagtgcttc

SEQ ID NO: 21101 - DNA, 3983 bp, Homo sapiens
acgcgggggaagtggtagcagttcctcctaactcctgccagaaacagctctcctcaacatgagagctgcacccctcctcctggccagggcagcaagccttagccttggcttcttgtttctgctttttttctggctagaccgaagtgtactagccaaggagttgaagtttgtgactttggtgtttcggcatggagaccgaagtcccattgacacctttcccactgaccccataaaggaatcctcatggccacaaggatttggccaactcacccagctgggcatggagcagcattatgaacttggagagtatataagaaagagatatagaaaattcttgaatgagtcctataaacatgaacaggtttatattcgaagcacagacgttgaccggactttgatgagtgctatgacaaacctggcagccctgtttcccccagaaggtgtcagcatctggaatcctatcctactctggcagcccatcccggtgcacacagttcctctttctgaagatcagttgctatacctgcctttcaggaactgccctcgttttcaagaacttgagagtgagactttgaaatcagaggaattccagaagaggctgcacccttataaggattttatagctaccttgggaaaactttcaggattacatggccaggacctttttggaatttggagtaaagtctacgaccctttatattgtgagagtgttcacaatttcactttaccctcctgggccactgaggacaccatgactaagttgagagaattgtcagaattgtccctcctgtccctctatggaattcacaagcagaaagagaaatctaggctccaagggggtgtcctggtcaatgaaatcctcaatcacatgaagagagcaactcagatacccaatgatgttagctgtggaagctacaaaaaacttatcatgtattctgcgcatgacactactgtgagtggcctacagatggcgctagatgtttacaacggactccttcctccctatgcttcttgccacttgacggaattgtactttgagaagggggagtactttgtggagatgtactaccggaatgagacgcagcacgagccgtatcccctcatgctacctggctgcagccccagctgtcctctggagaggtttgctgagctggttggccctgtgatccctcaagactggtccacggagtgtatgaccacaaacagccatcaaggtactgaggacagtacagattagtgtgcacagagatctctgtagaaagagtagctgccccttctcagggcagatgatgctttgagaacatactttggccattacccccagctttgaggaaaatgggctttggatgattattttatgttttagggacccccaacctcaggcaattcctacctcttcacctgaccctgcccccacttgccataaaacttagctaagttttgttttgtttttcagcgttaatgtaaaggggcagcagtgccaaaatataatcagagataaagcttaggtcaaagttcatagagttcccatgaactatatgactggccacacaggatcttttgtatttaaggattctgagattttgcttgagcaggattagataaggctgttctttaaatgtctgaaatggaacagatttcaaaaaaaaaccccacaatctagggtgggaacaaggaaggaaagatgtgaataggctgatgggcaaaaaaccaatttacccatcagttccagccttctctcaaggagaggcaaagaaaggagatacagtggagacatctggaaagttttctccactggaaaactgctactatctgtttttatatttctgttaaaatatatgaggctacagaactaaaaattaaaacctctttgtgtcccttggtcctggaacatttatgttccttttaaagaaacaaaaatcaaactttacagaaagatttgatgtatgtaatacatatagcagctcttgaagtatatatatcatagcaaataagtcatctgatgagaacaagctatttgggcacaacacatcaggaaagagagcaccacgtgatggagtttctccagaagctccagtgataagagatgttgactctaaagttgatttaaggccaggcatggtggtttacgcctataatcccagcattttgggagtccaaggtgggcagatcacttgagctcaggagctcaagatcagcctgggcaacatggtgaaaccttgtctctacataaaatacaaaaacttagatgggcatggtgctgtgtgcctatagtcccactacttgtggggctaaggcaggaggatcacttgagccccggaggtcgaggctacagtgagccaagagtgcactactgtactccagccagggcaagagagcgagaccctgtctcaataaataaataaataaataaataaataaataaataaaaacaaagttgattaagaaaggaagtataggccaggcacagtggctcacacctgtaatccttgcattttggaaggctgaggcaggaggatcactttaggcctggtgtgttcaagaccagcctggtcaacatagtgagacactgtctctaccaaaaaaaggaaggaagggacacatatcaaactgaaacaaaattagaaatgtaattatgttatgttctaagtgcctccaagttcaaaacttattggaatgttgagagtgtggttacgaaatacgttaggaggacaaaagcaatgtgtaagtctttaatgccgatatcttcagaaaacctaagcaaacttacaggtcctgctgaaactgcccactctgcaagaagaaatcatgatatagctttgccatgtggcagatctacatgtctagagaacactgtgctctattaccattatggataaagatgagatggtttctagagatggtttctactggctgccagaatctagagcaaagccatccccgctcctggttggtcacagaatgactgacaaagacatcgattgatatgcttctttgtgttatttccctcccaagtaaatgtttgtccttgggtccattttctatgcttgtaactgtcttctagcagtgagccaaatgtaaaatagtgaataaagtcattattgaagttcaacgaaaaaaaaaaacttgggggacgcgcacgagaaaagatctaaacacacatgggggcggcgccagataaggaaagagccatcgcccagaaacggcacaagtgggtatccaaaaggggagcaggaccagggcgtcgctaaacccactatccgcggaaagaaaccacagaagcgcacactcgcgcctacagcgcacaaaaacaatagaaaagcgaaagaaagacaacgcacaaccagacaaacacaaccgcacaccaacaagcgaggcgagagaggacgagagggaggatgaagggaggggacacgaagagagagacggaggagtgagagggaggaagacgcaagaaggagacgagagaggggaggaagaggagcggaggaaaagagcggcgagcggagcgagaagagacggggagagaggcgggagccgaagaacaggtccgaagcgccgaggggagagagcggggggaggagggcgagagaaaacggagagaggagaggcagaggcagaagagggaagacggcgaaggaggaggagagagcacagaacgcaaagagcaacgaccaggagcgggaggagaggagacaaacagacagacagacgaaaagagaagacagcgacgacagtgagacaagacaagaagaagacaaagagcagatacgagacagggaacgagtagcagcggcgccacaacggacagaagcggcagagagcgaaacgaaaggaaaacatgaagaaagaagagagcacagacgcagacaagacgagggtacaggagatgagaagaagaagataagcagaggagcagcagagagaaaggaagagaagagcgagacaggagaggcggagcaggagtgagcaaaaggcgggaa

SEQ ID NO: 21102 - DNA, 576 bp, Homo sapiens
  misc_feature 543: n = A,T,C or G
gcgtccggtggcataaacatgggctttggcgtcagacagccctgagcggggccccattgccccacccccgaggaaggcgagggggggtggcagggggctgcggaaaggggctgggctgggttgggctgtctgcagctctagtccaggaggctgagacttcgagagggacttagagaaggcagacgcatcccgaactcgctggaggacaaggctcagctcttgccaggccaaattgagacatgtctgacacaagcgagagtggtgcaggtctaactcgcttccaggctgaagcttcagaaaaggacagtagctcgatgatgcagactctgttgacagtgacccagaatgtggaggtcccagagacaccgaaggcctcaaaggcactggaggtctcagaggatgtgaaggtctcaaaagcctctggggtctcaaaggccacagaggtctcaaagaccccagaggctcgggaggcacctgccacccaggcctcatctactactcagctgactgatacccaggttctggcagctgaaaacaagagtnttagcagcttgacaccaagaaacagaatgctga

SEQ ID NO: 21103 - DNA, 1685 bp, Homo sapiens
acaaactcgggcctcactttttttctgggacagctgtttgccctgtgttacagaatgcatgtgaggactagatatttaaacatatgatgcctggccacagagaaggtatttgtaattggattctcctggaccagcccagcctctgaagttctagaattaggtgcctcctttgcccaaaggctatcagctattggaggggagggtggcagtatgtccctcactgggtagctgtgaacactaactgacttcaccagtgtaaagtgcctggcacagggcctggcacagaggaagccagagtcaatgttgtctagtatcactttggaaggagaataagtctatgaaatgcattaaactcagcagggaaagtcctaaggagtagtttctccaggggccacagaagaccctttgggtctctatgagaggccccaaggcaacacagggcagagaggtctttccggtgagggctgttcaagtactaagtgacagtaccaggaggagtgcaaagccctggctcacaccactgatctactggcaagatgggtctggagaaggctcatctggcccagccagtggggtaacagctactttggtgttaaacccaccccctcacctgccttttgtggtatagctggtgaccctaatcatcaggccattgcaacatagcatggaagatggtgcgaggtggcgtgtggtccctggccttctccctctactgccttgcaccataggccatgtcctcccagcagcaccagctgagtagacttcagaagtggcttgagcccttataccatggttatgtcaaagggagtgggcctggggtggagggtaccctcatcactggtggcagccattaactatttccttccctgcctagtcctggcataaggcctgctttcgatgtgccaagtgtggcaaaggccttgagtcaaccaccctggcagacaaggatggcgagatttactgcaaaggtgggtgttttcacttctaattgagggtcaggaggcccaagggggtaggggggctaagtagttttgcctttgctgaatgtaaactaattcctggccttgggatccaagatctgaacatctagtatgattccttcattgtacagatgaggaaacaagaccagagggggaaagcaacttggccagcatcatctggcaaattgaggcaggcatagggctagaccctggcttcctaactcccagtccaatgttcttacagcagatgatgcttctataattttggtggcaggggcaatgggtacagggtacaaccaagagcctcttcgctattttactattgagattggggtgctgtggaggtgagggggtaccagtggaccttccttccctagcagtctggctgggcactaggagtgggggatcttcagcaggagggtgggtggtgtggctgggggtggaggaagaacatgcccttatctctctcctctctctgcaggatgttatgctaaaaacttcgggcccaagggctttggttttgggcaaggagctggggccttggtccactctgagtgaggccaccatcacccaccacaccctgcccactcctgcgcttttcatcgccattccattcccagcagctttggagacctccaggattatttctctgtcagccctgccacatatcactaatgacttgaacttgggcatctggctcccttt

SEQ ID NO: 21104 - DNA, 690 bp, Homo sapiens
aagctggaaatatttgaccttatacacaatactcaggaagatttattacatggtgggactattccagttgaggcctaatcagctctggcttggacaattgcagctgattcctgtctgtgcatatttgggtgtctctggcctctggacttgatgaaatgtgaaatttcgttaacttttaaagtaactacaaaatccaactaaataagagaaatcacaacagacaccaaagcaaacagtaattggtttaagttcagtagaagaagtaataatatcaaagttctacttgtagatatcttttacctccttcagtggctgtattccgagcgagaggaaaacttctggatgggcagagctcccagtaatggacttggtcagccattttgtatggaacgagaaacagcctgagtcttccagaatccttgtgccaagaaaccagcagggaaggaaaggaggcaccaccctggaagagatggaatttcactcatcgcccaggctggagttcaatggtgcaatctctgctcactgcaatctccgctgcccgggttcaagcgattctgctgcctcagcctcccaatgggtgttgactaatggatagtcaccctgttttcacaaaaaggagccaggaaatggatggagccattgacagaagttttcttcaggatcctggagagcatgtgggacagcagtagt

SEQ ID NO: 21105 - DNA, 3025 bp, Homo sapiens
  misc_feature 3022, 3023, 3024, 3025: n = A,T,C or G
accccccgaatggccttgtgcctccaaaagcctcacgctgcaactttgctgctcctgtctgttgcccagagaggcctcacacaggcctcagaaatgtttcttgtcacacaaagcttttggtagccgattccaagcgagggatttaatccttacatttttgcccatttggctccaaggaaggcttattagacctgtttttttgttgttgttgtttttttttcttaaaaacaaaatgaatgaatgaatgaaaagagaagcaatggtgagccctctcctgctggggcgccctgggtgggccttgcccgtcctgcagcagagaaatcagtcagcagcgaagagctgctggcgcaggccccaggctgtgtcctggacccttgacctgcctcagagctagaggtttgctccaccccgcacttcacttgggaagtaaatccaagaagcttaccagagtccatcgccactgcgcaggctttgttctcacagcggccaggtacagagcaacgccctgcagtgggaagggacagcagcacgagagacgcagcccctaactcagggcttatgatgggtgggctggtcctgggaaaggcgggccctgtgcaggaggcctccccaccttcctgtgccctctgccctctgcccttgcacacacttgttaccttcaggctgcttggccacccaggcctgaagaagccttctgaggctctcaccccatcagaacggccattttcactgaggagccagttttttccatttgccatggagctggtttggctggaacctggcctttgtagggaaaacggggagactcaggagccagactcactcttgggacaaatgagaaagagctgagccagtcgttcctgtcggaagggcgggcctgctcatcctggcgagaatttgcttttctgctttataggggattgcaggccaggcccactgacaggagcaccttgagaaccacctgaacacaagagaatgagggtgccccaaagtggaaggaagcttctggcccctgggccgttttgggaagggcccaggatactcacgggggctgaagggcaatgtgaagagtgactgcaagtcctggcattttctgtggtgtcagcaaatgcccctttattttaaatgattccagacatctgggcagcatagcttggccaccatcactcaggcttgatcctgctgttgagctgctcctgtctcctgtttacctcactcctgttgggaaggccatcgcatgctcctaggctccagagtcccctgtaggtctctaccagcaggtcgcctctgggagaacgtttcatcttcaggctctagaaactcctgttgcggaattgctggctttagtagaaaagatatgtcaggatttagaaatcgtattgaactctcctggacttctgctccatgatttcattttgctttcacgaaccagcgatccctaccttggggtgggaaattcaattgtaggcagcaaataactcaaccctcctgtaacccctgaggattataacgaccccatgacccccgatgacagccagcagtttggtgactagagttttttgagcctgccattctcagtagcagctttggtctggagatggaacgtggagcagggaatctgacagccacgtttctcgtgatcacgtggactggagttgtttttgttatctggggtggaaaattgcaatgatcaagtttcttttttatttttttttacttagaaaagcaaatattgtgtttttgtaataaatccctttcagcaaaattgcggaggatcattcatccactagggccccacctgaggcacagcgctgactcatcacggtggtaccagtaggtcagccatctggaaacagaagtggccctaattgggccaaaatgtggtaagactcgctggcctcaggcagggccaggccagttccctcacttctctgcacacctattcccagattccatccagagcaaagctgatgtttatcgtctcattgtacttaggctttcgtactttaaaaaattatgactttttaaaaataagccttcagcagacagaagtgaagaaatttagcctgggttgcctcagcaacaaagtctgcggttcctaagagccacatgttggggaagtggggtgacccaaacttggtgacataggttgattgatcagaccctcagccttacaagcaagagctcatgcagatccacagagccatgcacatcctgtcttcctgaccttcctcaggtggcaccacctgcgccccatggacctgctgtatcggtgtcatgtggaggtctgatgaatcctttaaaacctaactgtgatgtcgtaaatgtaactgtgctacctttatatctactgaagggcagcgtctgcatccgagggaaattcaacatgaaacaaccatcgttttagttgcactcagtctgtccatatgacatacacatgaagtgaatgtttccttatgttttcaggtctacaatgtttagtacatgtaaataaggaaaaaatttgataaatatggtaaattaagttatagcgtgtcatttgattcttattttgctgtctcttgttatttaattttcctaatgctccacatctaggttccttcctaggtggtgggaacaccttgcagacgtgtgtgcaccaggacacaccgcggcccaggcagccacaccgagaaagcacacatctccactgatggcagccacccgactctccagttaacctcttttactctttaattctgatttactgtgatgatttaataaagtggaaacacagcacttcagtgctatatgtttctctcattctcattatagtttataagaaaataaagttcaccctggcatctaataaaaacgtggctttcaaaaaaaaaaaaaaaaaaaaaaaaaaaaaaaaaaaaaaaaaaaaaaccggcccaagggggggcccggtccccaattcgccctatagggagtcgttttacaattaattggccgtcgttttacaacgtcgggactgggaaaaccctggcgttacccaacnnnn

SEQ ID NO: 21106 - DNA, 876 bp, Homo sapiens
  misc_feature 1, 2, 3, 4, 5, 6, 7, 8, 9, 10, 11, 872, 873, 874, 875, 876: n = A,T,C or G
nnnnnnnnnnngctattacagctagacgtcaatgggataaataaagggatgaagatccactaagttgtgactttcatacacacccagtacatctcaaaggatgctaagggacattttctgccagtagagttctcccccttttggtgacagcaatattattatgttcacatctaactccagagcttacttcctgtggtgccaatgtatttgttgcaatttactacatttttatatgagcctatttataggtgccattaaactcaggtctttcaaatgaaagagtttctagcccacttagggaaaaagataattgtttagaaaaccataaaatcaatggtaggaaaagttggaactggttacctggatgccatggttctctgttaaataaagtaagagaccaggtgtattctgagtgtcatcagtgttattttcagcatgctaataaatgtctttccggttatatatctatctaaaattaacctttaaaatattggtttccttgataaaagcaccacttttgcttttgttagctgtaatattttttgtcatttagataagacctggtttggctctcaataaaagatgaagacagtagctctgtacagggatatatctatattgaggtcttcatctgatgatgagaaattctccattataatgtgcaagaagtattacttcctaaaatagaattccgatctggctattggcgtggataccgaaaaattttcggtggaccagaacgaagaaaggattttcgaggccgtttacgttgggaggggttggagtcccaatttgcgattaccgaatttgggggaaggggaagggggcacgcccttttagggagaaaaattctggaggttctaaaaaaaaannnnn

SEQ ID NO: 21107 - DNA, 1307 bp, Homo sapiens
gcgtccggcaaccccagtcccccccacccgcgcgtggcggcgccggctccctagccaccgcggccccaccctcttccggcctcagctgtccgggctgctttcgcctccgcctgtggatgctgcgcctctccgaacgcaacatgaaggtgctccttgccgccgccctcatcgcggggtccgtcttcttcctgctgctgccgggaccttctgcggccgatgagaagaagaaggggcccaaagtcaccgtcaaggtgtattttgacctacgaattggagatgaagatgtaggccgggtgatctttggtctcttcggaaagactgttccaaaaacagtggataattttgtggccttagctacaggagagaaaggatttggctacaaaaacagcaaattccatcgtgtaatcaaggacttcatgatccagggcggagacttcaccaggggagatggcacaggaggaaagagcatctacggtgagcgcttccccgatgagaacttcaaactgaagcactacgggcctggctgggtgagcatggccaacgcaggcaaagacaccaacggctcccagttcttcatcacgacagtcaagacagcctggctagatggcaagcatgtggtgtttggcaaagttctagagggcatggaggtggtgcggaaggtggagagcaccaagacagacagccgggataaacccctgaaggatgtgatcatcgcagactgcggcaagatcgaggtggagaagccctttgccatcgccaaggagtagggcacagggacatctttctttgagtgaccgtctgtgcaggccctgtagtccgccacagggctctgagctgcactggccccggtgctggcatctggtggagcggacccactcccctcacattccacaggcccatggactcacttttgtaacaaactcctaccaacactgaccaataaaaaaaaatgtgggttttttttttttttaataaaaaaaaaaaaaaaaaaaaaaaaaaaaaaaaaaaaaaaaaaaaaaaaaaaaaaaaaaaaaaaaaaaaaaaaaaaaaaaaaaaataactaacgcacacagcaaaggaaaagaaagaacaagcaactggccaaaaacacagaacacagagacaccaaaaaagagggggggggggcacaaaacacagcacacagagagcggggcaaggatacacccaccaagcaccataggagagagggacagacaacacgcagggggacaactaaaagcggcagcgcgggcgaacaacacgtaggggaggacaaaaggagaggagggagagggggaaacacaccc

SEQ ID NO: 21108 - DNA, 3540 bp, Homo sapiens
  misc_feature 1, 2, 3, 4, 5, 6, 7, 8, 9, 10, 11, 12, 13, 14, 15, 16, 17,18, 67, 68, 69, 70, 72, 73, 3538, 3539, 3540: n = A,T,C or G
nnnnnnnnnnnnnnnnnnctcccccccttctatgggggggggttttttccccccgggggggggggcnnnntnnaaaaaaagggccaaatgagggggccccaaacgggggcgggcaaagggggtattttttgttcccccttggtgggttttttttttttttttttttttctttacaaaagattattttattaattcaatttttgcataaaagactgttaaaagaacttgctaacttgaaaacaattttgagtatttatgatctttccaacttgaaaacacctgaaccttatagaacagattgtgtaaagcagccagggccacaggagtgaaagaagatggagacccgccgtctggtcatgatatgagaggcctggacagtgacctcacgaacaaaaagaaatgatcctcttcagtccaaagtgtgtttgtgagactaatgactccatgccctcacatggccactcctcttacagcagacagcttcactccgctccagccccggtactgcggtctgtggtaatttacatgggaatgggatgagatctagtagttttagatccaacgcaattctgggaagggttggtaataaaccaaaactcaatctatgcagtatttaaaaaataattgagagttgtgacaacttcgattcttttcaggaggtgctgtcttaagatagaagaaagggatcaagctcttatcttagaaagcacagacacgtttagctcagggtagtgcaattcaatgctaagtggctgctccatgaaatctaagggccgggtaaggggaagaggcccagggacttcttccttgtctgacactctcgggactagcattctggcaggtcttacaagttataatacaaaaccatcagataaattctaatcacgactgtgtagttcctccccaaaataattttcctcttagaagtaaaatcaggaaaggggctgagttctgaaaagaaacatcggggctgtggcccaggccctctgagtgtggacgctgtcccccgtgtctccatgtttactgccttattgtctcctttgtatgaaagtataatttacgtaattcgtccttggagaatcacagtggtgttcaagaaccttttgaggccatccaagtttttgtccttcagtaccttgaaatcagataatctcaacatccagaaatagcctttgatttgttctttctctgatgtcttgtgtccttgggatcaaagcctctttcactggcaccaaataatgcccagtgaggagttctggccatataatcctttgcgctgaacgtttttgatccaccactatcttcatattcctggatgagctcctggaagcggttataatcgatccatgtccaccattcaccaccaattttaaactttctgtgtgctatcaggaggcaattagagtgttcgtgttcacatgcaatttcatattcggggatcagatccaccaactcgtggacaaactgtaccacttcctcatgccagggcacgtgggccatggtaagactgcttgctgaactttctccgcagtaggtaacgcccttcacttcgatgaagtcaggattccccagggacacgagctgcgcgtaggcctggagctcgtccacgttccatgctttcacgagcgtcagtctgtagacagttcgttgttgcttgactgccaaggcttttaaactgtcaaggaatctctgccagaaatccttgaagagtgggcggtcgattttcttcaggctgtctttggtactggcatccacactgacatacagctgagtaaccggctcgaggttcctgatttccgcaggaaattgtgcgtttgtgaccaggaagctggaaattttacactggtggagtagcttcaaaaacctgttgatctctgggtacattattggttctcccacgagggacaatgcacagtgctttaccgtcattccttcttcaaagcgttctgctttgacgcccggtactcctttaaactgcttaatcatgttctgatggttttcaatggcttccttcaagatcatttcaggctggtccatcttccaccgccactcagtgcccacggggttggtgtggtgccgccaacagaagacacatttattagcacacgccaagctcggggtggtttccatgcagcgatggctctcaattccatagaatgtgtgtttgtaacaacctcctctccctcggagcatggactttgtccacctgcaaagcttcacccccgagtggctcccaatcaactgataaccttgtttagtaagggcttctcggagagcaggagttatcatagctcttctttcaccatcttcattcctccccatgttcctgaacaaaccagacttctcttcctgctgttccttttctctcttttctttcttcacatgatccataattttgcccaaatcttcaacatcaacaatggaatttaggctctgatggtcctcaccaccaaactcttcttcactggagctctcaaagggttcttcctcctcggtgtctctatgatgcaattcatcctgctcatgagatccttcctccctctcctctgagccatgttggtgagattcacatttgcctttcttgcagtggccgccacaggacttctttctctcccctttctgaagtgcctgcagctgggagatgaacttggtcttccatgctctgaagtcggcctcaatgctgccgtgcttgcttttaaccacgtcgcagtcgccctcccctcgactcatcacacgatgcgcgccaagcatccagagccacttgtcaacatttttgccaaccttgttgaagtggctagcataggcagaatttcccaggccaaataccgcatatctcatacccttcaggtaagttttgccaaatcgaaaatcaatggatgcttcctctaaccatttgcagaaccactctgcactttcagttggtaggccgtcagtgtatgtcgcaaccaggaagacacagacatttttactagtcacctcttctatcagatgatcatctggatcatattcttttagattaataatggccacaggcagatccagggatgtaactgcttcagcaagaactgttgcgaatcccttcgctgttccagtctgagaaccataaaaaatcttcactccagacacaaagatgtctttctcttgaagggagacataaccatttgtcatcaaatcctgagctgcttttggaacagatttttcctgtaagttcttgccctgcgtcttgatgacaatctggacacaaatccaaaggctaatgctaacagcaaagcccaaataaatgtaaaacctgtttatccataatgatattaaaggtgagaagaggtcccatgtatccgcagaaggatccatcctcctcagagccgacaggagactaggatctcggacctggatagcccgatgattcgcactggtaccgcgagacgcaccgagctacctcgccgcgttagcggcgtaccgagtgcctgcagacctgtgggcagccatgacactgccaggccggtcctgattggttcagaggacgaagaggtcggacgcnnn

SEQ ID NO: 21109 - DNA, 362 bp, Homo sapiens
  misc_feature 362: n = A,T,C or G
acattagaataaccttttcaaaaatatgcaatttctgtccttgaagcctagggagtgggatgcagccacattaagactcatgattaagcaccttattgtgttaatcatgatataaagagccttgtataacacaaaagccgagatcgcgccactgcactttagcctgggtgacagagtgggattctgtccgctcccgccaaaaaaaaaggagaaggtctaccctgcaagaggtggagagagagctagtggcttggatctttggggtgcacatgggaattgtgggcccacagtgtctggtgaaagaagaggaggcaggaggcctttttcttctcatatgggggttgagtggtgggggtgctacn

SEQ ID NO: 21110 - DNA, 498 bp, Homo sapiens
acactggaggctggagcctgcagatggcatggctctgcggctcaccttgctgcagttggtggtggtgacagagactgcagcttgactgtagtggtggttaccaggagctctgccactgcatgtccactagtgacgggttcgctccaccaccccagctgggtagccgctgctctcacataaggggtccaattaaaattgccaggaataaattcccccggactttgacttctcaagagctaagaaggtttgctgagtattctggcatgatgtttggtgatcaaacaactgctggccaaaaatgatgagtatttccccctcttgctgaagatgtgctccatacaatagtccatcacattcatcattcatcagtctggaagtgtgcagccaatcatattatctattacatgttgttctggcttttttttttttccaatgtccagcctaaactataaagtacctcggccgccaccgcggggagctccaattgccctatagtag

SEQ ID NO: 21111 - DNA, 2325 bp, Homo sapiens
  misc_feature 1, 2, 3, 5, 2321, 2322, 2323, 2324, 2325: n = A,T,C or G
nnnantgcaggctgggcagggcttagcctcaggctagtacgaggcccgtgttaatcgcccgcccacccgcactgcagtctccagcctgagccatgggccgccgagccctcctgctcctgcttctgtcttttctggcgccctgggccaccatagccctccggccggccttaagggccctcggcagcctacacttgccaaccaaccccacatccctcccggctgtagccaagaactattcggttctctacttccaacagaaggttgatcattttggatttaatactgtgaaaacttttaatcagcggtacctagtagctgataaatactggaagaaaaatggtggatcaatacttttctacactggtaatgaaggggacattatctggttttgtaataacacggggttcatgtgggatgtggctgaggaactgaaagctatgttggtgtttgctgaacatcgatactatggagagtctctcccctttggtgacaactcattcaaggattccagacacttgaatttcctgacatcagaacaagctctggctgattttgcagagttaatcaaacacttgaaaagaacaatcccaggagctgaaaatcaacctgtcattgccataggaggctcctatggtggcatgcttgccgcctggtttaggatgaaatatcctcatatggtagttggagctcttgcagcttctgcccctatctggcagtttgaggatttagtaccttgtggtgtatttatgaagatcgtaactacagattttaggaaaagcggtccacattgttcagagagcatccacaggtcctgggatgccattaatcgactctcaaatactggcagtggtttgcagtggcttactggagcccttcacttatgcagcccattaacttctcaggacatccaacatttgaaagactggatctctgaaacctgggtgaatctggcaatggtggactatccttatgcctctaactttttacagcctttgcctgcttggcctatcaaggtagtgtgccagtatttgaaaaatcccaatgtatctgattcactgctgctgcagaatattttccaagctctgaatgtatattacaattattcgggccaggtgaaatgcctgaatatttcagagacagcaactagcagtctgggaacactgggttggagctatcaggcctgcacagaagtagtcatgcccttttgtactaatggtgtcgatgacatgtttgaacctcactcatggaacttaaaggaactttctgatgactgttttcaacagtggggtgtgagaccaaggccctcctggatcactactatgtatggaggcaaaaacattagttcacacacaaacattgttttcagcaatggtgaactagacccctggtcaggaggtggagtaactaaggatatcacagacactctggttgcagtcaccatctcagagggggcccaccacttagatctccgcaccaagaatgccttggatcctatgtctgtgctgttagcccgctccttggaagttagacatatgaagaattggatcagagatttctatgacagtgcgggaaagcagcactgagaaacttttgattgttttcaatttcttcttttatgttcacaccaccacattcccattcactttgattttctacatgtaattaccttcttttgtttatcattagatttgatggggccaaagttgagatagaatagagggtgatgacggtaagagcaagtgtcccatgaatgtgatttcctgggttctcactgtctttgcaccacgtctaggaagaatcttcttgatagctctcccacaccatcagtggccctcataactggagtagagttcctggttgcttttcataagagggagagttactttctttgtatctctgcaagcagagatttctctttggttttgaggttgaagtgtctttggcccatttgtaagtccccatccctaccctacacaaagtaaaagcagaagatagataaaaaatgatgtaattgcagctggtaggatgtctggtgccaatccaggaagtgagagccatttcttttgtaccggatttaatgactttgaactgtgctgtaaataaataatacagctggaccttaaaaaaaaaaaaaaaaaaaaaaaaacaaaaataggaacggcagggccgtcagaaagaattttaaacacaattgtttggggccggggccaagggataagacacacgggcacaggttcccccgggcccccgggcacgaaaggggggttttccccaaaaaacgcgggggacggggtctgacacccccaggggttcgggcctcnnnnn

SEQ ID NO: 21112 - DNA, 1801 bp, Homo sapiens
  misc_feature 978, 979, 980, 981, 982, 983, 984, 985, 986, 987, 988, 989,990, 991, 992, 993, 994, 995, 996, 997, 998, 999, 1000,1001, 1002, 1003, 1004, 1005, 1006: n = A,T,C or G
gctgcatgaagagacttcattaaaactaagaaaacatttatttggggagaaattttaggcatttaagaacttgtatttttctattttaaaaagttaaattattccgtaatttggaagaagtttcgttgaatgtaggacataaccgtttggagggttatgccattcattcatacgatgtgtgaaatttgcttaaaagggaattttcatgatttgatttagattagtatttaaatatctgctttagatagcaattaattttattgtaaaaataaggaaaaatatgtgaatatgtgaattttttaagcctgagagatgatagaatgttcccatatttttcttgtaaagaaaataatattttaacttacacatcctgtagaaaataccaccttttccccttgtattacagtacaatgtttacattactatactgtcaagctgaaagtataaaaaatgtacatatacattttgagttatgtatcctttttttaaaaaaaaagttcgagtctgttgcactaggctgtacatgactaaagttgacagatgctatgctagatttataatcactagttctggtacttgtgtctttgtatgatcaaagcatgcaataagcaatacaaaataccaagccttatacttaaaagaagtttaacatattggttaatatactggttaatatactagttaaacatattgaatgtatataagtggcaaaactagatttttaaggaagtgtacattataatattggagctcagtactgcatgaagagacttcattaaaactaagaaaacatttatttggggagaaattttaggcatttaagaacttgtatttttctattttaaaaagttaaattattccgtaatttggaagaagtttcgttgaatgtaggacataaccgtttgaagggttttcatttgaaaaattgatgtattttgtgccttaatattttgttcttttaataaaaatgctctgaannnnnnnnnnnnnnnnnnnnnnnnnnnnngtccaccaaggtggtgcattaccggaagtggatcaaggacaccatcgtggccaacccctgagcacccccatcaaccccctattgtagtaaacttggaaccttggaaatgaccaggccaagactcaagcctccccagttctactgacctttgtccttaggtgtgaggtccagggttgctaggaaaagaaatcagcagacacaggtgtagaccagagtgtttcttaagtggtgtaattttgtcctctctgtgtcctggggaatactggccatgcctggagacatatcactcaatttctctgaggacacagataggatggggtgtctgtgttatttgtggggtacagagatgaaagaggggtgggatccacactgagagagtggagagtgacatgtgctggacactgtccatgaagcactgagcagaagctggaggcacaacgcaccagacactcacagcaaggatggagctgaaaacataacccactctgtcctggaggcactgggaagcctagagaaggctgtgagccaaggagggagggtcttcctttggcatgggatggggatgaagtaaggagagggactggaccccctggaagctgattcactatggggggaggtgtattgaagtcctccagacaaccctcagatttgatgatttcctagtagaactcacagaaataaagagctgttatactgtgaaaaaaaaaaaaaaaaagtacgatacggccaagggcatgctccccgaccccaagaacacgcacatcgtggtgagctggatgatcgcgcagaccgtga

SEQ ID NO: 21113 - DNA, 3122 bp, Homo sapiens; identical to SEQ ID NO: 21069
  misc_feature 1, 3113, 3114, 3115, 3116, 3117, 3118, 3119, 3120, 3121,3122: n = A,T,C or G

SEQ ID NO: 21114 - DNA, 2522 bp, Homo sapiens
  misc_feature 1, 2: n = A,T,C or G
nncacgaggcctcgtgccgcacgttgtcgcgggccagtaacgtccgtccgcgtgtgtgtgtccctgcggcgctaagaaggggagactgaggctgaggctggggaacatcgggcagcatgagcggctgcgggctcttcctgcgcaccacggctgcggctcgtgcctgccggggtctggtggtctctaccgcgaaccggcggctactgcgcaccagcccgcctgtacgagctttcgccaaagagcttttcctaggcaaaatcaagaagaaagaagttttcccatttccagaagttagccaagatgaacttaatgaaatcaatcagttcttgggacccgtggaaaaattcttcactgaagaggtggactcccgaaaaattgaccaggaagggaaaatcccagatgaaactttggagaaattgaagagcctagggctttttgggctgcaagtcccagaagaatatggtggcctgggcttctccaacaccatgtactcaagactaggggagatcatcagcatggatgggtccatcactgtgaccctggcagcgcaccaggctattggcctcaaggggatcatcttggctggcactgaggagcagaaagccaaatacttgcctaaactggcgtccggggagcacattgcagccttctgcctcacggagccagccagtgggagcgatgcagcctcaatccggagcagagccacactaagtgaagacaagaagcactacatcctcaatggctccaaggtctggattactaatggaggactggccaatatttttactgtgtttgcaaagactgaggtcgttgattctgatggatcagtgaaagacaaaatcacagcattcatagtagaaagagactttggtggagtcactaatgggaaacccgaagataaattaggcattcggggctccaacacttgtgaagtccattttgaaaacaccaagatacctgtggaaaacatccttggagaggtcggagatgggtttaaggtggccatgaacatcctcaacagcggccggttcagcatgggcagcgtcgtggctgggctgctcaagagattgattgaaatgactgctgagtacgcctgcacaaggaaacagtttaacaagaggctcagtgaatttggattgattcaggagaaatttgcactgatggctcagaaggcttacgtcatggagagtatgacctacctcacagcagggatgctggaccaacctggctttcccgactgctccatcgaggcagccatggtgaaggtgttcagctccgaggccgcctggcagtgtgtgagtgaggcgctgcagatcctcgggggcttgggctacacaagggactatccgtacgagcgcatactgcgtgacacccgcatcctcctcatcttcgagggaaccaatgagattctccggatgtacatcgccctgacgggtctgcagcatgccggccgcatcctgactaccaggatccatgagcttaaacaggccaaagtgagcacagtcatggataccgttggccggaggcttcgggactccctgggccgaactgtggacctggggctgacaggcaaccatggagttgtgcaccccagtcttgcggacagtgccaacaagtttgaggagaacacctactgcttcggccggaccgtggagacactgctgctccgctttggcaagaccatcatggaggagcagctggtactgaagcgggtggccaacatcctcatcaacctgtatggcatgacggccgtgctgtcgcgggccagccgctccatccgcattgggctccgcaaccacgaccacgaggttctcttggccaacaccttctgcgtggaagcttacttgcagaatctcttcagcctctctcagctggacaagtatgctccagaaaacctagatgagcagattaagaaagtgtcccagcagatccttgagaagcgagcctatatctgtgcccaccctctggacaggacatgctgaggcaggggacagtgtcccctgctaccgcccgcccctacccatggcccgttgctggatgactgttactcttttttcagaaggtgttgggattatcacaggttaagccttttgttccccgtctgcacctgaagggttgtcgcctggcctgggagagcctcttccaggttttgacctgcaggcagtgctctctaacaggaccatcacagcttctgaactgagccggagagagagaatggaattgctgacccctggaactggcgggtattctggtcattgaggagacaccatagtggaaactggggcttatgctgctgcctccagggtgtgaggtgggtggggacctgtgtcaggtgtggatagccatttctgctcaaccacacattctctaagaaacagcttgaaagctctgtctgggtcattcatttaaactagaagcagaggcacttaaaacatgtaccaggaaccatttaacaaagaatataaaatgtcacaatctgtgtactgttaaaaaaaaaaaaaaaaaaaaaaaaaaaaaaaaaa

SEQ ID NO: 21115 - DNA, 1641 bp, Homo sapiens; identical to SEQ ID NO: 20385
  misc_feature 1, 2, 1626, 1627, 1628, 1629, 1630, 1631, 1632, 1633, 1634,1635, 1636, 1637, 1638, 1639, 1640, 1641: n = A,T,C or G

SEQ ID NO: 21116 - DNA, 372 bp, Homo sapiens
acgggggacctccttcagtggctgtattccgagcgagaggaaaacttctggatgggcagagctcccagtaatggacttggtcagccattttgtatggaacgagaaacagcctgagactactactgctattcagtcttccagaatccttgtgccaagaaaccagcagggaaggaaaggaggcaccaccctggaagagatggaatttcactcatcgcccaggctggagttcaatggtgcaatctctgctcactgcaatctccgctgcccgggttcaagcgattctgctgcctcagcctcccaagagccaggaaatggatggagccattgacagaagttttcttcaggatcctggagagcatgtgggacagcagt

SEQ ID NO: 21117 - DNA, 1913 bp, Homo sapiens
  misc_feature 1, 2, 3: n = A,T,C or G
nnngcgggcctttatgccctccccgccctggtttcaacgccgccccgggctttttggggacaccccctgcgccgggtgcccctggacccgtggacctgttccaccctgggcgccgcccccacgcgtgggttaaatcttttcggggccgggcgcccacccaattttttgttttgttttttttttggtagtattatcatttattgagtagctacactgtggccagaactaagctttacatgttttatatcacttatttatctcaacaatcttgaaagggtggtattattttccccgtcttataggtgaagactctgaggttcagaaagttaaagtgatatcgccagggttcctgactggtaagtgatggaggctgaatttgagccagatctatatgctccatcatcactctcctggggaaaagagcctagatgtgttctatctgcattcctgcttagattctgcatgacttctcctgtccatccccttggccccctctcctctagtccatgagattacagctttgcacactgacaggagggtccttccttcttagcctacacatacaaccaggtgtcaaaggatggaagggttcatctcacacactcacagaccatgtagactattcaatctacacctccagctcgaactcagaacattgacaggaacctgctcttcaatctttcacctcccctttctccatgaaacgaacgtcaacattcacacagcagcccatccccagcctacagggcggcccctgccagatcatgcttccccactgtggaagaaggccatgtacgagtgagtgggctcatcggttgacctctgtgtgagatggcacgtggtcctaccctgcagagtcagagcacagaattccaagtgtagcacaggtgtggcaattcagaagagcagctgtcaacacatctgagggcacagacccccctatcatgccaggctgggagaggccactcctgtatttggcaggtggcttgtgcccagtggcatcaaggctatggcagggtatagcagagatctaaggccaagtggaagtagagctgtcgctttgattttgaaaatcaaatgaatggcctttacaaacttccacccacaattctttgaaaagggatgagtaactctgaccctactcttacctccctccccatcaattcaagctgaattaagagaaatcctatgtggatacacagatacaatgacctcagctctgtctagcaccactttcagggaggcggatgtcctcactgggccctcttgcatctcttcaaaatgggaatgaccaagtttggatttattattctattcttgaatcccaaagaccatcctaagagcaaaatatgctccttgaaggatgaggatgtggagaagcacggtatctttaaaaaacaagggaagggagtctcagattaagaaaactggagaaatgggcatgtcagtaggatgaggatgcctagtggcaggtgcaggatgtctgtgactttgtcgtgtgtgggagaaatgacctttctcaggatgtgggaatataataggctgtactcctgatgaccttgaccatcctaatcacacttgtgtgatgccagggccccaggttccacccaagttttactttatagctattcccaagtttccctattaatcaagaaaattaatgaataaggaataaggtgatcattcttcaggttatgggttgaaatagacacagaaatcaactcagctgaatatagcatgtggaatcagtcctccagaaggcagctttctctctttctgggggtgtataataagacataacttggccggttgtgggagtcctcatcagccgtgacagaccaagtcctcacccatggccaggaatgaggcacaggcttttggatgtgcgtgtatgagcaaacgtacctgcccgg

SEQ ID NO: 21118 - DNA, 403 bp, Homo sapiens; identical to SEQ ID NO: 20397
  misc_feature 403: n = A,T,C or G

SEQ ID NO: 21119 - DNA, 1125 bp, Homo sapiens
  misc_feature 1, 2, 1119, 1120, 1121, 1122, 1123, 1124, 1125: n = A,T,C or G
nnaccacgcgtacgcgccccgatgcggagcgatgccgctcggcctggccgccccccgcgagcaccgcgctgcagacgaagcccgcgcgtgatcccgctccgggtgacctcaaagcagaagctctgaattcacctctcatctgacgactgacagctgctgccaccgccagcctctgtcccttgcccaggcctgtcacacggctgcctctcagcaggggcagtagaatgaaagagggcatgtctaataacagcaccactagcatctcccaagccaggaaagctgtggagcagctaaagatggaagcctgtatggacagggtcaaggtctcccaggcagccgcggacctcctggcctactgtgaagctcacgtgcgggaagatcctctcatcattccagtgcctgcatcagaaaacccctttcgcgagaagaagttcttttgtaccattctctaactccgtgtgtgatgaaaacgcctccttttctgaccttcaaagtcccctgtagagaccatgcatgctctaagccttagggagtgagaccaacacccatccctgcccagccaacagtggccggggcttgtcttatgtttccatctgttttcttcgtggcattcaatttcatttttttccttttcattttcatgttattttcattattggcaaagaaaatcaaaatgtttatagccaaataacaaatgtgccatgtaaaagtaagtctggacttaagagtttaaaatttttaaacatcagtttccaagtttatatcatattaatacatttcagtggataatttatttaaaaaaaaaaactatgcctaaatatcccttatttgtaatattcagtatcaaattagagcattttgaccaactgaaacatataacgttttcatctcctttcctgggagaaagcagctgcagaggttctgtatttcctgcatttccatcatcctagttaaaaagacaacaacccacaggattgggaatgggttttcttttgtttttttgttgttgttgttgttttgaggtgggagtctcgctctgttcacccggggtgggagtgccatgggcgtggacctcaggctcactggcggacctccacctccggggggtttcaggcggannnnnnn

SEQ ID NO: 21120 - DNA, 2912 bp, Homo sapiens
  misc_feature 2908, 2909, 2910, 2911, 2912: n = A,T,C or G
agggagtcgacccacgcgtccgcggacgcgaactctattgcgcagctcgctgccgtgcgtttaacccaggcgaggaggaggaggagaaaattcccccagattcgggcaggcccgcaccccacattccgtcctgttttgagaggaggagggaagagaaataaacgtggcagcgcatagaaggccagcagggagactgctttccagacacctccggcccacacagccgttcaccccccgtcttttcagtcctggaaaaggaattcggtctgtccttaggatgaagctctaactgaactgaagtaaggagaaacagccttgaatctttggagggtctgtcttccttttgggctctgtgcaactgcagctacagtggaaaaaagcaaactgctcttgatcccaggccctgcctaagcctcagcagaacttgtaagcctaaactgaagagcctcacccggacgagcaggcatcccttaaccttaagcaatccagttccacgccctggatcagtgaataaccccagctgcaccatgagccgcgttcgggatgctggctgtgtagcggcggggatagtgataggggctggtgcctggtactgtgtctacaaatacaccagggggagagaccagaccaagaagagaatggccaagcccaaaaaccgggctgtggctgggactggagccagggctagagctgggctaagagccggattcacaatcgaccttgggtcaggattcagtcccccaaccccagtccgtgctgaagcagaggacagggcccaggatgaagcctctgctctggacacagttggagctgaggcagtggccccagctgcatccagcgctgaggctcagagtggggcaggcagtcaggcccaagaggcagatggagccggggttgggcctaaggccgaatcagtagttggggctgcaatggcttctgcaatagcaccacctcccggggtgacagaggcccttggggctgcagaagcccctgcaatggcaggggctcccaaagtggcagaagctcccagagaagcggagacttccagggcagcggtgcctcctgggacagtggtgcctaccgaagcggcagcacccactgaggtgaccgagggtcctggggtagcagcacctaccaaggtagctgaagctcccggggtggcatcgcctaccgaggcagctgaggctcctgtgcccgcaacgcctactggggctgcagcacctactggggctgcagagtctcctggaacttctggttcccctagaacagcggtggttcctggaacatcagctgccaagaaagcaacccctggggctcacactggggctataccgaaagccacatcagcgactggagcggtacccaaaggtggaggcaagggtgtaaccaggtcccggaatgggggcaagggcaagggcaagaaaagcaaagttgaagtagacgaactggggatgggcttccgtcctggagatggggctgcagcagctgctgcagcctctgctaatggcggacaggctttcctggcagaggtccctgattctgaggaaggggagtccgggtggactgacacagagtcagattcagactctgagcccgagacccagcgcagagggaggggaagaagacccgttgccatgcagaagcgcccctttccttatgaaattgatgagattctgggtgtccgcgatctcaggaaggtccttgccttgcttcagaaatctgatgatcctttcatccaacaggtagctttgctcactctgagcaacaatgccaattattcatgcaatcaagagacaatccgcaaattgggaggcctcccaattattgcaaacatgatcaacaaaactgatccacacattaaggaaaaagccttaatggccatgaataacctgagtgagaattatgaaaatcagggccggcttcaggtgtacatgaataaagtgatggatgatatcatggcctctaacctgaactcagcagttcaagtagttggactaaaatttctaacaaacatgactattactaatgactaccaacacctgcttgtcaattccattgcaaactttttccgtttgctatctcagggaggtggaaaaatcaaggttgagattttgaaaatcctttcgaattttgctgaaaatccagatatgttgaagaaacttctcagtacccaagtgccagcatcatttagttccctctataattcttacgtggaatcagaaatccttattaatgcccttactctatttgagattatctatgacaatctcagagcagaagtgtttaactatagagaattcaataaaggttcccttttttacttatgcactacatctggagtgtgtgttaagaaaattagagccttagcaaatcaccatgacctcttagtgaaagtgaaagttataaaactagtgaacaaattctgattggttatgtaccgtcaaaagacttgaagaaatttcatgattttgcagtgtggaagcgttgaaaattgaaagttactgcttttccacttgctcatatagtaaagggatcctttcagctgccagtgttgaataatgtatcatccagagtgatgttatctgtgacagtcaccagctttaagctgaaccattttatgaataccaaataaatagacctcttgtactgaaaacatatttgtgactttaatcgtgctgcttggatagaaatatttttactggttcttctgaattgacagtaaacctgtccattatgaatggcctactgttctattatttgttttgacttgaatttatccaccaaagacttcatttgtgtatcatcaataaagttgtatgtttcaactgacaaaaaaaaaaaacaaaaaaaaaagggggggggcaaaaaaacccccgggggccccacattgccccccctttttgtcaannnnn

SEQ ID NO: 21121 - DNA, 1515 bp, Homo sapiens
gcacgagggtcagccccgcctacttcctctttccctcggagcgggcggcggcgttggcggcttgtgcagcaatggccaagatcaaggctcgagatcttcgcgggaagaagaaggaggagctgctgaaacagctggacgacctgaaggtggagctgtcccagctgcgcgtcgccaaagtgacaggcggtgcggcctccaagctctctaagatccgagtcgtccggaaatccattgcccgtgttctcacagttattaaccagactcagaaagaaaacctcaggaaattctacaagggcaagaagtacaagcccctggacctgcggcctaagaagacacgtgccatgcgccgccggctcaacaagcacgaggagaacctgaagaccaagaagcagcagcggaaggagcggctgtacccgctgcggaagtacgcggtcaaggcctgaggggcgcattgtcaataaagcacagctggctgagaaaaaaaaagcacagacacatccaccaccgactctaaccaccgcaccgcacgcagaacacgtcacacacccacaaaaaaaaataattgtgcggggcgctgcgcccaaaaaaggttttcgacccccctgtgggggggcgcgccccagtgtatgtcaacatccccacggtgttccaagaaaacctggcgaacaaacggcgcggttcccacaaaaaaggggggggagagcggggttgaaacccaggcgtccaggcaccgcgtaacagggccaagcagaaccacccgcgggaggagagaacaacacgcacacgccctcaccgcagcgagccgcacaacagccgaccacgcagcagcacgcgacggagtgagcagaccggcagattgcagacggcagaacaaggcagccacggcagacgccacggaagatcagaggaagcgcgagaggagcgcggcgcctaggggacgcagcgcaggcgcaagacgaacgaagcaggcgcaagggagaggagacaccgcgcactggccgccgcaaagcggactgtaggcacgcaagcgggcatcgaggtgggccagcggagcgaggggcgcggtgcagtgtagcgagagtgaggggatacaggatggagcgggaggccgactgcgcggtggggcgcgaatgtgttgcgctgcgtagtggcggtcggcgagggccgtgtatgcgtgagaagtgacgctcggagcctgagcgtctggcgggcggtgtagttggggcgtagcgcggaggtaagctggtagcgacgaagagtggcaacgatagtacgcgacgcagcgccgacggggaagcacgggacccaacggcacggagaccgacggagcgccacgccggcagcgcgggagacggcgaggaccggcgacacagacacgaaaccgccagcgcgccgccgcagagcacgaagcgaccaaacgacagcaacccaccgcaagcaacacgccccgcagacacgaaagcaccaaccaccgaccgccaccagaaggaacaacagcggcccccgaccacgaca

SEQ ID NO: 21122 - DNA, 920 bp, Homo sapiens
  misc_feature 917, 918, 919, 920: n = A,T,C or G
acgcgggggttctcttaaaaggcagtgtgggaagacacttgacagagtgttttgagaaagaagtggtgggacgtcactgtctgtggaaaatttcaaggaaaactgaaggatcattgagatgaacagtgtggcagaattgagaactcttgatgtttcagtgagctttaatggaggaaaatctgtcatttcaggatcattaattgtcacagccacagaatgttctaacgggatcgcagccatcattgttattttggtgttactgctactcctggggatcggtttgatgtggcggttttggcccctttgctgcaaagtggttattaaggatcctccaccaccacccccccctgcaccaaaagaggaggaagaagaacctttgcctactaaaaagtggccaactgtggatgcttcctattatggtggtcgaggggttggaggaattaaaagaatggaggttcgttggggtgataaaggatctactgaggaaggtgcaaggctagagaaagccaaaaatgctgtggtgaagattcctgaagaaacagaggaacccatcaggcctagaccacctcgacccagacccacacaccagtctcctcagacaaaatggtacaccccaattaaaggtcgtcttgatgctctctgggctttgttgacgcggcagtatgaccgggtttctttgatgcgacctcaggaaggagatgagggccggtgcataaacttatcccgagttccatctcagttgatgttcatccaaatgaacgacatcaagtgcatttcagaagcttttggagagcagcttaattgctctcactcgggaaatgttttctctgccttatgctatgcttgcaccaaacatttctaaacacttgtgtctgcatctccatgggaggtgatgaaactcagtggtaactcatgannnn

SEQ ID NO: 21123 - DNA, 611 bp, Homo sapiens
  misc_feature 1, 2: n = A,T,C or G
nnatagggagtcgacccacgcgtccgcaggaattaaggctagcacagaaaatttgattactctgtttccaacagtagagcaatatcgtccttggtttcctgaacatggtaccatggacttcaaagattgggaacaggtgggaattgccttaaaacaagtttgtaaggaaggaaaatttatccccctaacagcctggtcaaactgggctatagttaaagcagcctcggaaccgtttcaatcggaaaatgaggcttatcctccagcagaaagaatttctgcagaggaaggtggtgatgctgctgaaggaggagaggatagtgaagaagattttgaggaaaatacagacaaacctggagatgagttaatttcttttgaggagcacgtgggaccttcagctgctcctaaaatagagaagccatatatgccaagatgtttaaaacaaagaagggccttgaggagcagtcggctcctcattgggatcatccggagtggccgcctccaataaagcaatgtagcttggagccttggaggtctgaatctcaaatttgccctgtttcacgaatgaatgaattgtggcctcaggaaccacgagcgcatgttgtagcaccagt

SEQ ID NO: 21124 - DNA, 2298 bp, Homo sapiens
  misc_feature 1, 2, 5, 14, 51, 2293, 2294, 2295, 2296, 2297, 2298: n = A,T,C or G
nnaanccaccccgnggaccccgctgcgggggaacccctcgggagcccccancgggacccctgcaacggggctgcccttgcccccccattgcccccctgtatccggcaacaaaccctttaaaaagtgttcactcttgctttttcccagtatttcggtaatcagcccatcttgctgtagtacaggatgacattgtcgaatgctctttgtatgtgtgcacacccccttactcccttactgcttcatacactccacaagtggtacagtattttgtgtcattgtaaaaatcaaaattggctttggatctttgtaatacacctgtacctgaaaaagtaaacaacattcttcaattactagccttcagcttgaaaagacatgctggagaagaaggaagggggaacccataggtgtggcgtggagccaagatgtactattcaactatgtgtttctgtttataaaaaacacataccatggaaccatggtgcttttgttcttagtttttgccgttagatcccttcaaactggaagttccttacaatatctttctcaggaaatattttgggaaatggggtaagagatggcaagtgtgagacgggctgtgtcagaggttgctacgtcatggatacagtgcagttccaagtgccataagtgtatgtacatatagttaataatgacactgttcatcaccattctaaaatactgttcttccaaccctatcttcaatgaccagtccagaaggggttaagctggattcatttgctctggcatgtgcattcccagcagggtgaagaaaggtttaaattaaagaatttattttctctctcccccttcctctttctcccagtctttgcataggagaatgttagacattcagaaattactgtttctgttttaaattgagtattgatttttttatattgactttgtattgagttctttttgaaagaataacaaaataaaatgcaggatctttgtaaagcctttgcactttcaacctctttatagcttgagttacttttgcagtgggaacaatgtaaatgacatttaaaagatttaaggtttcagaaagctgcatcccacaattgaacacaatgcatttttatttcaattcttggaactggtaggctattctttttaaaagggggtaaacttcgccctaaggctggtagaatgtatgttcacattatagtagacaggatttcatttgccttatatgtttatagattttttataattttcatcctacgttattaaaattagagcattgagtgttaaagaacttaatgaggagtctatatctgagattgctctcttccctggtgatgttttaactggtagataatttgttcttaaatatgtacttttgaagataggacagtttttatagtccatgaactgaatgttaaaaagttctgtatgcattctcagagaggattttaaagctatatagttcatccatcctttgcattatcaaaatgttaagtcaaatctgtaatactttggctaaaattcataaagtaagccctagagaaaatacttgaccaccaaatttttgcccaactatcatcacctcccttcccccgcctctgttcttgccttttgacatctacatggaagacaagttctttacagcaaatggtaagaggcaggtgacctggtgtgtttgctgtgttgtagttcattgcctggggcttgggactccttttttaatggagagactagctgtgcaggtgtgtgttggatagggataaagtgctcacccctgccctctctacagtagttggtggtagatttctctctcattttgcctcataatcactttcgagtgcatgtatttacctaagggctgtagctctgtgggatgctaccagcatattggactgacagaaattgattaccttgccactccaacctacgtactgagtgagtgctccagccactcagtgaaaccaacaaaagtgagtccttggtttaccttccaatctgggtcctgctgtgtaagtatccctaagtggggatgcatatttgtttgtgcgtttttatttccatatatgtgagcatttctctgagtgtattaccagacggatagcacatttatatgtcagacatcttaacatctgtgttatctgtagcaggtgtgtagctcagcagatacgtgtcaatgtgtatatagctgacgtgtgtgaagggtgtctgtgtttctgcagtcccctgtgtttgagagatgacttaataaccctgtgttttgagaggtcgctctaaaccagtgacttttccctcccctgctttaattccnnnnnn

SEQ ID NO: 21125 - DNA, 1685 bp, Homo sapiens; identical to SEQ ID NO: 21103

SEQ ID NO: 21126 - DNA, 1468 bp, Homo sapiens
  misc_feature 1, 2, 3, 4, 5, 6, 7, 8, 9, 10, 11, 12, 13, 14, 15, 16, 17,18, 19, 20, 21, 22, 23, 24, 25, 26, 27, 28, 29, 30, 31,32, 33, 34, 35, 36, 37, 38, 39, 40, 41, 42, 43, 44, 45,46, 47, 48, 49, 50, 51, 52, 53, 54, 55, 56, 57, 58, 59,60: n = A,T,C or G
  misc_feature 61, 62, 63, 64, 65, 66, 67, 68, 69, 70, 71, 72, 73, 74, 75,76, 77, 78, 79, 80, 81, 82, 83, 84, 85, 86, 87, 88, 89,90, 91, 92, 93, 94, 95, 96, 97, 98, 99, 100, 101, 102, 103,104, 105, 106, 107, 108, 109, 110, 111, 112, 113, 114: n = A,T,C or G
  misc_feature 115, 116, 117, 118, 119, 120, 121, 122, 123, 124, 125, 126,127, 128, 129, 130, 131, 132, 133, 134, 135, 136, 137, 138,139, 140, 141, 142, 143, 144, 145, 146, 147, 148, 149, 150,151, 152, 153, 154, 155, 156, 157, 158, 159, 160, 161: n = A,T,C or G
  misc_feature 162, 163, 164, 165, 166, 167, 168, 169, 170, 171, 172, 173,174, 175, 176, 177, 178, 179, 180, 181, 182, 183, 184, 185,186, 187, 188, 189, 190, 191, 192, 193, 194, 195, 196, 197,198, 199, 200, 201, 202, 203, 204, 205, 206, 207, 208: n = A,T,C or G
  misc_feature 209, 210, 211, 212, 213, 214, 215, 216, 217, 218, 219, 220,221, 222, 223, 224, 225, 226, 227, 228, 229, 230, 231, 232,233, 234, 235, 236, 237, 238, 239, 240, 241, 242, 243, 244,245, 246, 247, 248, 249, 250, 251, 252, 253, 254, 255: n = A,T,C or G
  misc_feature 256, 257, 258, 259, 260, 261, 262, 263, 264, 265, 266, 267,268, 269, 270, 271, 272, 273, 274, 275, 276, 277, 278, 279,280, 281, 282, 283, 284, 285, 1468: n = A,T,C or G
nnnnnnnnnnnnnnnnnnnnnnnnnnnnnnnnnnnnnnnnnnnnnnnnnnnnnnnnnnnnnnnnnnnnnnnnnnnnnnnnnnnnnnnnnnnnnnnnnnnnnnnnnnnnnnnnnnnnnnnnnnnnnnnnnnnnnnnnnnnnnnnnnnnnnnnnnnnnnnnnnnnnnnnnnnnnnnnnnnnnnnnnnnnnnnnnnnnnnnnnnnnnnnnnnnnnnnnnnnnnnnnnnnnnnnnnnnnnnnnnnnnnnnnnnnnnnnnnnnnnnnnnnnnnnnnnnnnnnnnnnnnnncacgtcgatgggtgtatgttgatcaggctggttgtaggagaccttgtagtgtgtgttggttctttcgcttgagtcttgtgttgtgtcgttgtatctattgtctgctctggttcctgttcttgctgcgtgttctgttttgccccttggcgcttctgtgagtagtgggcgcctgggttcgatactcgtggtcggcttttcgctcaccggcaccggaagggttcatctctcctacccaaggcccaccgcagagatgtttttattgaaatgcatgttatgagtaacacatgaactccctctggcccaggtgggacttcttccctcataggtgggtcaggcccagtgggacagtcttggtggtggtaagaagggagccaagtgacagaaggtctccaaggcataggagatggtgtccggtgagtctggggaaccgaggattatgaagcctgctggaagcctggtatggtatggttcttctcagctgtggctgcagatttctcttcattggctgcctcctctgaaaacagactcctcttttctgcaattaatcttttaactcctaccatccactgactgacctcagtcacatggtcaaccatgagggagcggtggatgtcatctgctgcgtcccaccggtggcttgaaagctcttgcaccagtagagccattctcttctttacaggtattgacaactttcctccagcccactgttcctgcagcagtgccaggcgtcggctgatgtcatcacatacctgcttccttgtgtggccacggcagtcttccaatgcctgttccaaaggtctcagcacatcctccatcacagcctcagactcgactgggaaacttgtgggctccacgccagaggcaggaccactccccacaggtggggacctgggagccttacttgaaggaggtggaggccccattgggggaggcccaggagaagtctctgatgcggggactctgggggatccatcctggggtgcggctaccctcttggtaagcagcgagcgcctgggtccgccggcctgggtctgcagcccgtatgagaactgcggcgggtcgttccagccgcgttccttgttgcccggcttcacgtacagctccgccatcgccacccccgccgcactgttagcttatactggggctgggggagacagagggtccatactaagcgccgcaaccn

SEQ ID NO: 21127 - DNA, 405 bp, Homo sapiens
  misc_feature 404, 405: n = A,T,C or G
acgcgggtgactaccagcatccatactaatctgggagatccagggatgtgccttgttatggaggggactgtgactcctttaagacctagaccatcacttgggagatttgttttggtctctgggtggattgtggatggtagacagatcacaggccagcatgacctggctttggccttgctggttatagaatctctattctgcagagctaagagtgcaaactaggaccaacattaccaagaggacagaagctatctggggatcctggctggcagtgctcaacttacagctcaagcctgtgataacaggagaggtggagtgtgttttgtgcttcattgtgcatgtgtttcaagcagaaactagacttgagggcttaaatagaaaacatctcaaacaatccatgaaann

SEQ ID NO: 21128 - DNA, 1017 bp, Homo sapiens
  misc_feature 1, 2, 1014, 1015, 1016, 1017: n = A,T,C or G
nnccacgcgtccggctttcttgggaagatggcggctgtgtcggtgtatgctccaccagttggaggcttctcttttgataactgccgcaggaatgccgtcttggaagccgattttgcaaagaggggatacaagcttccaaaggtccggaaaactggcacgaccatcgctggggtggtctataaggatggcatagttcttggagcagatacaagagcaactgaagggatggttgttgctgacaagaactgttcaaaaatacacttcatatctcctaatatttattgttgtggtgctgggacagctgcagacacagacatgacaacccagctcatttcttccaacctgggagctccactccctctccactggccgtcttcccagagttgtgacagccaatcggatgctgaaagcagatgctttttcagggtatcaaggttacattgggtgcagccctagtttttagggggagtagatgttactggacctcacctctacagcatctatcctcatggatcaactgataagttgccttatgtcaccatgggttctggctccttggcagcaatggctgtatttgaagattagtttaggcccaacattgaagaagtagctacccaactctctggtcaatgaagacatcacatttggtatattcttcctcctcgtccacgaaagacacattcacgtagtggttcacaccaagtgctaattgtgttttttgtgtccattcgccattggcagcacatgagtgtgtcaggcatgagcggagcaggtgttattaagggcatcctccagtcctctttccattcaatcgctgcctctggagatataggtgtgtggaagtgcacgtccaagcaatggcgtcttcttgaatggcatcagttggggcatgggcttggttttgcaatgtggtgatcattcaggaacagtgaacctgttatcagtctaatgttcaccgaatgtttctctattacaataaaaaactctttccatatttggctcctttttgaacannnn

SEQ ID NO: 21129 - DNA, 2929 bp, Homo sapiens
ttcggcttgtgttctgtagttcggtttctttggccttgctgcttgtctgctcgttttccgtccgcttctgtctggtgcttgttctcgctgtcttctgttgctacgtcctttccgtctgctccggctgtttctctccgttgcttttcctctcgccccgtctccgttcctgtctgtcgtgttccctgcttgcttgcttgtttttgcgttcctgctccctctccctgtcctcgctctctgttcttgcagttctctctctgcctcctgtcgcttttttgtgcctctctggtcctccttgcttctgtgtgtgctctgcgttcagcctcccgctcgcgggctgggtttcggttctgtgtctttttggtcgtcttctgctgtcctttcttcccgattgttgttcgcgtttccttttctcgttttgtgtgttgcgttatattgttctgtggctgttgagtctgtgggtaggaggtccgaccgttatttggttgtgtgtttgagagtttgaattggtgggtgctctcgccgtcaggggtttatgattttctgatcgtgtgttgacgcggtgtggctcttagtgtctgttagctgtttattttgccgttgtgtgtgttaggtgttattgatttgatggcgagttgtgttgagctgttctggggtcaggctggcgtggttgttatctgctttgttgctctgtcgctacctcgcctctcgcccttctttctccggtaccccgtctacttctcattctcacgctcctgcttaccaccttaacgtccttttcttcggcttgttcactgacttactctcctccacccatcgtcccaccatcaatccgtcctcttcttactctgctgcctgccctgcctctcgcgtggggcgcccgcggcgcccctccgctccgtcgcctcccccctgtgccggcgcggtgttcttccttccgccacgccggtggttggcggcttcgatgcggccccgctgcctcccgccgcctctcgcctgcggccgcgtgcgcctcgtccgcgccttcccccgcgcctcatgcctctccgcttttgtggtcccttgccgcgggcgccgtgcgcgttgtgtgtcggtgcagcagtttccctttcctctgctcggggtgcgggttgttccgtcctgcttcgtctccccccctacacccgtttccgcctctcggcattgtctctctcctcttcgcgctcccctgttgcccgcggtggttggtctgtcctctttccttacttctactcgtccttcctttcttcgtcctcctcgtcgttctgctcttttctgtcttgtgctacttcttcggtcggctgtcgtcgcgcgcgtgccgcgtcgtcgcgtctctcgcttgttctttcgttctcgtgttatgttttcgtctttgtctccgttgtgctctttttttcttgtttttgttttttttttttttttttttctttttttttttttttttttttttttttttttttttttttttttttttttttttttttaaaccacagcatgatagctctttatttctgtaagtcctgctaggaaatcatcaaatctgacggtggtttgggggacctgaacaaacctcctgtaattaatcagctttcagtttctccccctagtccctccttcaacaacataggaggatcctccccttctttctgctcacggccttatctaggcttcccagtgcccccaggacagcgtgggctatgtttacagcgtcatccttgctgtgtgtgtgcctcatgcattgtggctccagcttatcctcagtgatctgtagagagtgtccaccttgtgtcactgtccactcttccagggtgggccccacccctcccatctctgcaccccacaaacaacatggtcacccgcgtctttgtgtgtgtccacactgaaactgagcgagaagtcttcagagacagccagtgttccgaaggagaggacgaaattatacccatttcagaaacattggcatacacctgtgtctgcccattccttttcctagcagacctggactccacaccagaaagcacaggtcagtaggactcaggaggctcgagcttcggccaggtgagttccaagcttcaggtgtccagcatccagaaaggccaagtgatgccagaacgtgaggtggacttaaatttactagaggtaggggtgggacaggggcactcaggggttggctgcgatggtgtccttgatccacttccggtaatgcaccaccttggtgtacacagcaggcttttcaggcagggcacatggctcagggccccatgatgtgataccttgaagcacaccattacagacaagtggacccccagaatcaccctaagggtaaaggaggagagacacagtgagaaagattggccccaataactgcctaggcaactccatctctcagaaccgcgcaggcagatgactgagagcaattcccagctctcaggaacagacagaaatgtctccagaacccactcccacaagaatatgggcagggagtccaacagagggaacaaggctccagtcttggcctatggggaggggacttcagggtccagctcctgcacaaggggcaaggtccaggaggacagtccctgcagacaggtcagcaggatgagggccgggaccatctgcaggatgctgcccccacaggcacatcgcagaggccacctcttcaggactactctctgactagatgtcccctctccagggcattggggagccatggagggccgtgggcagggctgggtatggtcagttcagtgatcagaatgacccactgaggccagatggaggatggagtggaggggagagactgagggccaggagactgtgagggaggctgggtgagggcccaggcaggggcaaggcctggagccacccccaggtcatcctcatcgtcaccggacgcgtgggtcgactccctata

SEQ ID NO: 21130 - DNA, 376 bp, Homo sapiens
  misc_feature 376: n = A,T,C or G
acgcggggagcggaggtgcgtctgtggtgtcagacacctgtgtctcagctctgtcttcctcgggctggctcctgcggatccttcctgggccagaaccgtgcctctaggccacctcccccaagccaccaagcccccgcggtgggccagccttggcccagtgtcacgcaggacagaaatgaccaacagataactgaggacaatggacctgcctgggcatagacttccttaaggtaagtccattttaaaccaacgatttctcgatgacattatttctccgtcgatgttggcagaaatgccagcattgggaaggtaaactaaagagaggtagggaagttgttcaagttaggcctttgtgatgaaatcaccaaggttttgn

SEQ ID NO: 21131 - DNA, 278 bp, Homo sapiens
  misc_feature 1, 2, 3, 123, 124, 125, 126, 127, 128, 129, 130, 131, 132,133, 134, 135, 136, 137, 138, 139, 140, 141, 142, 143, 144,145, 146, 147, 148, 149, 150, 151, 152, 153, 154, 155, 156,157: n = A,T,C or G
nnncctaagaaagataaggcagggccctccattgtccacaggaagtgcttctaaagtcagaacaggttctccaaggatcccctagaaactaatctgttaccagtcatgaaacattaaaccctnnnnnnnnnnnnnnnnnnnnnnnnnnnnnnnnnnngcgggctcttctaatcaggaagaaatgttattttttgaacgtatgcttttggctataaatttcagaaacttttatttatttagctacttttataaataatattggtctctttattgaaagt

SEQ ID NO: 21132 - DNA, 374 bp, Homo sapiens
  misc_feature 1: n = A,T,C or G
ngcgtccgtgatctgattatatccagtgttgggtttatattttcacccacaaacaactgacactgctatcttttactgtatttttaaaaatttaatttgaaaaggtcacccagaagcattctgaaggaaatggttctagaattatagagtatgtagccctaatagttttccctcctagcaaaaagtctgaaatttatctttcttacaaactgttccatttcttttaaggatcccttaattatttatctctttaagccaggcatggtggctcacgcctgtaatcccagcactttgggagggtgaggcgggcggatccccttaggttgggagttcaaggccacccttgccaacatggagaaaccccatctttttgt

SEQ ID NO: 21133 - DNA, 1552 bp, Homo sapiens
acgaggccagagggcagaagacagtgaaaataaatattcaggcaacgcagtgagcaggctggactggaatcttggctctcccgatcccagctctgtgatcttgggggattcaacttcctcagttctcaagtgctgcaaaatgggggtgcctgggaggcaaagagtgtcattagtgaacacggcacctggcccttggtggacacgtgactcttccccccaccccaccatccccacaagtgctgggaagcacttggtcccttgacatcaatcttcaacctccctacaatactgttcagggacagcaggaagcaaatcccatcattacacaagagaagggcatgattgctcttccgtgcagcaacaagaatgacttaactgttaccttagacactgcacaaacatctggaagcataaacagtgtaaaaaaaatgtgcagccagactctgggcttgtcatttcagaccactctcaagtctcaagaaaagttaactgtccctttcagggacacagtgggtccccactaggacacacccaacaccttcttcctggagtgaatctggcagaggtttctttgagcaccagactgtctagaagatatgtatttgggctgttaatgctcacagtgggtcaggaattaggatactgtcaaatggcagcacacaaccaactgttcctctgctctagccccagctggggtaatatctctgtcaaacttgctgtccttcaggaactgccagaaggctgctggctgtgccatggccttgtgctcccggaacacccatcctctcccctggacacacgggctaaaagagggagcaggaagcagaacaaggagggcaacttccacagttctgcatccaggtcaggagcacggtcagcccagagcggcctgcctttatgctgccaagcctcccccgacccccaccctcttaaagaatccaagcaaaagtacctttgaacaatgtgtccccaccccatcagtttgaggatgcccctcatccctcacacgctggaaccttggtggcagcgtgcagtcttagagccaaagtcccacgtggcctctgtgtgcctgactcctctgaaccacccctcagtgtctccgggaggcttggacacacaagagcctcctcaccactgtggtgacagtgcccgatttttgcggcatgcattcagagcttccgccttacgtgccagtggactgcaagaccgtgtgctggagggctgcgggcagacaggcagcagggacttgccaggcaaggcccactggcgcatggcacgggatgcttcctcaggcctatcgccctgcccgcaccctagcatccaccctgggaagggctcccctaactcaggcagtgcccccatcttcagtcactggcaaagaagacaacagagtccagggagcttggacacttgctgcccttggccccaggacaccgatggggagcaggctccctgcaggttactgcacacccaccacacgcccagcagcttctgggtcgccttgctgattcttcccaagcagccgcaaggcggttttcttttgttctaaaca

SEQ ID NO: 21134 - DNA, 387 bp, Homo sapiens
  misc_feature 1, 386, 387: n = A,T,C or G
naaggaagaatttaaggagaaaataggcaattgcaataatatatatgaagttcagtagaagaagtaataatatcaaagttctacttgtagatatcttttacctccttcagtggctgtattccgagcgagaggaaaacttctggatgggcagagctcccagtaatggacttggtcagccattttgtatggaacgagaaacagcctgagatggaatttcactcatcgcccaggctggagttcaatggtcatctctgctcactgcaatctccgctgcccgggttcaagcgattctgctgcctcagcctcccaagagccaggaaatggatggagccattgacagaagttttcttcaggatcatggagagcatgtgggacagcagtagtann

SEQ ID NO: 21135 - DNA, 3430 bp, Homo sapiens
  misc_feature 2331: n = A,T,C or G
acgcggggaagccatagtcggcgagcaacgctggagcatcccgctctggtgccgttgcagccggcagagatggttgagctcatgttcccgctgttgctcctccttctgcccttccttctgtatatggctgcgccccaaatcaggaaaatgctgtccagtggggtgtgtacatcaactgttcagcttcctgggaaagtagttgtggtcacaggagctaatacaggtatcgggaaggagacagccaaagagctggctcagagaggagctcgagtatatttagcttgccgggatgtggaaaagggggaattggtggccaaagagatccagaccacgacagggaaccagcaggtgttggtgcggaaactggacctgtctgatactaagtctattcgagcttttgctaagggcttcttagctgaggaaaagcacctccacgttttgatcaacaatgcaggagtgatgatgtgtccgtactcgaagacagcagatggctttgagatgcacataggagtcaaccacttgggtcacttcctcctaacccatctgctgctagagaaactaaaggaatcagccccatcaaggatagtaaatgtgtcttccctcgcacatcacctgggaaggatccacttccataacctgcagggcgagaaattctacaatgcaggcctggcctactgtcacagcaagctagccaacatcctcttcacccaggaactggcccggagactaaaaggctctggcgttacgacgtattctgtacaccctggcacagtccaatctgaactggttcggcactcatctttcatgagatggatgtggtggcttttctcctttttcatcaagactcctcagcagggagcccagaccagcctgcactgtgccttaacagaaggtcttgagattctaagtgggaatcatttcagtgactgtcatgtggcatgggtctctgcccaagctcgtaatgagactatagcaaggcggctgtgggacgtcagttgtgacctgctgggcctcccaatagactaacaggcagtgccagttggacccaagagaagactgcagcagactacacagtacttcttgtcaaaatgattctccttcaaggttttcaaaacctttagcacaaagagagcaaaaccttccagccttgcctgcttggtgtccagttaaaactcagtgtactgccagattcgtctaaatgtctgtcatgtccagatttactttgcttctgttactgccagagttactagagatatcataataggataagaagaccctcatatgacctgcacagctcattttccttctgaaagaaactactacctaggagaatctaagctatagcagggatgatttatgcaaatttgaactagcttctttgttcacaattcagttcctcccaaccaaccagtcttcacttcaagagggccacactgcaacctcagcttaacatgaataacaaagactggctcaggagcagggcttgcccaggcatggtggatcaccggaggtcagtagttcaagaccagcctggccaacatggtgaaaccccacctctactaaaaattgtgtatatctttgtgtgtcttcctgtttatgtgtgccaagggagtattttcacaaagttcaaaacagccacaataatcagagatggagcaaaccagtgccatccagtctttatgcaaatgaaatgctgcaaagggaagcagattctgtatatgttggtaactacccaccaagagcacatgggtagcagggaagaagtaaaaaaagagaaggagaatactggaagataatgcacaaaatgaagggactagttaaggattaactagccctttaaggattaactagttaaggattaatagcaaaagatattaaatatgctaacatagctatgggggaattgagggcaagcacccaggactgatgaggtcttaacaaaaaccagtgtgggtgcttgccctcaattcctccatagctatgttagcatatttaatgtcttttgctattaatccttaactagttaatccttaaagggctagttaatccttaactagtcccttcattttgtgcattatcttccagtattctccttctctttttttacttcttccctgctacccatgtgctcttggcgggtagttaccaacatatacagaatctgcttccctttgcagcatttcatttgcataaagactggatggcactggtttgctccatctctgattattgtggctgttttgaactttgtgaaaatactcccttggcaacacataaacaggaagacacacaaagatatacacaatttttagtagaggtggggtttcaccnatgttggccaggctggaaggttttgctctctttgtgctaaaggttttgaaaaccttgaaggagaatcattttgaccaatgaagtactgtgtagtctgctgcagtcttctcttgggtccaactggcactgcctgttagtctattgggaggcccagcaggtcacaactgacgtcccacagccgccttgctatagtctcattacgagcttgggcagagacccatgccacatgacagtcactgaaatgattcccacttagaatctcaagaccttctgttaaggcacagtgcaggctggtctgggctccctgctgaggagtcttgatgaaaaaggagaaaagccaccacatccatctcatgaaagatgagtgccgaaccagttcagattggactgtgccagggtgtacagaatacgtcgtaacgccagagccttttagtctccgggccagttcctgggtgaagaggatgttggctagcttgctgtgacagtaggccaggcctgcattgtagaatttctcgccctgcaggttatggaagtggatccttcccaggtgatgtgcgagggaagacacatttactatccttgatggggctgattcctttagtttctctagcagcagatgggttaggaggaagtgacccaagtggttgactcctatgtgcatctcaaagccatctgctgtcttcgagtacggacacatcatcactcctgcattgttgatcaaaacgtggaggtgcttttcctcagctaagaagcccttagcaaaagctcgaatagacttagtatcagacaggtccagtttccgcaccaacacctgctggttccctgtcgtggtctggatctctttggccaccaattcccccttttccacatcccggcaagctaaatatactcgagctcctgtattagctcctgtgaccacaactactttcccaggaagctgaacagttgatgtacacaccccactggacagcattttcctgatttggggcgcagccatatacagaaggaagggcagaaggaggagcaacagcgggaacatgagctcaaccatctctgccggctgcagcggcaccagagcgggatgctccagccggacgcg

SEQ ID NO: 21136 - DNA, 3678 bp, Homo sapiens
gaacattatattccgttgaacttaccaatgccatttggaaaaggcaggattcaaagataccaagacctccagcttgactactcattaacagatgagttctgcagaaaccacttcttggtgggactgttactgagggaggtggggacagccctccaggagttccgggaggtccgtctgatcgccatcagtgtgctcaagaacctgctgataaagcattcttttgatgacagatatgcttcaaggagccatcaggcaaggatagccaccctctacctgcctctgtttggtctgctgattgaaaacgtccagcggatcaatgtgagggatgtgtcacccttccctgtgaacgcgggcatgactgtgaaggatgaatccctggctctaccagctgtgaatccgctggtgacgccgcagaagggaagcaccctggacaacagcctgcacaaggacctgctgggcgccatctccggcattgcttctccatatacaacctcaactccaaacatcaacagtgtgagaaatgctgattcgagaggatctctcataagcacagattcgggtaacagccttccagaaaggaatagtgagaagagcaattccctggataagcaccaacaaagtagcacattgggaaattccgtggttcgctgtgataaacttgaccagtctgagattaagagcctactgatgtgtttcctctacatcttaaagagcatgtctgatgatgctttgtttacatattggaacaaggcttcaacatctgaactcatggatctttttacaatatctgaagtctgcctgcaccagttccagtacatggggaagcgatacatagccaggaaccaggaggggttgggacccatagttcatgatcgaaagtctcagacattgcctgtttcccgtaacagaacaggaatgatgcatgccagattgcagcagctgggcagcctggataactctctcacttttaaccacagctatggccactcggacgcagatgttctgcaccagtcattacttgaagccaacattgctactgaggtttgcctgacagctctggacacgctttctctatttacattggcgtttaagaaccagctcctggccgaccatggacataatcctctcatgaaaaaagtttttgatgtctacctgtgttttcttcaaaaacatcagtctgaaacggctttaaaaaatgtcttcactgccttaaggtccttaatttataagtttccctcaacattctatgaagggagagcggacatgtgtgcggctctgtgttacgagattctcaagtgctgtaactccaagctgagctccatcaggacggaggcctcccagctgctctacttcctgatgaggaacaactttgattacactggaaagaagtcctttgtccggacacatttgcaagtcatcatatctgtcagccagctgatagcagacgttgttggcattgggggaaccagattccagcagtccctgtccatcatcaacaactgtgccaacagtgaccggcttattaagcacaccagcttctcctctgatgtgaaggacttaaccaaaaggatacgcacggtgctaatggccaccgcccagatgaaggagcatgagaacgacccagagatgctggtggacctccagtacagcctggccaaatcctatgccagcacgcccgagctcaggaagacgtggctcgacagcatggccaggatccatgtcaaaaatggcgatctctcagaggcagcaatgtgctatgtccacgtaacagccctagtggcagaatatctcacacggaaaggcgtgtttagacaaggatgcaccgccttcagggtcattaccccaaacatcgacgaggaggcctccatgatggaagacgtggggatgcaggatgtccatttcaacgaggatgtgctgatggagctccttgagcagtgcgcagatggactctggaaagccgagcgctacgagctcatcgccgacatctacaaacttatcatccccatttatgagaagcggagggattttgagaggctggcccatctgtatgacacgctgcaccgggcctacagcaaagtgaccgaggtcatgcactcgggccgcaggcttctggggacctacttccgggtagccttcttcgggcaggcagcgcaataccagtttacagacagtgaaacagatgtggagggattctttgaagatgaagatggaaaggagtatatttacaaggaacccaaactcacaccgctgtcggaaatttctcagagactccttaaactgtactcggataaatttggttctgaaaatgtcaaaatgatacaggattctggcaaggtcaaccctaaggatctggattctaagtatgcatacatccaggtgactcacgtcatccccttctttgacgaaaaagagttgcaagaaaggaaaacagagtttgagagatcccacaacatccgccgcttcatgtttgagatgccatttacgcagaccgggaagaggcagggcggggtggaagagcagtgcaaacggcgcaccatcctgacagccatacactgcttcccttatgtgaagaagcgcatccctgtcatgtaccagcaccacactgacctgaaccccatcgaggtggccattgacgagatgagtaagaaggtggcggagctccggcagctgtgctcctcggccgaggtggacatgatcaaactgcagctcaaactccagggcagcgtgagtgttcaggtgagccaggcccagcaggccggaggccagcaggggaccgtccttgcccctgggtgacttgagagtcgtttccactaacaaggtctacttgagagcctcggtttaccaagtgatccctgctcccttcccccaacgtctgtgacatttctcctgatatcagagggggaggaaacctcatgatccctgccccccgccccatgaggactgactgtggggacaagagccagatctcatacactaccctgatttgtcagtatttggggaattctgggtgcctgattagaagcatcaagactcttctaaatacaaagaagtgtggagagcagtagattttcctataaaactgttgtttgctgttttctatgaaaattgtatccaaaaaagtaccttaagttttaccctcttaatggtatcttttgattaatgaattcattattttaatatagcccaatcaatcaatttttctttattggtagcatttttatgttctctttaagaaatctgtgtctactccaaaatttcacagatgttctcctaggttttcctcctttgctcagcatccacatccaggtctgcagtccatctggaattgatttttgtatatgttatagtgtaagggtcaggatatattttttccatatgaccttccaagtgatatacacaatttattgaaaagatcatctttgatctagatactaacatatatgttcagtttgtgaaaattcatcaagctgtatacaccttgtgatatatgcgctttcccgtttgtatattatactttagtaagaggtttttaaaaagttatcttacttacatggtttcctagttaattggtaagtgttaaatcactccctccagtaacaagtatgactcttattttctggtatttttaagtgtatatagttcaagcacatgtttgttcatatgtatatgtacatgtgt

SEQ ID NO: 21137 - DNA, 882 bp, Homo sapiens
  misc_feature 1, 2, 3, 853, 881, 882: n = A,T,C or G
nnnctgttgcaatctccacgtgcgatggatccttggacccactttggtccaactcttaaactttgtgtcttgtctttatttcttttctcattccctcgtctccaccgggaaggggagagcctgcgggtggtgtatcaggcaggttcccctacatcttggcacccaacacggtctcctcgaacccaggtgaagttacacctgagcgtggtcgtgtgaagaacggtctgtccaggaactcccgagaacgtgtggtcggcctttgcggtaagcttgtgcactcggagcattccaggacaaccatgggacaatccaaaagtaaacattctgcatatttacattttattaaagctcctcttaaagagggcaggaattaaggctagcacagacacatttgattactctgtttccaacagtagagcaatatgtccttggtttcctgaacatggtaccatggacttcaaagactggaacaggtgggaattgccttaaaacaagttgtaagggaaggaaatttatccccctaacagcctggtcaaaactggggctatagtgaaaagcagcctcggaaccgtgttcaatcgggaaaaatgagggcttatcctccagcagaaagaatttctgcagaggaaggtgggatgcttgctgaacggagggagaggtagtgacgcacgattcgggaaaatacagactcaccccggagatgaggtaattctctgaggaggcagtgggacctccagtgtcctaaattgagaagcattatgccagcgttaaacaagaagctgaggacacggcccaggagacaacgggtggcggccaataaaatagctgagcggaagatgagcacatgccgtcncaacaaagggccgacacacacgggtcann

SEQ ID NO: 21138 - DNA, 817 bp, Homo sapiens
  misc_feature 805, 806, 807, 808, 809, 810, 811, 812, 813, 814, 815, 816,817: n = A,T,C or G
cgtccggcaggaggagaggaggatccatgcctttgtcatgctggctgagcgccagcggcgggtacgagaggctgaagagagtggtcggcgccaggtggaaaaacagcgcctgcgggaggaggacgagatatttaaggaggtggttaaagttcaccatagtactataagctcctacctagaagacataatactgaataccgaagcgaatactgcagaagaacaagccagggcagaaatagagaagatggctgagaaaatcaatgacattgcttatgaaatggaaagccgccgaacctatcttcagtcagaggagattgttgctgagttggtttatagttttctgatcccagaggtgcaaaaatacctcgtcaaagaaaaagtgaggaacgcacagcggaaacataggcgggcagcccatcagatcatccacagttacacggaaagcatggttcaaaagaaattaactgagggagagcaagatgaggcctcaaatgctgccatgttacttgagaaagaaactcaaaatgagaacaacagctaagtccttggtccaatagaatggaatcttaagtctcaatcaaaaggaatcatggaaggagggttgagatgagagggaagattgtgatttttttgtaaaagaagctgtacgaatcatcataaataattccaatagtctgcacttctcccaaggtgtgcactgctcataaacttgccagtgtgtgattcatgagaaaggagatttattttccttaaacatccaataatttaaaatgattttcaataataataatcaaatgaaaaagcnnnnnnnnnnnnn

SEQ ID NO: 21139 - DNA, 447 bp, Homo sapiens
ggcgaggtactttgggaggccgagacgggcggatcacgaggtcaggagatcgagaccatcctggctaacacggcgaaaccctgtctctactaaaaaaaaataaaaaataaaaaataaaaacatttctgggcatggcggcggaggcctgcagtcccagctactccggaggcctgaggcaggagaatcgcttgaattcgggaggcggaagttgcggtgagccgagattgcgccactgcactccagcctgggcggcagagccagactctgtctcaaaaaaaaatatgaacagaaaaaagaaaaagccactccaggctcaactgcatcaggatttgcactgcaacagcatgcccagggcacagtcatgtttgagaaatacggaggacctctgaagtgcttgattctgtgaactcacactgctgtaagcagacttgtttctagataggggat

SEQ ID NO: 21140 - DNA, 601 bp, Homo sapiens; identical to SEQ ID NO: 20756

SEQ ID NO: 21141 - DNA, 843 bp, Homo sapiens
  misc_feature 604, 843: n = A,T,C or G
ggcgggggtgctgtgggggccgggccgtgtttacacagcggcgggcgggcgcggacgcggaacccggcgcggcggcggcacgatggtcatggcgtatttcgtcgagaatttttggggggaaaaaaatagtggctttgatgtcctctaccataatatgaaacatggacagatatcaacaaaagaactagcagattttgtaagggaacgagctaccatagaggaggcatactccaggtcaatgacaaaactagcaaaatctgcaagcaattattcacaacttggaacatttgcaccagtatgggatgtattcaaaacatctacagagaaattagcaaattgtcacttggatcttgttagaaaattacaagaattaataaaggaagttcagaagtatggagaagaacaagtaaagtctcataaaaagactaaagaagaagttgcaggaactctggaagctgtccaaaccattcagagcataactcaggccctccagaaatccaaggaaaattacaatgccaagtgtgtagaacaggagcgtttgaaaaagggaaggagctacacaggagaaatagaaaaggcagtgtaaatctaagaaaagctaacnggaatacctgataaactctaatgggaaaactattgcttagcaaaaaaaaaaaagaaaaaaaaaaatttgtgggggggcgcgggcccggaaaggtttagcacccttccgtggggcggggccccgaggaggcacatggcccaggtggccaaggaaccccgggcgacaggtggggttccccaaaaaacgcggggaccggtgttgaaaccccggggccgggccggttcccggccggcacccan

SEQ ID NO: 21142 - DNA, 965 bp, Homo sapiens
  misc_feature 1, 2, 3, 4, 5: n = A,T,C or G
nnnnnctgaaggaaaccccgaatttcatacacaagcgtggattttgccatgttttaaatggtaaatgccgactaactccaaggaagttggaaacttgaagcaggctcaaagcaaacttagtcgcgtcatccgccaccatcctccagggtaaaccgaggagcacagttaattggttttccacgggtatttgccacttgtcagatgggctgttatggacgtaaccacgtaattcctggaacccagtgagagtcagcttcctttacgggcgtctgacaagatgtgctcaaacaccttgaagatctttatggaaacaacttttggctctttatcaagatgtcattcagggctctgaacagtcgaatacgttgtggatgggtttgctgtagttatacagtgtgcatttgatacttgtcaatagcgctagtaatgttattgcaaaaataaaaccttctttaaaaaagaggccgtgagcacggtgccctgccgggactcaatttttaacacctatttttaacactagcttttgtgctagtaaattaaattaattcttttaaaaaaacccaattgtgtgtactttaacaagtaaaactaagttggttataatgtgacaaaaatacaagcaataataatagcaaaattatccaataggaaccatgcagagagttttatattataactcatgtcccctttcctgcaatgttattaacttctatccccattttccacatcaaggaaattaagtttggagacacagagtgacttacctaagtcacaggtctggtaggtggagagtttctctcactccagggaccacaatctacaaaataaacttgcatattctacaaaatatttgttaccattggaagtaggtaggcagagtgttactagcattaaattatggcaggaataaaaagaaagggtggtgggctggtcttgcttctgcagtttaagggggatccctgcgc

SEQ ID NO: 21143 - DNA, 405 bp, Homo sapiens; identical to SEQ ID NO: 21127
  misc_feature 404, 405: n = A,T,C or G

SEQ ID NO: 21144 - DNA, 611 bp, Homo sapiens; identical to SEQ ID NO: 21123
  misc_feature 1, 2: n = A,T,C or G

SEQ ID NO: 21145 - DNA, 1552 bp, Homo sapiens; identical to SEQ ID NO: 21133

SEQ ID NO: 21146 - DNA, 1201 bp, Homo sapiens
  misc_feature 959: n = A,T,C or G
acattttggattagaattgaagtatcagtctgttgtttcttcatttcttctttttctatgctctttttacaatttcagctactccagaagctcagattttccctattccaagctatgagatgtgatgccacatttggaattgccttcttgatatccccttctgagaatgcattgcctgctttttaactcattatattcaaaactaaattcatcatcattctctccttacaccagttctcaccctgactttgccatttttccttactaagtacgcgggggttttttttcttgctgcagcaacgcgagtgggagcaccaggatctcgggctcggaacgagactgcacggattgttttaagaaaatggcagacaaaccagacatgggggaaatcgccagcttcgataaggccaagctgaagaaaacggagacgcaggagaagaacaccctgccgaccaaagagaccattgagcaggagaagcggagtgaaatttcctaagatcctggaggatttcctacccccgtcctcttcgagaccccagtcgtgatgtggaggaagagccacctgcaagatggacacgagccacaagctgcactgtgaacctgggcactccgcggccgatgccaccggggcctgtgggtctctgaagggacccccccccaatttcggactgccaaaattctcccggttgtgccccgggggatattatagaaaattattttgtatcgcattatgacaaataaaacaaaactcgtgccggaaaaaaaaaaaacaataaaaaacaaaaaattttgtgggcggactgggacccctgaaaaaggtttttcttaaacacatttgtgtttggggggcggggccccaagatatgtatatgggtcaccattgcgcataacggtggcccaacagaaacccggcaatggcaaatgggttggggttctccccaaataaaaaaagccgcggnggacccgggggttttacaaacccggagtggcgtctgggggcatccggggctttacacgggggccaaggaggctgattatgccgcaccgggggggagtaaaaacgagagaaacgctacaacaggacacgcgagcaacactacacacgacagagaacgagaccgaggcagacagtaatccacatcacacacagcagaaaaacactaacagacaagacagagaaaacacacaaaaaacagcagca

SEQ ID NO: 21147 - DNA, 1149 bp, Homo sapiens
  misc_feature 1147, 1148, 1149: n = A,T,C or G
cgcgtccgccccgcgtccgccccgcgtcctcgggacgctctttccttcttcctcttgttcctcctcctgcctctcttcgcttcgcctgcaaacgcggtgggggctgctcggcggtcaggagcagcaagagacagagcgacatgagagattggaccgcgggctgcactggagaatttactggtaggataattcatccctaaagagattgaagtgagcttcagaatggcaaaagaggagccccagagtatctcaagggacttgcaggaactgcagaagaagctgtctctgctgatagactccttccagaataactcaaaggtggtggcctttatgaagtctccagtgggtcagtacttggacagccatccgtttctggccttcaccttgctggtgttcattgtcatgtcggccgttcctgttggattcttcctgctcatcgtggtgcttaccaccctggctgctctgctgggggtcataatattggaaggattggtcatctctgtgggtggcttctcactgctctgcatcctctgtggtttgggcttcgtatcactcgccatgtcggggatgatgatagcatcttatgtagtggtctccagcctcatcagctgctggttttctcccaggccactgacacagcaaaacaccagttgtgactttctgccagccatgaagtctgcagacttcgaggggctttaccaggaatgagtgactgctcagaggccgggcttcttttcaagtacctgtggatcatactcacccctgggattatggctttagaagaagggggctgggtagcaagcactcctgggtgtgtctctcgacttttcacttactgtaggaatccgaaagccaattagggatgggtgacccgagtggggccaggttagaacaccacaaaattggagtgggcaacacagtggcctgcccaatatttgagactaacatgggggggaccagggtctaaagggataccgggcgccagaaacaaggaaattacacaggcatggggaaaaaagtgaaatatagtacagcagaggtgtaataaacgtagtaaaaaaaaaataaagacgtgtgtgagaaaagtaatgagaagtaagaaacagattgatcatatcattcctgtgtttcagttacgttatttagnnn

SEQ ID NO: 21148 - DNA, 1552 bp, Homo sapiens; identical to SEQ ID NO: 21133

SEQ ID NO: 21149 - DNA, 3983 bp, Homo sapiens; identical to SEQ ID NO: 21101

SEQ ID NO: 21150 - DNA, 1643 bp, Homo sapiens
  misc_feature 1, 2, 3, 4, 1615, 1616, 1617, 1618, 1619, 1620, 1621, 1622,1623, 1624, 1625, 1626, 1627, 1628, 1629, 1630, 1631, 1632,1633, 1634, 1635, 1636, 1637, 1638, 1639, 1640, 1641, 1642,1643: n = A,T,C or G
nnnnggccctcgaggccacgcggggagggtagagtgagaagcaccagcaggcagtaacagccaacccttagccattgctaagggcagagaactggtggagcctttctcttactcccaggacttcagcacctaagacagctccaaaacaaaccagaacagtcagctccgggggagcacgactgggcgagaggcacagaaatggacaccagaaataaggcccagctccttgtgctcctgactcttctcagtgtgctcttctcacagacttcggcatggcctctttacagggcaccttctgctctcaggttgggtgacagaataccctttgagggagcaaatgaacctgatcaagtttcattaaaagaagacattgacatgttgcaaaatgcattagctgaaaatgacacaccctattatgatgtatccagaaatgccaggcatgctgatggagttttcaccagtgacttcagtaaactcttgggtcaactttctgccaaaaagtaccttgagtctcttatgggaaaacgtgttagcagtaacatctcagaagaccctgtaccagtcaaacgtcactcagatgcagtcttcactgacaactatacccgccttagaaaacaaatggctgtaaagaaatatttgaactcaattctgaatggaaagaggagcatgagggagaatctcccgactttccagaagagttagaaaaatgatgaaaaagacctttggagcaaagctgatgacaacttcccagtgaattcttgaaggaaaatgatacgcaacataattaaattttgagttctacataagtaattcaagaaaacaacttcaatatccaaaccaaataaaaatattgtgttgtgaatgttgtgatgtattctagctaatgtaataactgtgaagtttacattgtaaatagtatttgagagttctaaattttgtctttaactcataaaaagcctgcaatttcatatgctgtatatcctttctaacaaaaaaatatatttaatgataagtaaatgctaggttaattccaattatatgagacgtttttggaagagtagtaatagagcaaaattgatgtgtttatttatagagtgtacttaactattcaggagagtagaacagataatcagtgtgtctaaatttgaatgttaagcagatggaatgctgtgttaaataaacctcaaaatgtctaagatagtaacaatgaagataaaaagacattcttccaaaaagattttcagaaaatattatgtgtttccatattttataggcaacctttatttttaatggtgttttaaaaaatctcaaatttggattgctaatcaccaaaggctctctcctgatagtctttcagttaaggagaacgacccctgcttctgacactgaaacttccctttctgcttgtgttaagtatgtgtaaaatgtgaagtgaatgaaacactcagttgttcaataataaatatttttgccataatgactcagaatattgctttggtcatatgagcttccttctgtgaaatacattttggagacacaactatttttccaaaataattttaagaaatcaaagagagaaaataaagaccttgcttatgattgcagataaaaaaannnnnnnnnnnnnnnnnnnnnnnnnnnnn

SEQ ID NO: 21151 - DNA, 875 bp, Homo sapiens; identical to SEQ ID NO: 21042
  misc_feature 875: n = A,T,C or G

SEQ ID NO: 21152 - DNA, 1643 bp, Homo sapiens; identical to SEQ ID NO: 21150
  misc_feature 1, 2, 3, 4, 1615, 1616, 1617, 1618, 1619, 1620, 1621, 1622,1623, 1624, 1625, 1626, 1627, 1628, 1629, 1630, 1631, 1632,1633, 1634, 1635, 1636, 1637, 1638, 1639, 1640, 1641, 1642,1643: n = A,T,C or G

SEQ ID NO: 21153 - DNA, 2242 bp, Homo sapiens
  misc_feature 2084, 2085, 2086, 2087, 2088, 2089, 2090, 2091, 2092, 2093,2094, 2095, 2096, 2097, 2098, 2099, 2100, 2101, 2102, 2103,2104, 2105, 2106, 2107, 2108, 2109, 2110, 2111, 2112, 2113,2114, 2115, 2116, 2117, 2118, 2119, 2120, 2121, 2122: n = A,T,C or G
  misc_feature 2123, 2124, 2125, 2126, 2127, 2128, 2129, 2130, 2131, 2132,2133, 2134, 2135, 2136, 2137, 2138, 2139, 2140, 2141, 2142,2143, 2144, 2145, 2146, 2147, 2148, 2149, 2150, 2151, 2152,2153, 2154, 2155, 2156, 2157, 2158, 2159, 2160, 2161: n = A,T,C or G
  misc_feature 2162, 2163, 2164, 2165, 2166, 2167, 2168, 2169, 2170, 2171,2172, 2173, 2227, 2228, 2229, 2230, 2231, 2232, 2233, 2234,2235, 2236, 2237, 2238, 2239, 2240, 2241, 2242: n = A,T,C or G
cgcgaatgtagatcatggaaggacctgaaaagtactgtttctcgctatcttagctttagctaagtaaccttcaaggcgcgagaaagacataggactccgattccttgcctctgaagaatgaatcctctttcaaagtttcagctaaccatgagatggcgctgtgaccaaagacgaaaggtggagaaagacaaggcgtgcacgcttcgctcctagtctttggcctggcgcgtgccgcgtattgcgcagccgcagggaagctggatggggaggggtttgggaggcgaaccggaattgagggggtggttccgcggtgcgcgcgcctcgacatccgggcaacgcctctgttctgtcctcccccttcgtcgcctgtgacaaccggaagcggaagtgaaaatgggtgtccctgctgcctcttagcaacaagaggggtcaagtgacacaaccagctgactcccgtagaggaagacactgtggaggccagttctggagctattgcagcctcggttgcccggccggggacccgagccgaaaagttatcgtcagaatgtcgggcaaagaccgaattgaaatctttccctcgcgaatggcacagaccatcatgaaggctcgtttaaagggagcacagacaggtcgaaacctcctgaagaaaaaatctgatgccttaactcttcgatttcgacagatcctaaagaagataatagagactaaaatgttgatgggcgaagtgatgagagaagctgccttttcactagctgaagccaagttcacagcaggtgacttcagcactacagttatccaaaatgtcaataaagcgcaagtgaagattcgagcgaagaaagataatgtagcaggtgttactttgccagtatttgaacattaccatgaaggaactgacagttatgaactgactggtttagccagaggtggggaacagttggctaaattaaagaggaattatgccaaagcagtggaactactggtggaactagcttctctgcagacttcttttgttactttggatgaagctattaagataaccaacaggcgtgtaaatgccattgaacatgtcatcattccccggattgaacgtactcttgcttatatcatcacagagctggatgagagagagcgagaagagttctataggttaaagaaaatacaagagaagaaaaagattctaaaggaaaaatctgagaaggacttggagcaaaggagagcagctggagaggtgttggagcctgctaatcttctggctgaagagaaggacgaggatcttctatttgaataatctttcctgttctggttctttgagaaaccctaacactggcttcattttaattcacagtgtgtaggtttgatttgtgtggctatttattttttggcctaagaatttcactggttgtaaaatttacctagatgtctatttatgggattacttttgcagaatcataatttagcaaccatttatcatggatgaaagagatctgtaaaacctgcccaggaacttacagaatttactttgcagaagcgttatcatactccatttacatctgtgttacacgtgatctgcttaccaagcatattaggaaatacctcttaggaagcattagcggtctcaggccaattactgtggagcagctttcattcctacccacttgcaaaccttggcgctgttgtctgagattgctgcagccattcttgttaccatggtacttctcaaactttgtgaaaacctgcacttttccttgcatgacaggttcctgtcttgtctgtcatgggagccattctgccaatttaaatgcgactgtggtataaacagtaaaatgatttaaaagtaagtcattccgtttttattaatttactgttaagtcatgttctcatgctcagatcagtagtgtcagccagagctttctctgcagacatgtaggaagtgggtagctatttttcccactccatgtattagagttttacaaaaaggcttacttttgagacaactgttgcattttggggtactaataaatgattgccgatgagttatgagggcattataatacttccttatttgctaattaagaaaataactnnnnnnnnnnnnnnnnnnnnnnnnnnnnnnnnnnnnnnnnnnnnnnnnnnnnnnnnnnnnnnnnnnnnnnnnnnnnnnnnnnnnnnnnnnggggggggggcggggaaacaaaccaaaaaaaaaaaccccccacccccccccaannnnnnnnnnnnnnnn

SEQ ID NO: 21154 - DNA, 875 bp, Homo sapiens
  misc_feature 875: n = A,T,C or G
acagacagggtttcttcatgttggtcaggctggactcgaactcctggtctcaactgcctcagcctcccaaagtgctggattataggcatgagataccgtgcctggcctccatcactgattctatgtatgcacatgactccttttttacttttacttaggaggcttaaaacacaattattcattcaatataattataaagcagagtctttgttaatttctgaacttggtaaaaacattttttatattttatctatagctcattaatttaggtatcaaaaatgtgttttagtttaggtagcccaagctgccaattgtttgatatcatcatcctcttcttctgccctctgggaagatgctgctcgggatcgacgtgcagtggacgacatgcctggttttctatttggctgtgctgggagagaagaggaaggcacatttggaaggcggatatttgtcatcttcttatttaattcctcctgttccaattcttcaagttctgccatcaactcatcctcatcaaagtcatcaccaaagccaacccgttgagaaaatgcttctgagatttcttgggcgatatcctgttgctctgtgatctcttgcatcaaatcatctattttgttcagatccatgttttcatgaacagatttcatcgcttttgctgcaaagcccatgttcctcaacacctcagtgttggtgtgtgagttctccagggcttctctctggaactcaatggtagaaagtgtgccatcaatctgagtgagctgtttctcgaacctcttctttctctttagtgcctgtaatgcagctcgcttattctgcgtgccgtgcttcttggccagggcgatttctctctggattcgattttccaggtacctgcn

SEQ ID NO: 21155 - DNA, 2912 bp, Homo sapiens
  misc_feature 1867, 2200, 2910, 2911, 2912: n = A,T,C or G
acaattataaaatgtcagcttttaaggaaaactgtggaatatattttccagaaataaaaagagatccaggcagatatttacatagttgtcctgaatctgtgaaaaaatggcttcgacagctaaagaatgctgggaaaattcttctgttaattaccagttctcacagtgattactgtagacttctctgcgaatatattcttgggaatgattttacagacctttttgacattgtgattacaaatgcattgaagcctggtttcttctcccacttaccaagtcagagacctttccggacactcgagaatgatgaggagcaggaggcactgccatctctggataaacctggctggtactcccaagggaacgctgtccacctctatgaacttctgaagaaaatgactggcaaacctgaacccaaggttgtttattttggtgacagcatgcattcagatattttcccagctcgtcactatagtaattgggagacagtcctcatcctggaagaactcagaggggatgaaggcacgaggagtcagaggcctgaggagtcagagcctctagagaagaaaggaaaatatgagggaccaaaagcaaaacctttaaatacttcatctaaaaaatggggctctttttttattgattcagttttgggactggaaaatacagaagactccttggtttatacatggtcttgtaagagaatcagtacttacagcactattgcaattccaagtattgaagcaatcgcagaattacctctggactacaaatttacaagattctcttcaagcaattcaaaaacagctggctactatccaaatcctccactggtcttatcaagtgatgagacactgatatccaaataagttgtctttactgaaaaatgaagtgaagacccatatatgcagttaaaaaaaagttaattttcaaaaaatactgtaaaagactttaaggaacaagttttattgaccaataagttgatatttgtccataggtctcctttctataaatcatcttgatgtttaacaactcttattatattaaaatctcagtatcctaaaacttagaaccttattgatattttctatacagtagttttgtgattagaattcacctggggacacacactcacacgcacagtcactcttacacatatgcctagtccagtggttctcaaagtgtgatccatagactaatagcatagcattacctgagaacttgataatgcatatttgcaggccccacgcaaaacctgctgaatcagaagctctgagagtaaggcctaccaatctggtttaacaagcccgtcaggtgattctgatttacagtacagtttgagacccactggctagaacatatcctccagagacttggcttaattggtctgggtaaatatggctgagcgttgttatcttttgttatcttttatatgccctaggaaagtacaaccagaattgaaaaccaactgatctataccagttctttcaattaatagtcaagaacattgagtccagtgagattaagtgatttttgcaggctatgaggttttatgctattcctgtgttctccaaaacaagaaaataaaacagacatgacttattctctgttcatacagcaagtatggaaaaaacgatgatctagaagtcaactatctcaacctccattgttacccactaggtttttttctaataatgttaaaggctatctaatttatttaactcaactttaagcatcacattctcaatggtgggccccacacacctggttcttggggtgacacacatcattcggcatactggcctgggcacttccaatatcatcctatcaacaaatcattctccattagagataaatcatccaacgggcncgacaatggcccacaccgaaccacaccgacacacgtctgcccggcacggcgcaacggcccgctggcaacccgtctgttacgcgcgcaaccgccgggcacaacactcagcgaccacgctctgacgatagcctacgacctcgtcactccgagcttcccgcgtaacgtacgcactcttgcgcattgtagacattgtctttccttcacaccgtcgcaccacacccaccgccacccaaccacttccacacatcgtccacacgccaccaccacactacaaccaatcgccgacgcaccacacgacaacgaacacacgcgccaccaacgccacaacagcanacccacaccacccagcgacagcacggcaacacgcacccacaacacaaccccgcacgtacaccacccagaccgcacctacgcacgcaggacatagagaggagacgaacacagcgacgaggaacggcgaagcacagagcgcaggagccaacacgcagggagacaggcaagcacaagaggacggagacgaagacgacatgcaagcggacagggagccatacgcagagcagagaacagcacgagcgacgaagagaagaacgcagcaacaagcagacgccacgatgaacaaggcaaggagagagacaagaagcacgagcaagaagagcgagacaggcacgcgcaagaacaggacagcagagagggaccgaggcacaagaaacagagacgcgaaggggcaagcagcagagataggaagaagaaaggacgcaagcaggcgaaggcatacgccgcgagcgggcgacaccgacgaggagagaacgacagaccagcagaagagaacggccgagcgaggcaggcacgaaggcggaccagacgcagagcacgagcgcgcgatgaacgggcgcgagagcaggggacggacgagcgacagcgagcgaagcacggcggacgcagaggagcggagaggggacaagaagagacagaggacagggaggcgaaagacacggagcgcgcagagggacaaacggagaagagcgacggcgcgaacagtaacnnn

SEQ ID NO: 21156 - DNA, 3122 bp, Homo sapiens; identical to SEQ ID NO: 21069
  misc_feature 1, 3113, 3114, 3115, 3116, 3117, 3118, 3119, 3120, 3121,3122: n = A,T,C or G

SEQ ID NO: 21157 - DNA, 1546 bp, Homo sapiens
acaccattactcttctgaagagcctggtaaacagcagatgctttattcagaaaactagaaagagcaaatactcctgccacatcttgatgatttctatatgctaaatgcattgccatgcatcctcccatagagaatcctcctaaaagcaaaaacatacttaaaagaaaaagtagaatacataaaataataatttaggatatgatatataacaattttccatatttttaaaatatctggagacctttaaagagaatgctaaaaagaaatttcgtctactctaagtttcacagacaaaggcctgcgataacataaataaccctgttccctctatgtcaccactggtaaagagagctgtgctctacaaggagccaggattaaacaaatatatacccatagccacccaggctgcaaagaagatggaggtggataaatggggcagccacatggctaacagacaaggtagggacagaggcggtactcgggggagagagatgagggcagggaccactctgcaaagacgagcccagggcgcagcagcgagccccctccaactccaacgtgttctccatgttcgaacagacccaaatccaggaatttaaggaggccttcactatcatggaccagaacagggatggcttcatcgacaagaacgatctgagagacacctttgctgcccttgggcgagtgaacgtgaaaaatgaagaaattgatgaaatgatcaaggaggctccgggtccaattaactttactgtgttcctcacaatgtttggggagaaacttaagggagcggaccctgaggaaaccattctcaacgcattcaaagtgtttgaccctgaaggcaaaggggtgctgaaggctgattacgttcgggaaatgctgaccacgcaggcggagaggttttccaaggaggaggttgaccagatgttcgccgccttcccccctgacgtgactggcaacttggactacaagaacctggtgcacatcatcacccacggagaagagaaggactaggagggggctcgctgctgcgccctgggctcgtctttgcagagtggtccctgccctcatctctctcccccgagtaccaggcacagaaccataacaaagttagacaaccaatgtggaatagcaccaaaatccagacagcaacatactatagaagactggggtcgcacacgagcacaacggctgacgacaatccaaagagcgaaatacaaccaaaaggcacggccaacaaccaggagaagcaataggaaaaagaaaataccaaaaaaacaagcgagggacggacggcaaagaagagtatgaacatacaggggaggacgcgaaagaatagagatggggaaggataaaaagtgcggcaggaggagcaggcaacaagccgcggggcagcgagaacaacagggagagtaagagaagcacgactgaagcagcagcagaagatccagaggcaggtatcgctgacaacgcaacacacagaatatcgctcgcggccgactgccactgtcgagcaagaaggagacatgaaagacagaaagagcgggaa

SEQ ID NO: 21158 - DNA, 634 bp, Homo sapiens
  misc_feature 551, 631, 632, 633, 634: n = A,T,C or G
acagtggcacacacctgtagtcccagctacttgggaggctgaggtgggaggaaggcttgagcccaggagtttgagtccaggctgggcatgatcgcgggacctcatctctaaaaaaataaaataaaataaaataaataaataaaacaagccttttaatagtctggatcatatagaagattaatattatgatggattgcacattaatgtctcaaaggacaccccccgccaaaatcaccctactaaaaatcacactgggtttctaatcttggggtttagaaattttcttcttatgctttaaaaactcattttacttcctttatcctctgattttttgggaagacagagggtgcttcttcttggactcttgagtcctggacactaaattcctccctcagttctagtgcccaggctaagcagagacactaaatcccttacttcctctcagtgttctctttcagctgcctcaatgcttcacctggctacattcatacttcattcagaagtctgaacagggccgggcatggtggctcatgcctgtagtcccagcactntgggaggctgaggcaggtggatcatttgaggtcaggagttcaagaccaggctggccaacatgtgaaaccccatctctacnnnn

SEQ ID NO: 21159 - DNA, 3122 bp, Homo sapiens; identical to SEQ ID NO: 21069
  misc_feature 1, 3113, 3114, 3115, 3116, 3117, 3118, 3119, 3120, 3121,3122: n = A,T,C or G

SEQ ID NO: 21160 - DNA, 531 bp, Homo sapiens
  misc_feature 1, 2, 3, 4, 5, 6, 7, 8, 9, 10, 11, 12, 13, 14, 15, 16, 17,18, 19, 20, 21, 22, 23, 24, 25, 26, 27, 28, 29, 30, 529,530, 531: n = A,T,C or G
nnnnnnnnnnnnnnnnnnnnnnnnnnnnnntttaactgacatttgtctaatttggattcaggaattctgtttcaatcacagcaattttacattctaaataatcccatatgtgcatcatcatatacagaacctcatacaaagtccattttccatatgtaatatttaatcagacacaatatcttcccatcttaggaggatatactttttggtctttttgtactttttttggtcttgatccatgtggcccattagactctacattaatttttattttccacttcttgaatatacaatgatatatcaaggtcgagtgttggagagtaattagtattgcttctaattctaagggatacagaggctgacagataccccccttctatatctgaagttcatagcggctttgtctatagcgtcttgctgctaatgttgcatagcaaatgtctaacaaaatatcccaaacttccaaacacactaggaaagattaaaggcctttgtaagtagagttgcattctgggtaatgagaaactgnnn

SEQ ID NO: 21161 - DNA, 1913 bp, Homo sapiens; identical to SEQ ID NO: 21117
  misc_feature 1, 2, 3: n = A,T,C or G

SEQ ID NO: 21162 - DNA, 2296 bp, Homo sapiens
cgtccgccccgcgtccgggcgcgggggcgcggcgtgcggcacgctgcagggctgaagcggcggcggcggtggggactgcacgtagcccggcgctcggcatggctctcctggtgctcggtctggtgagctgtaccttctttctggcagtgaatggtctgtattcctctagtgatgatgtgatcgaattaactccatcgaatttcaaccgagaagttattcagagtgatagtttgtggcttgtagaattctatgctccatggtgtggtcactgtcaaagattaacaccagaatggaagaaagcagcaactgcattaaaagatgttgtcaaagttggtgcagttgatgcagataagcatcattccctaggaggtcagtatggtgttcagggatttcctaccattaagatttttggatccaacaaaaacagaccagaagattaccaaggtggcagaactggtgaagccattgtagatgctgcgctgagtgctctgcgccagctcgtgaaggatcgcctcgggggacggagcggaggatacagttctggaaaacaaggcagaagtgatagttcaaagtaagacggatgtgattgagctgagagaccgacagctttgatacaactgtctggacagtgaagatgtttggatggttgagttctatgctccttggtgtggacactgcaaaaacctagagccagagtgggctgccgcagcttcagaagtaaaagagcagacgaaaggaaaagtgaaactggcagctgtggatgctacagtcaatcaggttctggcctcccgatacgggattagaggatttcctacaatcaagatatttcagaaaggcgagtctcctgtggattatgacggtgggcggacaagatccgacatcgtgtcccgggcccttgatttgttttctgataacgccccacctcctgagctgcttgagattatcaacgaggacattgccaagaggacgtgtgaggagcaccagctctgtgttgtggctgtgctgccccatatccttgatactggagctgcaggcagaaattcttatctggaagttcttctgaagttggcagacaaatacaaaaagaaaatgtgggggtggctgtggacagaagctggagcccagtctgaacttgagaccgcgttggggattggagggtttgggtaccccgccatggccgccatcaatgcacgcaagatgaaatttgctctgctaaaaggctccttcagtgagcaaggcatcaacgagtttctcagggagctctcttttgggcgtggctccacggcacctgtaggaggcggggctttccctaccatcgttgagagagagccttgggacggcagggatggcgagcttcccgtggaggatgacattgacctcagtgatgtggagcttgatgacttagggaaagatgagttgtgagagccacaacagaggcttcagaccattttcttttcttgggagccagtggatttttccagcagtgaagggacattctctacactcagatgactctaccagtggccttttaaccaagaagtagtacttgattggtcatttgaaaacactgcaacagtgaacttttgcatctcaagaaaacattgaaaaattctatgaattgttgtagccggtgaattgagtcgtattctgtcacataatattttgaagaaaacttggctgtcgaaacatttttctctctgactgctgcttgaatgttcttggaggctgtttcttatgtatgggttttttttaatgtgatcccttcatttgaatattaatggctttttccattaaagaataaaatattttggacaatgccgataaatgtatgaagttagtatccacatcataaattcagagtgatgtttagcagtaaatcaatattttgaagtgatacacagatgtctttcctccccacaaacttttttaaacaaaaaacaagacctcttttctttagatggtgccacctatggcccaccacaacagagattttacatggaaaccgggctcagtgagaactgatttcctggccaatatttgtcttgtggctgcctctagtgactaatattataaggaatctagctgggttataccagttcaaggtttctatgttgttaatgacctcaaaatagcggtaaagaatgaataagcaggggtccaatgggacaggtgttcggttatgttacatcgaaatggttggttgtgacatcaaggaggaggttttgtgtaaaaatatgtggaaaaaaaaaaagtgggggggaataaaaggggggagaagatgagatggtaaagggaa

SEQ ID NO: 21163 - DNA, 309 bp, Homo sapiens
ctcccgcggtggcggccgaggtactccaggaggcccgtgtatttaatgaaactcccatcaaccctcggaaatgtgcccacatcctcaccaagattctttatctcataaaccagggggagcacctggggaccacggaagcgaccgaggccttctttgccatgaccaagctctttcagtccaatgatcccacactccgtcggatgtgctacttgaccatcaaggagatgtcttgcattgcagaggatgtcatcattgtcaccagcagcctaacaaaaggcatgactgggaaagaagacaactaccggggcc

SEQ ID NO: 21164 - DNA, 587 bp, Homo sapiens
  misc_feature 1, 581, 582, 583, 584, 585, 586, 587: n = A,T,C or G
ngaagaatcaacagactctatatttgatcacaaagcaaaagtttaagtgtattacttaaaattttaagacaaaatctggaataattataactaacacaaattttgaggtagaggaagagaattctagagataggtgagataaaattttcatctttgataatgagtagacaaaaacactacctttaacaagtgaagaatttaaaaaatttagagaagaggaaatcataagtggtttttaaaatttattatacatatcgaggtaaagataatccaacagaaaatgagatttgaacagacacttcacaggagatagacaaatgtctcaacctcattagtcaccagacaaatgcaaattaaactcaaaatgcaatacctgtacacacctcacagaatggataaaacttgaaagactgacaaaccaaaccaacacaaagctggtctgaatgtggagcaaggaagacgctcgtactctcctggtgagcaaggtggagatggtaaaagagctggtgtaaccactttggaaaactgttagtatctattaaagtcaacccgcgttaattaattctagaagtactctcgannnnnnn

SEQ ID NO: 21165 - DNA, 650 bp, Homo sapiens
aggaaggcacctacaaaacgaaagtgcctagggcttacaaaagtcatatgtagcctttacaaatattagctcagtcattttcagaaaggtttttccaattatcattttagagatgaggaaactgaagctcagggaggctaggaaacttatccaaagcctcttaagaggctatgttagtcagactgggctaacagctgtaacaaccccagaatttaaatggcttaacacattaggagtttatttgttattgccataacaattcagggtgtatgtttggcaggtagtctacacagtgattcagggacccaggctccttccctctggtggctttttctccctctagtgctgggagctctccatgcagatggtggatggagaaagagaacaaaaagtgggggatttttataggccaggcctggaattggcccacatcacttccacacacattccactggccagaatgcagtcacgtgatcgtagctaactgcaaggaaggttggaaaatgtaatgtaactgcatgcctgggctaaagagaggaacacggatcctggggagtactcacagtgttagattccagtccaggtcttctgcacacaatgcccgcgttaattaattctagaagtactaaaagggggggcccggtacccag

SEQ ID NO: 21166 - DNA, 771 bp, Homo sapiens
  misc_feature 1, 2, 3, 754, 770, 771: n = A,T,C or G
nnnctggaaattaacccccactaaagggaccaaaagctgaagctccccccgggtggcggccgctctagactaggtggatcccccgggctgcagtaattcggcacgaggcgctaggacctggagggctagtcggcgggctgcgcgtccggccgctagctgagctggaggccaccggccagagccgaccccaggagtgagagagacaggggcgtgcgtgagttccggcggcctgcaccgggcaaaccccgtaccttcccagcatcggctcagcaacccacgtgcatccaggccggtcaatgtcattgagtcacctccgcgccttggccaccctggagtcccgagaatccgaagttccagacaaatgcccaaactacattcctgcatgttcgaaagcgtaaattgcaaagcacaaatccagttgtagattgtggccgggagcagtggctcacgcctataatcccagcactttgggaggccgaggcggacagatcacgaggtcagcacttcgagaccagcatggccaacatggtgaagccccatctctactaaaaatacaaacattagccaggcatggtggtaggcccctgtaatcccagctactcggtaggctgaggcaggagaatcacttgaacccgggaggcagaggtttcagtgagctgagactgcaccattgcactccagcctgggcgacagaccaagactccatctcaactggaacctcgtacactatgctgagtccttccagtggatacanagccacgatgctcacnn

SEQ ID NO: 21167 - DNA, 618 bp, Homo sapiens
  misc_feature 1, 2, 3, 4, 5, 6, 7, 8, 9, 10, 11, 12, 13, 14, 15, 16, 17,18, 19, 614, 615, 616, 617, 618: n = A,T,C or G
nnnnnnnnnnnnnnnnnnncgaatgtccttctagaattaattaacgcgggggaaaaaaaaaaagaaaagaaagcgccttcaaggccatctgtttctctgctactaccctttttggaaagacaaatctccttcccctccctgtcctccttccttctacattcccctagggctgtgtacctctctctcagcgtgccctgcctcggtgcctctgtggcagggccaggtctgacttcccagatgagcttgctctcctaagctgcatcattgcatgactctcctctttcctaacctccctcactcctccagctcccttctgctggtgaatgacatctcttcacgccacacagtcacaggacggctgctccaccaccggcatcacatctcctttccaggcaggaagaagaggaaggaggaagagacaggacaaaggtggtctttcttccagtaaagctttgactttttatctagaaaacattatctctgagcttttcacctacatttccttggccagacctgggtcacgtggtcacctctaattgagaagatgagtatttcagagggacacatttttgttccctcccaaatcagggctgtgttaggaagaaagcgggaannnnn

SEQ ID NO: 21168 - DNA, 567 bp, Homo sapiens
  misc_feature 562, 563, 564, 565, 566, 567: n = A,T,C or G
agcgacggggtctccctatgttgcccaaactggtcttgaactcctgggctcaagcgatcctcccatgttggtctcccaaaatgctgggattacaggcgtgagccaccatgcccagccagatgtaacaatttttaaagtcagtccgtagggttgaatttacctgtcatttctaatttgtcgacattaaaaacatcctaaatgtgtttcttggcacacttgcctgatcgtttccataaggtcagttcctaaaaatggaatcattgtgccagggtttgtacatttaaaatattgatccattttgccagactgccatccagcagggctctagcaatttacacatttaaggaggcacttaccctcatatgcccactttgtacttacatggccctgagagtgacagcctccttaaattttgcatccttccttctccccatcttactccaagccctgctaaggagatggcaaagtttcatgtccactgggctttggatttatttctttgtaaagggcctattctttttttccccatcccgccttaattaattctagaagtactctcgannnnnn

SEQ ID NO: 21169 - DNA, 565 bp, Homo sapiens
  misc_feature 563, 564, 565: n = A,T,C or G
aggtggagtcttgctctgtcaccaggctggagtgcagtggtgcaatcttggctcactgcaaccttcccctcctggctgagttaacttaggagagcttcctggagagggcagcctttgaagataggaaggatttcatgaagtctttactaggccactagagtagaagcagtgggagacttcctggagaagagctcatggaaagaaaaacctaccgctggccctttgggaactgctttgggcctctttagtcctaggctcacacgccccttagaaacaaagtaagaataaagccagggataatacagtgagtggccaagaacacagactctggagccagactacctgggtttgaatcccagttaccagccatgtgactttgatcaagttgcttaacctttgtgtgcttcagtttcctcatctgtaaaataaggggatggtaattgtgacttcccagaactatggtggagagcaaatgggttaagagtgtgccgctgtaaactgtagagtgctgggctttcattgggaagtattacctttcattgctgcaattgagactggttgcnnn

SEQ ID NO: 21170 - DNA, 587 bp, Homo sapiens; identical to SEQ ID NO: 21164
  misc_feature 1, 581, 582, 583, 584, 585, 586, 587: n = A,T,C or G

SEQ ID NO: 21171 - DNA, 771 bp, Homo sapiens; identical to SEQ ID NO: 21166
  misc_feature 1, 2, 3, 754, 770, 771: n = A,T,C or G

SEQ ID NO: 21172 - DNA, 523 bp, Homo sapiens
  misc_feature 1, 2, 3, 490, 522, 523: n = A,T,C or G
nnnaaagggaacaaagctggtaccgggcccccctcgagagtactttagaattaattaaggcgggctcccagggatcgcaggtggccgaatactgcagctggcttttgaaggcatcgatgcacactttgagggcctgccttggctcctgcaccccaccacagttcgtgtttcctccctttattctctccacccagaaaggtgacaaatccaagccctggatgtgaggggggtccacaagagtaattctggagagatggggtcaggtgaggaatggttagagacccagggagccaagtcacgggacctcagtgaccccatggctgacctaccgagacctccagtcgccagcatcgggtaggcccacacgtgtgggggaggaagtgagtgtcactggcccatcaccaagcacagctggcagaggtacctgtgcaggcgagtccaatgcccagctctataataaacacgccttgcggtgctggaagagactcanagtccatccaagacagattctgtcttcccacnn

SEQ ID NO: 21173 - DNA, 371 bp, Homo sapiens
  misc_feature 371: n = A,T,C or G
attaattaacgcggggaggattgagaaaagccaagtcctcggcaaatacaacttaacatagagaagaaaccaataaatacacacacaaaagtcagatattaagcccactgcacattcactgccaagaatgctcaggccctgggtctagtaaccaaaacatggcactcactgtgggcctttcactctgtgggtacagccccagctctgccatttccaggatcatgctattaccagtgactatctcctaaagggattgtggggaaagccaaaatacaaaaaaaagggcaatagagttccaagtctgttgctttattcagcacataaagaaacagcaatattgaaatagctcttcccaaagaaagactatgaan

SEQ ID NO: 21174 - DNA, 313 bp, Homo sapiens
  misc_feature 1, 311, 312, 313: n = A,T,C or G
nctggttaccgccccccagagtacttctagaattaattaacgcgggggaaaactgtcttacttaaacaaaatgtattttaggaaaatgcctgtttcaagggtttattactgttttataactaagagacttgggactttagtatacgaaaaggtgtcatttcaaatgggggaaaatgaattattcaacaaatgatcttgggacaactggatagccattcagaaaaaaagtgaagctggaacactataacatgctttaccccacaataaatcagagttaaatgtaatatagaaaaaaataacacacgctcaannn

SEQ ID NO: 21175 - DNA, 371 bp, Homo sapiens; identical to SEQ ID NO: 21173
  misc_feature 371: n = A,T,C or G

SEQ ID NO: 21176 - DNA, 569 bp, Homo sapiens
  misc_feature 563, 564, 565, 566, 567, 568, 569: n = A,T,C or G
acttgaattgttgttatagtgcttccgttatttatttttattttttttattatactttaagttttagggtacatgtgcacaacgtgcaggtttgctacatatgtatacatgtgccatgttggtgtgctgcactcattaactcgtcatttatattaggtatatatacgtgttcattgtacccttatcgactttgcagcatgcttatccatctaactattcatctttatttgccttcgttttttgagttcccttattcatcctaaaacaaaatataatgcctgactcatagtcagacttcacagtatttttaaatgaattacattgcattggggaaatataaatagtaatgtccttttatagaggaagtctaaaagaaattcttgggtgaattgataatcaaacatttttaagaaggtatatttgctagcaaagaaagaaaaaatatgacagcttatttatatagaaaacctatgtattctgtgatttttctttgtttcaagtctgtatatgaatatcatgctatcccttcccccgccttaattaattctagaagtactctcgannnnnnn

SEQ ID NO: 21177 - DNA, 313 bp, Homo sapiens; identical to SEQ ID NO: 21174
  misc_feature 1, 311, 312, 313: n = A,T,C or G

SEQ ID NO: 21178 - DNA, 313 bp, Homo sapiens; identical to SEQ ID NO: 21174
  misc_feature 1, 311, 312, 313: n = A,T,C or G

SEQ ID NO: 21179 - DNA, 815 bp, Homo sapiens
  misc_feature 1, 2, 3, 798, 799, 800, 801, 802, 803, 804, 805, 806, 807,808, 809, 810, 811, 812, 813, 814, 815: n = A,T,C or G
nnnccacccttaagatccttgccacccattattttgtttcagaacgcttaatccatcaaggaaggttaaattggattaccccagtagggaagggacgggggctgtaagcatgagggattatccctgtaaagggctcgtggtgtgtgtgtgtgtgcgtcctgctagtgttgaatgacggagacctgagtttggattctgaatccaggtgtattcgatgccgctccggcgtagaacgggttaaagatgcccccagccaggtagagccagactgggagttgtgcaaggtctcaaccccctaaaagcggcccctcaaattgaagatgagtaaatcatagttcgtaaatcagaaagattatccagtactacgttactctgtttatttccctttcgtcatccctgagtcttgggtcaagtccatcccagctctgtcctccaggaatcaagggaaatacgcaaacccgcggtgggttcgcagccgcaggaaggacaaatcttgcccccgccgcggcggccgccccgcgttagctgcctaagagaatctccgtggccggccagtacccgccttggtgaggattctccctcccgcgagaacttctggaatgccgccgggccagattttgcagctgaggcctccgacgccactaatattgggccaagcagggagtgctgctcttccttataaggttttagcgaaagttaagtaagccaattaaagtgcaaaacacacagtctggaacaatacagcgctctataaatggtctccattattatcattatccgttagttataactggggannnnnnnnnnnnnnnnnn

SEQ ID NO: 21180 - DNA, 869 bp, Homo sapiens
  misc_feature 1, 2, 3, 820, 821, 822, 846, 867, 868, 869: n = A,T,C or G
nnnagtacttctagaattaattaattggctaattgtttatttgttacttgtcatgagttacagaaatccaagtatgtttctcaattcaataaaattccaagtagaatttcttaccgaactttagcctttctactagaagggaaattggagagaatccaaattcaatatttttatgaactcaaagatgtgaatctacattataataaatcatatataagaacaatattatatggttaaatgtcttttttattttttattttaaaaaggaaaaccaaaaaggtgtgacatttcagtgggtaccttcatatatcactggtggcaacaaacactaggacattatggagtgaaatgtgacagcctacaaaacactctgagagggctttacttccttttactcaatactttcataagaaatgcagtgcaaagtaataaccactgagatacaccattattcataataatgatgaattggaaaaaatccaaatatataaaaatgggttaggtaaattatggtattatcaatataataggatactatgtggtcacaaaaaatcaggctatggaaaagtatttaatggcctttgagaaagtttatgtgaaactttgagaaagataaaagactggaatgcttatgccacaaaatattaagagtggtcacctctcagtttcactatgagcacaatttaaatgtttttcttgaaattttctgcattttctaaggtctctagaatgcaactatgtcactgctataatcagcaaaccaataaattctactgaaatagagcctttgggtattataggttgaagatctttttaaaannnaaaccccacacgaagcggccgccnccgcggtggggctttaattcnnn

SEQ ID NO: 21181 - DNA, 587 bp, Homo sapiens; identical to SEQ ID NO: 21164
  misc_feature 1, 581, 582, 583, 584, 585, 586, 587: n = A,T,C or G

SEQ ID NO: 21182 - DNA, 569 bp, Homo sapiens; identical to SEQ ID NO: 21176
  misc_feature 563, 564, 565, 566, 567, 568, 569: n = A,T,C or G

SEQ ID NO: 21183 - DNA, 869 bp, Homo sapiens; identical to SEQ ID NO: 21180
  misc_feature 1, 2, 3, 820, 821, 822, 846, 867, 868, 869: n = A,T,C or G

SEQ ID NO: 21184 - DNA, 545 bp, Homo sapiens
  misc_feature 1, 2, 37, 542, 543, 544, 545: n = A,T,C or G
nncgaattgaaagccccaccgcggtggcggccgcttnttggtgggttttttttttaaaaaaagaccagagaggccccaaactagcagcctgtcctcctcagtagccccagcatcccttcatcattttgttgcccttctatgggcctagtttaggtctgagaggcatagttttaaaatttttattgttatttatttattctagagataaggtcttgctatgtttcccaggctggtcttgaactcctggcctcaagcaatcctcctgcagcagcctcccaaagtgctgggattacaggcatgagccaccacgtctggtcagacaggcatagttttacaaatatgtgggtggataaatgctgtccagtcttacttcatcacttctatcaattgaatgcttttggttggaaataacagaaaatccaactaaaagtgacttaaacaaaggaaatgttattatctcatgtaccaggaattctggaggtagactggttcaagggtggattaattaattctagaagtactctcgagggggggcccggtannnn

SEQ ID NO: 21185 - DNA, 488 bp, Homo sapiens
  misc_feature 1, 2, 3, 4, 5, 6: n = A,T,C or G
nnnnnncgagagtacttctagaattaattaacgcgggttatctaaaattagatacttaatgtatctttcagaaaatcagataaaatgccctttggatggacccctgtctaaatgggcacagtaagaaatgttatattcaacttgtaaaagatttggttttattaaaattcatatttgaactccccaataaaccaataatttatattctatattttgttacaagttataatggttccagctgggcgtgatggctcacgcctgtaatcccagcactttgggaggccgaggcgggcgtcacctgaagtcagtgagaccctgtctctactaaaaatacaaaaattagctagggcgtggtggcaggtgcctgtaatcccagctactcgggaggttgaggagaagaattgcttgaaccagggaggcagaggttgcggtgagccaagaccacgccattgcactccagcctgggcaacaagagtgaaaatccgtct

SEQ ID NO: 21186 - DNA, 313 bp, Homo sapiens; identical to SEQ ID NO: 21174
  misc_feature 1, 311, 312, 313: n = A,T,C or G

SEQ ID NO: 21187 - DNA, 499 bp, Homo sapiens
  misc_feature 1, 2, 3, 8, 12, 13, 15, 24, 25, 28, 31, 497, 498, 499: n = A,T,C or G
nnnggaancccnntngcattgaannccnttngtatcgggcagcgcgccattgtgttggtacccgggaaggcgccccctcgagagtacttctagaattaattaacgcggggggacgaagcgcagcctgcactcccagatccgctcattttcgttctgccctccgttttacgattcgcctacactgaaaatgcgtgagtggagtggaaagccttcctactcctgcctcagcgaccccttttaaaatactgcctcgtttggcctgaaaatgtgatttgcaggcttcctgagcaaagtagatttcactccattaaagaaaaaaaaaagaaaaggcaccgaacggggctcggctgtcgggagttttgactctagactcgagcaagcttatgcatgcggccgcaattcgagctcacttggccaattcgccctatagtgagtcgtattacaattcactggccgtcgttttacaacgtcgtgactgggccctggcgttacccacnnn

SEQ ID NO: 21188 - DNA, 520 bp, Homo sapiens
  misc_feature 1, 2, 3, 519, 520: n = A,T,C or G
nnngagacagggttttgacatgttggtcaggctggtcatgaactcctggcctcaagtgatccacctacctcggcctcccaaagtgctgggattacaggtgtgagccaccgcgcccaaccctgtgtttattcttaggtctgtactacgctttatgcctcagtttccacagttaaaacacgttattttattcctcacgttataggagcaatttgtattcataaacttggccttcaccttcaacttctgaagattttaatacagcgcaaatgatttggggtctgtgaattcagttttatttatttggctccttcctttaaggagtcaggctaatgcaagaaaatccaataattagatcttttggatttcaaataactggaagaggaagtggtgtttatctaatggtttaggcataatgcgtgttttttcccgtaggcctgtgtgtatatgtgtgtgtgtggttgctcttaacttgaagaattaaacacttgttttccccgttattaattctagaagtactcnn

SEQ ID NO: 21189 - DNA, 313 bp, Homo sapiens; identical to SEQ ID NO: 21174
  misc_feature 1, 311, 312, 313: n = A,T,C or G

SEQ ID NO: 21190 - DNA, 575 bp, Homo sapiens
  misc_feature 1, 2, 575: n = A,T,C or G
nnagagacaaacatgggccacatttttaagacaaacatggaccacaaccatgctgagagaacttagagtgaagtttacatggctatctttcttagtattagaaattttacctgataaacatcaaacatacgaccaacatagcatataaagcagctctacagatattttcctactgcccaaaatatcatataatgcacatgtaggtcacatgtgagtaggcaagagattctggaacacagaagcaagacaacaggatcacagcaatttcagtatgctctgcttgttataggaaatccccagaacattctccaattactgaacaaaaaaagcaataaaactcagatttgtctgcctggggagaaataaacagaaatagaaagtgaatagcaaaacaaagctatctggtgaaaagacattcttacttggaaggagttaagattttgccccttccatgggtgtacttagtgaggcaagcgtcaagcggcctgacagcccgtggcacactgtctacagctgatgtcaatggtacacatatagccagtgtgaagcaacttaaaataggccctccttgagcn

SEQ ID NO: 21191 - DNA, 565 bp, Homo sapiens; identical to SEQ ID NO: 21169
  misc_feature 563, 564, 565: n = A,T,C or G

SEQ ID NO: 21192 - DNA, 520 bp, Homo sapiens; identical to SEQ ID NO: 21188
  misc_feature 1, 2, 3, 519, 520: n = A,T,C or G

SEQ ID NO: 21193 - DNA, 313 bp, Homo sapiens; identical to SEQ ID NO: 21174
  misc_feature 1, 311, 312, 313: n = A,T,C or G

SEQ ID NO: 21194 - DNA, 545 bp, Homo sapiens; identical to SEQ ID NO: 21184
  misc_feature 1, 2, 37, 542, 543, 544, 545: n = A,T,C or G

SEQ ID NO: 21195 - DNA, 869 bp, Homo sapiens; identical to SEQ ID NO: 21180
  misc_feature 1, 2, 3, 820, 821, 822, 846, 867, 868, 869: n = A,T,C or G

SEQ ID NO: 21196 - DNA, 313 bp, Homo sapiens; identical to SEQ ID NO: 21174
  misc_feature 1, 311, 312, 313: n = A,T,C or G

SEQ ID NO: 21197 - DNA, 610 bp, Homo sapiens
  misc_feature 1, 2, 609, 610: n = A,T,C or G
nnccgctcacctccaccactgcccaggggacgctggcctggcttctctggccttctcttcctccctcaggcagtcctactcccctctgcagggtgactgctgtgcccccgcccagctcttccccagcactcacctggctggaccaggtctcagctcagtggccgcctcccctgggaccacccagccttccctcttcccagcactcacccctgctgactgtgctcagctggtgcatccctcgtccgtctccctgccaggccttgggctctgcagaggtgcccactgaaagcttgtcctgtgccctctacacctcagaggggttcagagccaagctccaggacccctgctgtcaaaaagtgttccctgggaacaagtgcagggaacagtcctgcaagcaagggactgcttgccctgctttcggacagccttctgagagccagtgaaggccagcagctgggctgaacactacatcatcctcagaaccaccctgcacagccggtgtgctccccgccatcgacaggaaaaacgggcccttagaggcacaggcaacttgctcggggttaggtgcagcgggtggcagagtcagaatgtgaggacagttgggccacnn

SEQ ID NO: 21198 - DNA, 2505 bp, Homo sapiens
  misc_feature 1, 2, 3, 4, 5, 2505: n = A,T,C or G
nnnnngcagggaaagcaaggcctaataatcatttatttttcatagaagatgagcacaacaggacaaaataaaaacaggaattgtgtaactggtcatcggaataaaagttttgtgctgctcagggattacacagtgttaaaaatattcaagaatgctgcagacaaaattgtatacgaatcactatgtatccttcctgattcatgacattaaaaaaaaaaagcttaaagaagtgtttgatgtttcaaaggtaatgatttcattacaatctactcataagattaaaccacaaaaactatatttaaatggcattaagggtctgaagtctatcttctggagaattaccaggtattacatcattctgtaatatagtgtgagtctgtggtatttgggtatcagtccattttacttaaaattacaaacatgtttttacactcatgtgcagggagcagttttttttatcatttggccacttagtattttaagtggtcaaagtctacaaagtatgccaaagaatatttcatctgtgaacctcaatatgcatagatttttttcctgatttagaaaagatcaaaggtgctaaaccttagtaaaactgtacatttatccctatgcaattttgtcatttaaattaaatggaaaaaaaactagttccaaagactgaatatgagtcccaatattatttatttgctgcagccccagcacaattttaagggcacattgaaacccctgaaaatagaggtttataatagaaatactgataaacctttaactactagaggaaggcattaacagattccaataaactacagtaacacgtaatgaatgaatatatagatgattctgtctttgttatctttgtcaaatccatgccatcttaaaccctaaccagtataaattatactttttctggctgtttttaaaatttttatctattattttaaaaattattttctctattttaatcaaacacttgaagtttttagaaaaagatacctatgttacattgcagcttcactttatgcaggctcatcattccattaaacaatatttgaagactcgaatcaatcaaatacagtctgtgatgcatgcattgtacctaaatttcctctaaccactctcagaaactgaaacaatgtctttgctcttaaaagagaagagacttcagatgtaatcaagaaaacattgtgtaacttgcctctaagctcttcagagccaattttactatggcaggatattccttcctgataaggtgattaatgaagtttttggtgctcacttttctctcatagtctataagctcagtataccaaaaaaaaaaaaaaattagataaaataaaacaaaacccccaataggtcttgaaaataatataaatattttgtggagtcccagtcacataatactccactcccaaacccagagaaaatgatcaaggtcttgtgagtctttctgagtccttcaaaagggatttgatttccataagccatgaattccatccgtttcagcacagagtatagaagagatgcttagaacaacagaaggaagagacatgcggggaagataattagtggtaaacagagaataaattctctctcagtagtgtgtacttgacgttaatgccgatgataattcatctgatctacagaatattcactttaatagagagatgagagtctgaaatgaccagaggaaaatagatactgaagccaatatagtcttgataccaaaataaaattaaaatgagaaactaacatgataggttcaaggccttttgggagcctgttttctttgccagatttcacattcttacagcttcatggtctttttcttctaacaaattaatcagctgagagaagctgtctttcagtgcatccatgtcatccagtgagcagggctgtagaatccagcgttttccacgtgcaagtggttcaagttcaaaatattttttgatctcttgtactgagcgagctgctggcttgtcttgatgattggccaatattaaaaagggtaaagtgcataactgtggatgctgaagagctgagtgcagctcatttctagcagcttctaaatcatcctctgaagaggcactgtctaatacaaatattaccccttgagatccttggtagtagcggctccagtatttccggatgttatcagcccctccaagttcttttacattcaagatggcattctggaatggcactgctttaatactaaaacctgtggtcgacacgacgttatcggggctttcactgcagagtttggacaacagactggttttgccagaacctgtgaggcctatgcaaaccaggtcatattctggtcgtgcaggtggtggtcccttgcagcaaagtgctctaaaacacagataatccatgtacagaaacgcctcagttatccggagatcagacatccggcagcctaaagcatccggaacggctccgaacccggaaaaaaaaagcagcgtctctggctgcgagcgagcagctcctgaaaaagccagcaan

SEQ ID NO: 21199 - DNA, 2505 bp, Homo sapiens; identical to SEQ ID NO: 21198
  misc_feature 1, 2, 3, 4, 5, 2505: n = A,T,C or G

SEQ ID NO: 21200 - DNA, 569 bp, Homo sapiens; identical to SEQ ID NO: 21176
  misc_feature 563, 564, 565, 566, 567, 568, 569: n = A,T,C or G

SEQ ID NO: 21201 - DNA, 467 bp, Homo sapiens
  misc_feature 1, 2, 3, 4, 5, 6, 7, 8, 9, 10, 11, 12: n = A,T,C or G
nnnnnnnnnnnncgttatgtacttctagaaataattaaatgaaatcatattgggcattcatatgtgctaaacaccattctaagtgctgaggcactatgatgaatatgacagacagatacctgttcccagagagtttataatgttgaggtaaagagccacataaaagacaattgtgttatcacttatgaagggctttgggatcaatgaggagggatgcctaacacagacaaaaattcaaagaagcctgcatagaagaggtatcatttaggttgaaatgtgagagaaaaacagcattgtagggagaattccgggcattgtagggagaattctgggcaatgggaacagcatgtgcagagacctagaggcatgagggagggcaagtatgtttgaagatggcagatagttctggagggcagctagtgggggaggaagtgagaaaaggaatgattgtggagaagtagtcaagg

SEQ ID NO: 21202 - DNA, 618 bp, Homo sapiens; identical to SEQ ID NO: 21167
  misc_feature 1, 2, 3, 4, 5, 6, 7, 8, 9, 10, 11, 12, 13, 14, 15, 16, 17,18, 19, 614, 615, 616, 617, 618: n = A,T,C or G

SEQ ID NO: 21203 - DNA, 569 bp, Homo sapiens; identical to SEQ ID NO: 21176
  misc_feature 563, 564, 565, 566, 567, 568, 569: n = A,T,C or G

SEQ ID NO: 21204 - DNA, 420 bp, Homo sapiens
  misc_feature 420: n = A,T,C or G
attaattaacgcgggatcctcccaccacacacacagcagcaggcggtgaggacaggcctcatgcagggagacagggagcggccagacagcctggcactcctctgactgctcagggctgggccctgggaacgggcctcccgcctccatgaggctggggtcctcaccccagcatcttgaggatcgcttctgccaagcaaaccccacacaagctttgcctcctccggaaatgtccctgaagcacacatggagtcagggagagggccagagccaaatccctcacaatgaccaaccaccagggaggaggctccgccagcccaacagcaagactccgcccaggcagcagggacacagtaagcgtttcaggaaggaagcaaggagcaagtcctgtatggctctgctcaccaacacgagatgtcctgn

SEQ ID NO: 21205 - DNA, 869 bp, Homo sapiens; identical to SEQ ID NO: 21180
  misc_feature 1, 2, 3, 820, 821, 822, 846, 867, 868, 869: n = A,T,C or G

SEQ ID NO: 21206 - DNA, 618 bp, Homo sapiens; identical to SEQ ID NO: 21167
  misc_feature 1, 2, 3, 4, 5, 6, 7, 8, 9, 10, 11, 12, 13, 14, 15, 16, 17,18, 19, 614, 615, 616, 617, 618: n = A,T,C or G

SEQ ID NO: 21207 - DNA, 467 bp, Homo sapiens; identical to SEQ ID NO: 21201
  misc_feature 1, 2, 3, 4, 5, 6, 7, 8, 9, 10, 11, 12: n = A,T,C or G

SEQ ID NO: 21208 - DNA, 545 bp, Homo sapiens; identical to SEQ ID NO: 21184
  misc_feature 1, 2, 37, 542, 543, 544, 545: n = A,T,C or G

SEQ ID NO: 21209 - DNA, 557 bp, Homo sapiens
  misc_feature 556, 557: n = A,T,C or G
aaatatgcccacccatttcaggttgagccacggataaggagggcttagctcatgtctcctgtgggaattgaggcatctcaggaaacagtatagagttggtacagttagaatgagaagaagcctggggaaagaaaccaagagtgagaaatgcgtggctattttgacttagctggagcaaccctctcataacaggctgggaagtggacccgcgttaattaacgcgggggaaattgatgaacaaacaaaggtcatagtaaaagacagacttttggggataaaaacagaaactccaagtactgtatcaacaaatgcaagtacaccacaatcagtgagcagtgtggttcattatctggcaatggcactctttcaaatagagcagggcattgagcggcgttttctgaaagctccacttgatgccagtgacagtgggcgttcttataaaacagttttggaccgttggagagagtctctcctttcttctgctagtctatcccaagtttttcttcacctatccaccttggatcgtagcgtgatatggtctaaatctatactgaann

SEQ ID NO: 21210 - DNA, 650 bp, Homo sapiens; identical to SEQ ID NO: 21165

SEQ ID NO: 21211 - DNA, 390 bp, Homo sapiens
attaattaaggcgggcgcctgtaatctcagctactttggaggccgaggcaggagaattgctagaacccaggaggcagaggttgcagtgagctgagatcgcgccactgcactccagcctgggagacagaatgagactccatctccaaaaaaaaaagaaagaaagaaagaaagaaagaaagaaggctctattttgatactgggagcctaaactgaatgattctggagaaattcacagatggggctgaggctcaccttcatgacagctgtatcaaaggcctaaatttctaaggctcagaaatcactacaataagcctatcaacagcatgtgatactctccaagcattttgcaaccttaacatttccatcctttacagtactttgatatcctca

SEQ ID NO: 21212 - DNA, 313 bp, Homo sapiens; identical to SEQ ID NO: 21174
  misc_feature 1, 311, 312, 313: n = A,T,C or G

SEQ ID NO: 21213 - DNA, 2505 bp, Homo sapiens; identical to SEQ ID NO: 21198
  misc_feature 1, 2, 3, 4, 5, 2505: n = A,T,C or G

SEQ ID NO: 21214 - DNA, 618 bp, Homo sapiens; identical to SEQ ID NO: 21167
  misc_feature 1, 2, 3, 4, 5, 6, 7, 8, 9, 10, 11, 12, 13, 14, 15, 16, 17,18, 19, 614, 615, 616, 617, 618: n = A,T,C or G

SEQ ID NO: 21215 - DNA, 313 bp, Homo sapiens; identical to SEQ ID NO: 21174
  misc_feature 1, 311, 312, 313: n = A,T,C or G

SEQ ID NO: 21216 - DNA, 618 bp, Homo sapiens; identical to SEQ ID NO: 21167
  misc_feature 1, 2, 3, 4, 5, 6, 7, 8, 9, 10, 11, 12, 13, 14, 15, 16, 17,18, 19, 614, 615, 616, 617, 618: n = A,T,C or G

SEQ ID NO: 21217 - DNA, 618 bp, Homo sapiens; identical to SEQ ID NO: 21167
  misc_feature 1, 2, 3, 4, 5, 6, 7, 8, 9, 10, 11, 12, 13, 14, 15, 16, 17,18, 19, 614, 615, 616, 617, 618: n = A,T,C or G

SEQ ID NO: 21218 - DNA, 618 bp, Homo sapiens; identical to SEQ ID NO: 21167
  misc_feature 1, 2, 3, 4, 5, 6, 7, 8, 9, 10, 11, 12, 13, 14, 15, 16, 17,18, 19, 614, 615, 616, 617, 618: n = A,T,C or G

SEQ ID NO: 21219 - DNA, 618 bp, Homo sapiens; identical to SEQ ID NO: 21167
  misc_feature 1, 2, 3, 4, 5, 6, 7, 8, 9, 10, 11, 12, 13, 14, 15, 16, 17,18, 19, 614, 615, 616, 617, 618: n = A,T,C or G

SEQ ID NO: 21220 - DNA, 420 bp, Homo sapiens; identical to SEQ ID NO: 21204
  misc_feature 420: n = A,T,C or G

SEQ ID NO: 21221 - DNA, 618 bp, Homo sapiens; identical to SEQ ID NO: 21167
  misc_feature 1, 2, 3, 4, 5, 6, 7, 8, 9, 10, 11, 12, 13, 14, 15, 16, 17,18, 19, 614, 615, 616, 617, 618: n = A,T,C or G

SEQ ID NO: 21222 - DNA, 650 bp, Homo sapiens; identical to SEQ ID NO: 21165

SEQ ID NO: 21223 - DNA, 618 bp, Homo sapiens; identical to SEQ ID NO: 21167
  misc_feature 1, 2, 3, 4, 5, 6, 7, 8, 9, 10, 11, 12, 13, 14, 15, 16, 17,18, 19, 614, 615, 616, 617, 618: n = A,T,C or G

SEQ ID NO: 21224 - DNA, 771 bp, Homo sapiens; identical to SEQ ID NO: 21166
  misc_feature 1, 2, 3, 754, 770, 771: n = A,T,C or G

SEQ ID NO: 21225 - DNA, 313 bp, Homo sapiens; identical to SEQ ID NO: 21174
  misc_feature 1, 311, 312, 313: n = A,T,C or G

SEQ ID NO: 21226 - DNA, 587 bp, Homo sapiens; identical to SEQ ID NO: 21164
  misc_feature 1, 581, 582, 583, 584, 585, 586, 587: n = A,T,C or G

SEQ ID NO: 21227 - DNA, 618 bp, Homo sapiens; identical to SEQ ID NO: 21167
  misc_feature 1, 2, 3, 4, 5, 6, 7, 8, 9, 10, 11, 12, 13, 14, 15, 16, 17,18, 19, 614, 615, 616, 617, 618: n = A,T,C or G

SEQ ID NO: 21228 - DNA, 650 bp, Homo sapiens; identical to SEQ ID NO: 21165

SEQ ID NO: 21229 - DNA, 610 bp, Homo sapiens; identical to SEQ ID NO: 21197
  misc_feature 1, 2, 609, 610: n = A,T,C or G

SEQ ID NO: 21230 - DNA, 869 bp, Homo sapiens; identical to SEQ ID NO: 21180
  misc_feature 1, 2, 3, 820, 821, 822, 846, 867, 868, 869: n = A,T,C or G

SEQ ID NO: 21231 - DNA, 545 bp, Homo sapiens; identical to SEQ ID NO: 21184
  misc_feature 1, 2, 37, 542, 543, 544, 545: n = A,T,C or G

SEQ ID NO: 21232 - DNA, 618 bp, Homo sapiens; identical to SEQ ID NO: 21167
  misc_feature 1, 2, 3, 4, 5, 6, 7, 8, 9, 10, 11, 12, 13, 14, 15, 16, 17,18, 19, 614, 615, 616, 617, 618: n = A,T,C or G

SEQ ID NO: 21233 - DNA, 587 bp, Homo sapiens; identical to SEQ ID NO: 21164
  misc_feature 1, 581, 582, 583, 584, 585, 586, 587: n = A,T,C or G

SEQ ID NO: 21234 - DNA, 771 bp, Homo sapiens; identical to SEQ ID NO: 21166
  misc_feature 1, 2, 3, 754, 770, 771: n = A,T,C or G

SEQ ID NO: 21235 - DNA, 313 bp, Homo sapiens; identical to SEQ ID NO: 21174
  misc_feature 1, 311, 312, 313: n = A,T,C or G

SEQ ID NO: 21236 - DNA, 544 bp, Homo sapiens
  misc_feature 1, 2, 3, 4, 5, 6, 7, 8, 9, 10, 11, 12, 13, 535, 536, 537,538, 539, 540, 541, 542, 543, 544: n = A,T,C or G
nnnnnnnnnnnnncggggtacttctagaattaattaacgcggggaaagcggtggacactgcagagtgggcatccagccactgctacttccatgctgggatgagcagccagtgtagaataaaccctgtgtgcagtgaaacagtcagtgtgcagtatcctatggtgcatctaaacgtatgtacttgctgcaaatgcacatctacaaggacactcacgactattttcattcttgataccaccttcttatgacttgacaaagaaaattcaagcttttggctgagggtagtggctcgcacctgtaatcccagcactttgagaggccgaggtgggtgggtcacttgaggtcaggagttcgagaccagcctgaccaatattgtgaaatcctgtctttactaaaaatataaaaaatagcccggcacggtggcaggccctgtaatcccagctacttgggaggccgaggcggggaggcggaggctacagtgagctgagactgtgccactgcactccagcctgggggacagagcaagacacagtcnnnnnnnnnn

SEQ ID NO: 21237 - DNA, 313 bp, Homo sapiens; identical to SEQ ID NO: 21174
  misc_feature 1, 311, 312, 313: n = A,T,C or G

SEQ ID NO: 21238 - DNA, 360 bp, Homo sapiens
  misc_feature 360: n = A,T,C or G
attaattaacgcgggggccactgccagaaccaaagtgacggtgccgacacccctccgcaagcgcaaggccgacttccataagtaattagccagagcaccgtcccgttcctgtcagcaccgagccccagccaggacaccggtattcccagcaccatacaagaactactttttcgatgaggcaacccaaaagctgcgagcggttcccggtgaggccgcccactcacctggccggcgcagacaagactccgtgcgtcaagacataacagcgcttctcagaactttgcttctccagcagaataatcctgcggaagactgagcagttcttgtgagggtgaaaccatggcccatgcattggtgacn

SEQ ID NO: 21239 - DNA, 386 bp, Homo sapiens
  misc_feature 1, 383, 384, 385, 386: n = A,T,C or G
nagtacttctagaattatattaacgcgggtttgcctggagggagctgccaccctcagctgcagccccagacctcgcggttgctctcatccgtcgttcccagtgtgggcagtgacgcagcaccacggtaagttctgtagagtggacgccactcgctggcaaagcccagcagggcaaggaataagtgtcactcagtctttatccagaaaaatccaccaatgtacttttagtgcagtattaacagatggtagaaaatggaattgcctagagggattttaatctcttgagggattattctggtacctgtacctgtctgatggtcgtgtaagtccatgttaacaaacctgggaccacaggaaaggagaactgatgcgaatacaaacannnn

SEQ ID NO: 21240 - DNA, 587 bp, Homo sapiens; identical to SEQ ID NO: 21164
  misc_feature 1, 581, 582, 583, 584, 585, 586, 587: n = A,T,C or G

SEQ ID NO: 21241 - DNA, 2608 bp, Homo sapiens
  misc_feature 1, 2, 3, 4, 5, 6, 7, 8, 9, 10, 11, 12, 13, 14, 15, 16, 17,18, 19, 20, 21, 22, 2607, 2608: n = A,T,C or G
nnnnnnnnnnnnnnnnnnnnnnactattatttgtgagtttgtcctttccacttttagtcttctctgtttgttttttttttttaatttttactcgtttctttattaatatagaaaaggagcccagggcagctggaccagtagtacaaagcaccaggagttaataccattctggtgaaggggatggttttacaaaagtgaaggagcaggcaggagccaccaggttctgaggccaggcccagcctactgcccagaacccctgaaacggctccctgggaaaaagctgacagatgggtcaggggtggattgagctggaaaccatggggacagatggcagggatagagggtcatgcagtgggaaccacccagtggctgataaggacagggaacttgtggctggaggctccccattgggccatgggcaggggcttgcagatggcctcagctctgggggcaggtagagaaactgcagagactgatgggcatggagaacccagacatggccctggggctgaagggcctttccaccctctcttcaccaggagccacctttgctctatactacatatggggcttcagggcccaaggcacaggggaggctcagaggcctccagttgggaggaagatggggcaaggaaggaagcacttgagtgtccctagcttaggcagccggggatgagacacaggcaggacaacagcacccccgcatagtggggctagaatgtgggacagggacgggcttatcctcggccagtgactaggaccagccccatggcaatggtgcctgtctccagccttagcaaatcaagtgtgcaacaagcacagggtgtcggcagacctgggctctagccttacaagctctgccagaacttgaatcacacagagctgtatcaccatggtccagccatgtcctgccttggcctgtttcctcctctgtcaatgagggctttgaataagacctcctaggtcatgaaaaggactctgcaggtgaagggaactccaggacctgctcttggcagttaagcagaccctggatggaactggtatgggatggggtgaagtgggggatggaggaggaaggtgttcttgcatggaacctatccccacaaacactacagagtgaggaaaggccactggaagcccttctttgcccagaggaagaaaggccacagagagagtgaatgtggcttggtgcaatcccttcacatcctccaccatctgggtaacacttggcaaggagtggatgggtggcattgtgcaaccctttatgttcttccctgggggtggcactcaaggcctcttgtggcttctgccttcagccttcagtgtagggtcaagagtgttcttttcactgtcgtcctgttctgggaacagcacaagactctgcctggctggcacatgttagttggtgaggaaaggacagagtgggtgagtaagcagacagggaggtaagagtgactctctggctttctcctcttcctcttcagagagcagctcaatcaactgagtcgcagatctcctccaccacagcattgaagatgtgtggctggtcagcatagacatggtgggaggcacccttaatctccatgtctcggacataggaatccggccgctgcatcttcaccttttttcccgtactggtatctatccaggtgtcggacccgtagatcatagtgataggcacatcttttcgaatcaagtgaattcgctccagcatagggcgccgggcccagccaaaggactccatcatggctttgaatgctgtctcaccactgggattctgtgcgttgcagtggtaaatatactctgatatggtatcatcttcaaagaagtctgcaaacttgcgtttgaagtccggccggaatcgctgcaccagaccaggcccccagggcccagctactcgaagaacagccaatggattggaacgtcctaggacagatgccacggctttgacccaggctgggggtgcacggatctcactggggttagttggtcggaggggaaagccccatgggtccaccaggatgaggtgtttaactctatcagggtacttgattgagtaagaagtggccaggaatcctcccaaactgtgccccaggaggatcatgctggggatccccatggtctcccgccatgtctctatcgatgtcacaaactcatcctcagccccctccgggtcccttgggaatgctggccttgagcttcgcccgaagccaagcagatcgaaggtgtgcagtgtgcggcgggcactcagtgagtccatgttgaggatccagagacccacgccgcccccaaaaccatgcaccatcaccaagggggtgcggtcgttttgctcggggctcacagtcaccgtccagatcttattctggtttgggagggatacatatctggccaggaacttattctggagacactggaggatcctggcttccacattcttcagctgagacatggaagtggggcgccacgtgggcagccagctactcagccagccttgagactgctgctccagatcatcggccatagtaaacaagccttgccaggtcctggcgagcccgcccagcgcctgacgccagcaccagctgacccgtagtcgacgcggccgcgaann

SEQ ID NO: 21242 - DNA, 520 bp, Homo sapiens; identical to SEQ ID NO: 21188
  misc_feature 1, 2, 3, 519, 520: n = A,T,C or G

SEQ ID NO: 21243 - DNA, 587 bp, Homo sapiens; identical to SEQ ID NO: 21164
  misc_feature 1, 581, 582, 583, 584, 585, 586, 587: n = A,T,C or G

SEQ ID NO: 21244 - DNA, 390 bp, Homo sapiens; identical to SEQ ID NO: 21211

SEQ ID NO: 21245 - DNA, 557 bp, Homo sapiens
  misc_feature 1, 2, 3, 4, 5, 6: n = A,T,C or G
nnnnnncgagagtacttctagaattaattaacgcgggatatagttcttctcattctttgttctcttcctttatatcaacagcctttttctgacatgatataaaatcatgtgcttatgacatgcattaaaaaggagaagtgctggatctaatatccttggtctaatggatccccttgcagatatacagggctccctacacacactgggatatctaggtacaagcccaaagttcatatacagactttctaaaatcattgtatttaaaagcagaaaagtgccgggcacagtggctcacatctgtaatcccaatactttgggaggctgaggtgggcgaatcacctgaggtcgcgagctcaagaccagcctggccaacatggtgaaaccccgtctctactaaaaatatgaaaaacagccaggcatggtggcaggtgcctgtaatcccagctactcaggaggccgaggcaggagaatcacttgaacccgggaggtggaggttgcagtgagccgcgattgtgccattgtactccagcctgggtgacaagagcaaaactctgtct

SEQ ID NO: 21246 - DNA, 313 bp, Homo sapiens; identical to SEQ ID NO: 21174
  misc_feature 1, 311, 312, 313: n = A,T,C or G

SEQ ID NO: 21247 - DNA, 618 bp, Homo sapiens; identical to SEQ ID NO: 21167
  misc_feature 1, 2, 3, 4, 5, 6, 7, 8, 9, 10, 11, 12, 13, 14, 15, 16, 17,18, 19, 614, 615, 616, 617, 618: n = A,T,C or G

SEQ ID NO: 21248 - DNA, 434 bp, Homo sapiens
agtacttctagaattaattaacgcgggactgctaacaattagtccatcactatcccctcaagtcaaaataatgcccatcagacctcaggggcggggtgactacccaagatagccatctgaacgtgacacacggacccaattttcctgtaacctcaaggtggtgtaaaaggggcaaccatctggtcatttcttcgagttttttttatattttgtataactcctgtgcacataataaaatatgtaagcctatttttctgctaatgtgtgtactatcagtttgttttatggactcacccctaaggagaaaaatgtaaatttacctacatgtgaaatttagtttggagcttggctgccgtggacctagctaaaactgggtggcctgggctctcccttcccagataaaacttctttttttttttctttctgaagatggt

SEQ ID NO: 21249 - DNA, 467 bp, Homo sapiens; identical to SEQ ID NO: 21201
  misc_feature 1, 2, 3, 4, 5, 6, 7, 8, 9, 10, 11, 12: n = A,T,C or G

SEQ ID NO: 21250 - DNA, 1866 bp, Homo sapiens
  misc_feature 1, 2, 168, 1861, 1862, 1863, 1864, 1865, 1866: n = A,T,C or G
nnacgcgtccggaattatccatttttaatatttaatatatctcctatctgataacttaattcttctaaattaccacttgccattaagctatttcataataaattctgtacagtttcccccaaaaaaagagatttatttatgaaatatttaaagattctaatgtggggntttttaataaaaggatggtttaatgtgggtaagggggatttttttttggagatgggcaccggataattctcgacccacgcgtccgtgaaatccctgttttgaaataagtaaacagcctaaaatgtgttgaaattattttgtaaatccatgacttaaaacaagatacatacatagtataacacacctcacagtgttaagatttatattgtgaaatgagacaccctaccttcaattgttcatcagtgggtaaaacaaattctgatgtacattcaggacaaatgattagccctaaatgaaactgtaataatttcagtggaaactcaatctgtttttacctttaaacagtgaattttacatgaatgaatgggttcttcactttttttttagtatgagaaaattatacagtgcttaattttcagagattctttccatatgttactaaaaaatgttttgttcagcctaacatactgagttttttttaactttctaaattattgaatttccatcatgcattcatccaaaattaaggcagactgtttggattcttccagtggccagatgagctaaattaaatcacaaaagcagatgcttttgtatgatctccaaattgccaactttaaggaaatattctcttgaaattgtctttaaagatcttttgcagctttgcagatacccagactgagctggaactggaatttgtcttcctattgactctacttctttaaaagcggctgcccattacattcctcagctgtccttgcagttaggtgtacatgtgactgagtgttggccagtgagatgaagtctcctcaaaggaaggcagcatgtgtcctttttcatcccttcatcttgctgctgggattgtggatataacaggagccctggcagctgtctccagaggatcaaagccacacccaaagagtaaggcagattagagaccagaaagaccttgactacttccctacttccactgctttttcctgcatttaagccattgtaaatctgggtgtgttacatgaagtgaaaattaattctttctgcccttcagttctttatcctgataccatttaacactgtctgaattaactagactgcaataattctttcttttgaaagcttttaaaggataatgtgcaattcacattaaaattgattttccattgtcaattagttatactcattttcctgccttgatctttcattagatattttgtatctgcttggaatatattatcttctttttaactgtgtaattggtaattactaaaactctgtaatctccaaaatattgctatcaaattacacaccatgttttctatcattctcatagatctgccttataaacatttaaataaaaagtactatttaatgatttaacttctgttttgaaatgttgtatacacgtggatttttttctcattaaataaaaaaaaaaaaaaaaaagcaaaaaaaaaacaagacacaaatcaacacgacccgaagcgaaaccagacacacccaacaaaggaaacaaacacaaaacggccagaaaaagaacagcaaataacgcagcagggatacaaaaaaaccaagcacagaaagcgagcagaccagaaacacgtggataagcagcaaccgtacccgccgaaagcggccgaagaccgacaacctacccgcgagaacgagcagaaaacgcagaaccgacacgaccacnnnnnn

SEQ ID NO: 21251 - DNA, 313 bp, Homo sapiens; identical to SEQ ID NO: 21174
  misc_feature 1, 311, 312, 313: n = A,T,C or G

SEQ ID NO: 21252 - DNA, 650 bp, Homo sapiens; identical to SEQ ID NO: 21165

SEQ ID NO: 21253 - DNA, 618 bp, Homo sapiens; identical to SEQ ID NO: 21167
  misc_feature 1, 2, 3, 4, 5, 6, 7, 8, 9, 10, 11, 12, 13, 14, 15, 16, 17,18, 19, 614, 615, 616, 617, 618: n = A,T,C or G

SEQ ID NO: 21254 - DNA, 527 bp, Homo sapiens
  misc_feature 1, 2, 3, 521, 522, 523, 524, 525, 526, 527: n = A,T,C or G
nnngaagatggaatctcactctgtcacccaggctggagtgcagtggcatgatctcagctcactggaagctctgcctcccaggttcacaccattctcctgcctcagcctctcaagcagctgggactacaggcgccagccgccatgcctggctaattttttttggtattttttagtacagatggggtttcaccgtgttagccaggatggtctcgatctcctgacctcgtgatctgcccacttcagcctcccaaagtgctgggattacaggcatgagccaccatgcccggccgatttcacctttcaatggcaattactataagacaggaaagttatttatttttatatatttacctaattttaagttaccttatacaaccctcattaatagtctgttagaactagaatttaaactctatgtgaatatggaccttatttaaacaatgtatccctagcacctagacaatgcctaacctgtcacattaacttaatatatattatattcatattctcgggtaattgannnnnnn

SEQ ID NO: 21255 - DNA, 545 bp, Homo sapiens; identical to SEQ ID NO: 21184
  misc_feature 1, 2, 37, 542, 543, 544, 545: n = A,T,C or G

SEQ ID NO: 21256 - DNA, 492 bp, Homo sapiens
  misc_feature 492: n = A,T,C or G
attaattaacgcgggttctcatacaagaagtactcagatttttctctccatctctccacctgctttttgaatattggtgcatttttcagtaggctcttcccttcatggtccaagataaacgtcaacaattcccaaggttccatgcatcctcatcttcaccccacactttaaaactatcatttctagttcacccctgagatttgttctgattggactagcgttgatcaagtgtccaccccttgaacccatctctgtggccaggaaaaaggaacgataggctaggtcatatactccacccttggagcaggggcagagtcagcttctccagaaccagatggagccccgctcagaaatcacgggctattgggtcaagggaagaaaaaaataaatgctgcaagaggtaaccaataaaggtatgtgcttgatcatacgaggaacatttgaaggaatagtgtccttagcttaaagatgaatagacatgaagaggacaan

SEQ ID NO: 21257 - DNA, 650 bp, Homo sapiens; identical to SEQ ID NO: 21165

SEQ ID NO: 21258 - DNA, 313 bp, Homo sapiens; identical to SEQ ID NO: 21174
  misc_feature 1, 311, 312, 313: n = A,T,C or G

SEQ ID NO: 21259 - DNA, 313 bp, Homo sapiens; identical to SEQ ID NO: 21174
  misc_feature 1, 311, 312, 313: n = A,T,C or G

SEQ ID NO: 21260 - DNA, 569 bp, Homo sapiens; identical to SEQ ID NO: 21176
  misc_feature 563, 564, 565, 566, 567, 568, 569: n = A,T,C or G

SEQ ID NO: 21261 - DNA, 618 bp, Homo sapiens; identical to SEQ ID NO: 21167
  misc_feature 1, 2, 3, 4, 5, 6, 7, 8, 9, 10, 11, 12, 13, 14, 15, 16, 17,18, 19, 614, 615, 616, 617, 618: n = A,T,C or G

SEQ ID NO: 21262 - DNA, 434 bp, Homo sapiens; identical to SEQ ID NO: 21248

SEQ ID NO: 21263 - DNA, 467 bp, Homo sapiens; identical to SEQ ID NO: 21201
  misc_feature 1, 2, 3, 4, 5, 6, 7, 8, 9, 10, 11, 12: n = A,T,C or G

SEQ ID NO: 21264 - DNA, 618 bp, Homo sapiens; identical to SEQ ID NO: 21167
  misc_feature 1, 2, 3, 4, 5, 6, 7, 8, 9, 10, 11, 12, 13, 14, 15, 16, 17,18, 19, 614, 615, 616, 617, 618: n = A,T,C or G

SEQ ID NO: 21265 - DNA, 2591 bp, Homo sapiens
  misc_feature 1, 2, 3, 4, 5, 6, 7, 8, 9, 10, 11, 12, 13, 14, 15, 2589,2590, 2591: n = A,T,C or G
nnnnnnnnnnnnnnnaactcctagcggacacctcgtggagtccggccggaagagcaaccgagatgaaggtgaagatgctgagccggaatccggacaattatgtccgcgaaaccaagttggacttacagagaggttggtgatgacaaaactgtgaagcagtggaaaatggatgggccaggctatggagacgaggaagagccattacatacaatattaggaaagacagtgtatactgggattgatcatcactggaaagaagctgtttttgccacatgtggacagcaagtagacatttgggatgaacaaagaactaatcctatatgttcaatgacctggggatttgacagtataagtagtgttaaatttaacccaattgagacatttctcttgggaagttgtgcatctgacaggaatatagtactgtacgatatgaggcaagctactcctttgaaaaaggttatcttagatatgagaacaaatacaatctgttggaaccctatggaagctttcatttttacagcagcaaatgaagataataacttatatacttttgatatgcgtgcactggacactcctgtaatggtccatatggatcatgtatctgcagtgcttgatgtggattactctcccactgggaaggagtttgtgtctgctagtttcggtaaatctattcgaatctttcctgtagacaaaagtcgaagcagggaggtatatcatacaaagagaatgcaacatgttatctgtgtaaaatggacttctgacagcaaaaagtgctgagagatcccctcataatttccccaaagcgtaaccatgtgtgaataaattttgagctagtagggttgcagccacgagtaagtcttcccttgttattgtgtagccagaatgccgcaaaacttccatgcctaagcgaactgttgagagtacgtttcgatttctgactgtgttagcctggaagtgcttgtcccaaccttgtttctgagcatgaacgcccgcaagccaacatgttagttgaagcatcagggcgattagcagcatgatatcaaaacgctctgagctgctcgttcggctatggcgtaggcctagtccgtaggcaggacttttcaagtctcggaaggtttcttcaatctgcattcgcttcgaatagatattaacaagttgtttgggtgttcgaatttcaacaggtaagttagttgctagaacccatggctcctttgccgacgctgagtagattttaggtgacgggtggtgacaatgagtccgtgtcgagcgctgattttttcggcctttagagcgagatttatacaatagaatttggcatgagattggattgcttttagtcagcctcttatagcctaaagtctttgagtgactagatgacatatcatgtaagttgctgataggtttccagttttccgctcctaggtctgcatattgtacttttcctcttactcgacttaaccagtaccaacccagcttctcaacggatttataccatggcactttaaagccagcatcactgacaatgagcggtgtggtgttactcggtagaatgctcgcaaggtcggctagaaattggtcatgagctttctttgaacattgctctgaaagcgggaacgctttctcataaagagtaacagaacgaccgtgtagtgcgactgaagctcgcaataccataagtcgtttttgctcacgaatatcagaccagtcaacaagtacaatgggcatcgtattgcccgaacagataaagctagcatgccaacggtatacagcgagtcgctctttgtggaggtgacgattacctaacaatcggtcgattcgtttgatgttatgttttgttctcgctttggttggcaggttacggccaagttcggtaagagtgagagttttacagtcaagtaatgcgtggcaagccaacgttaagctgttgagtcgttttaagtgtaattcggggcagaattggtaaagagagtcgtgtaaaatatcgagttcgcacatcttgttgtctgattattgatttttcgcgaaaccatttgatcatatgacaagatgtgtatccaccttaacttaatgatttttaccaaaatcattaggggattcatcagtatattatgtgtggatctgatgaaatgaacattcgcctgtggaaagctaatgcttctgaaaaattgggtgtgcttacatcacgagaaaaagcagccaaggattataaccagaaattgaaggagaaatttcagcattatcctcatataaaacgtatagctcgtcatcgacatctaccaaaatctatctatagccagattcaggaacagcgcatcatgaaagaagctcgtcgacgaaaggaagtgaatcgtattaaacacagcaagcctggatctgtgccacttgtgtcagagaagaagaaacacgtagtggcagttgtaaaataattggtattcctaacaatcctgatgtataattatttgttacttttgatttgagaactctacaaataaaagtgctgggactagattaaaaaaaaaaaaaaaaaaaaaaaaaaaaaaaaaaaaaaaaaaaaaaaaaaagggcggccgctctagagtatccctcgannn

SEQ ID NO: 21266 - DNA, 523 bp, Homo sapiens; identical to SEQ ID NO: 21172
  misc_feature 1, 2, 3, 490, 522, 523: n = A,T,C or G

SEQ ID NO: 21267 - DNA, 492 bp, Homo sapiens; identical to SEQ ID NO: 21256
  misc_feature 492: n = A,T,C or G

SEQ ID NO: 21268 - DNA, 467 bp, Homo sapiens; identical to SEQ ID NO: 21201
  misc_feature 1, 2, 3, 4, 5, 6, 7, 8, 9, 10, 11, 12: n = A,T,C or G

SEQ ID NO: 21269 - DNA, 386 bp, Homo sapiens; identical to SEQ ID NO: 21239
  misc_feature 1, 383, 384, 385, 386: n = A,T,C or G

SEQ ID NO: 21270 - DNA, 520 bp, Homo sapiens; identical to SEQ ID NO: 21188
  misc_feature 1, 2, 3, 519, 520: n = A,T,C or G

SEQ ID NO: 21271 - DNA, 492 bp, Homo sapiens; identical to SEQ ID NO: 21256
  misc_feature 492: n = A,T,C or G

SEQ ID NO: 21272 - DNA, 650 bp, Homo sapiens; identical to SEQ ID NO: 21165

SEQ ID NO: 21273 - DNA, 523 bp, Homo sapiens; identical to SEQ ID NO: 21172
  misc_feature 1, 2, 3, 490, 522, 523: n = A,T,C or G

SEQ ID NO: 21274 - DNA, 650 bp, Homo sapiens; identical to SEQ ID NO: 21165

SEQ ID NO: 21275 - DNA, 569 bp, Homo sapiens; identical to SEQ ID NO: 21176
  misc_feature 563, 564, 565, 566, 567, 568, 569: n = A,T,C or G

SEQ ID NO: 21276 - DNA, 569 bp, Homo sapiens; identical to SEQ ID NO: 21176
  misc_feature 563, 564, 565, 566, 567, 568, 569: n = A,T,C or G

SEQ ID NO: 21277 - DNA, 492 bp, Homo sapiens; identical to SEQ ID NO: 21256
  misc_feature 492: n = A,T,C or G

SEQ ID NO: 21278 - DNA, 569 bp, Homo sapiens; identical to SEQ ID NO: 21176
  misc_feature 563, 564, 565, 566, 567, 568, 569: n = A,T,C or G

SEQ ID NO: 21279 - DNA, 557 bp, Homo sapiens; identical to SEQ ID NO: 21245
  misc_feature 1, 2, 3, 4, 5, 6: n = A,T,C or G

SEQ ID NO: 21280 - DNA, 545 bp, Homo sapiens; identical to SEQ ID NO: 21184
  misc_feature 1, 2, 37, 542, 543, 544, 545: n = A,T,C or G

SEQ ID NO: 21281 - DNA, 523 bp, Homo sapiens; identical to SEQ ID NO: 21172
  misc_feature 1, 2, 3, 490, 522, 523: n = A,T,C or G

SEQ ID NO: 21282 - DNA, 313 bp, Homo sapiens; identical to SEQ ID NO: 21174
  misc_feature 1, 311, 312, 313: n = A,T,C or G

SEQ ID NO: 21283 - DNA, 557 bp, Homo sapiens; identical to SEQ ID NO: 21245
  misc_feature 1, 2, 3, 4, 5, 6: n = A,T,C or G

SEQ ID NO: 21284 - DNA, 2376 bp, Homo sapiens
atagggagtcgacccacgcgtccggggagggcttcttgcaggctgctgggctggggctaagggctgctcagtttccttcagcggggcactgggaagcgccatggcactgcagggcatctcggtcatggagctgtccggcctggccccgggcccgttctgtgctatggtcctggctgacttcggggcgcgtgtggtacgcgtggaccggcccggctcccgctacgacgtgagccgcttgggccggggcaagcgctcgctagtgctggacctgaagcagccgcggggagccgccgtgctgcggcgtctgtgcaagcggtcggatgtgctgctggagcccttccgccgcggtgtcatggagaaactccagctgggcccagagattctgcagcgggaaaatccaaggcttatttatgccaggctgagtggatttggccagtcaggaagcttctgccggttagctggccacgatatcaactatttggctttgtcaggtgttctctcaaaaattggcagaagtggtgagaatccgtatgccccgctgaatctcctggctgactttgctggtggtggccttatgtgtgcactgggcattataatggctctttttgaccgcacacgcactgacaagggtcaggtcattgatgcaaatatggtggaaggaacagcatatttaagttcttttctgtggaaaactcagaaatcgagtctgtgggaagcacctcgaggacagaacatgttggatggtggagcacctttctatacgacttacaggacagcagatggggaattcatggctgttggagcaatagaaccccagttctacgagctgctgatcaaaggacttggactaaagtctgatgaacttcccaatcagatgagcatggatgattggccagaaatgaagaagaagtttgcagatgtatttgcaaagaagacgaaggcagagtggtgtcaaatctttgacggcacagatgcctgtgtgactccggttctgacttttgaggaggttgttcatcatgatcacaacaaggaacggggctcgtttatcaccagtgaggagcaggacgtgagcccccgccctgcacctctgctgttaaacaccccagccatcccttctttcaaaagggatcctttcataggagaacacactgaggagatacttgaagaatttggattcagccgcgaagagatttatcagcttaactcagataaaatcattgaaagtaataaggtaaaagctagtctctaacttccaggcccacggctcaagtgaatttgaatactgcatttacagtgtagagtaacacataacattgtatgcatggaaacatggaggaacagtattacagtgtcctaccactctaatcaagaaaagaattacagactctgattctacagtgatgattgaattctaaaaatggttatcattagggcttttgatttataaaactttgggtacttatactaaattatggtagttattctgccttccagtttgcttgatatatttgttgatattaagattcttgacttatattttgaatgggttctagtgaaaaaggaatgatatattcttgaagacatcgatatacatttatttacactcttgattctacaatgtagaaaatgaggaaatgccacaaattgtatggtgataaaagtcacgtgaaacagagtgattggttgcatccaggccttttgtcttggtgttcatgatctccctctaagcacattccaaactttagcaacagttatcacactttgtaatttgcaaagaaaagtttcacctgtattgaatcagaatgccttcaactgaaaaaaacatatccaaaataatgaggaaatgtgttggctcactacgtagagtccagagggacagtcagttttagggttgcctgtatccagtaactcagggcctgtttccccgtgggtctctgggctgtcagctttcctttctccatgtgtttgatttctcctcaggctggtagcaagttctggatcttatacccaacacacagcaacatccagaaataaagatctcaggaccccccagcaagtcgttttgtgtctccttggactgagttaagttacaagcctttcttatacctgtctttgacaaagaagacgggattgtctttacataaaaccagcctgctcctggagcttccctggactcaacttcctaaaggcatgtgaggaaggggtagattccacaatctaatccgggtgccatcagagtagagggagtagagaatggatgttgggtaggccatcaataaggtccattctgcgcagtatctcaactgccgttcaacaatcgcaagaggaaggtggagcaggtttcttcatcttacagttgagaaaacagagactcag

SEQ ID NO: 21285 - DNA, 1026 bp, Homo sapiens
  misc_feature 1, 2, 1025, 1026: n = A,T,C or G
nncgctctagagtatccccatgccaataagcctccacagagtgtgaggtacattactctgagactgagatcttataaaagccagccaaaaccatggcatttttgcgccttctgccacctccacaaaaaattatcatggatgttcatattgtgctttttcctaggagaaatttggggggtttaccatatgcagtggtacccagaaaaccaaaatgagcttaaacattttgaaagatgtcaacaaagttatgcccttggaaataagtttggtttatgtaagagcattgttcctttaatgtaaagacacaataagtttggctcgcattgtaaaagtttgaaatctcatttaggttttgttatccagagtagaagatatgcaggaaaagattctgatgcatttggtggatatgggagatcatgcctccatatcaagcgtgacaaaactcttactggagttaaataccatagatgtgttaaacccagcagccctaaatcacagctcaatgacctacaaaaaatttgtgcaggagggaaaccacatgaatgcagtgtgtgcgggagagccttctccaggaaagcacagcttattcaacatcagagaactgaaagaggagagaaaccccatggatgtggtgaatgtgggaaaacattcatgaggaagattcagctcactgagcattagagaactcacacaggagagtaagcacccatgaatgtagtgaatgtggaaaagccttctccagaaagtcacagctcatggtccatcagagaacccatacaggagagaaaccctacagatgcagcgaatgcggaagagccttcagccggaagtgccggctcaatagacatcagcgatcacatactgggagagaaactctatgggtgcagtgtgtgtgggaaagccttttctcagaaggcatacctcaccgctacaccagagacttcacacaggagataagccttataaatgcagtgattgtggaagaccttctatggttgtccattctatggtggtgcggatcctgnn

SEQ ID NO: 21286 - DNA, 1227 bp, Homo sapiens
  misc_feature 1, 2, 1227: n = A,T,C or G
nnccacgagaccagcagcatgcacggtggcacgggcactggtctaccaggactgtccctcaggagggggtcaaacttgaggtataaggactatccgccgcctccggaactaaacggggtgaggtcacattcggttatctctaacgttggaaaacgatggagctaacacccattatggagattaaccacttttcatcaggtttttaacttaagtcgtgaggaatacaacggtgaacacaagattcattttattttcatcaccatgggacgtatcctgttgttgagttctctgggtcagacctctgaagacttctcagatggatcctagtctctgggcttgccctgaaattactcgctgctcagggagagagttgaaatggttggcatcctcccactctgttgctccggctgtgtcccctcgctctgttgttccagctatgtcccctctgttgctccaactgcagctcattctgttagagttcctcattcagctggtcactgtggccagagggtgttggcctgctcccttcctcaagtattcttaaagccatggatttttgtggagcatttttcttcctggctctcccttgagttattttcctttcttcgctatcttgggactcttctttgtgcttgcggacatcggttgagagaaggacttcttcttccttgtctccttggtgttggctcgtggttgctcttcaacaactggactggaggctcttggttttctcttcatcttcaacaagtcagtctctctcaagggtctcacgttgcagcattcttaccagaggccattgggcctggagttccagttccagtgtctggagagtccacctcagctcagcaatctcatgccggttggcaattgtcagcagaagccgatgcctgcccatcagttctttactctgaggtgttagagtggaataaaaatataaatacgaacaacacacccacacaccacaccacacagacaagcaaaaaaaaaggggggggagacaaaaaaaccccaagagagggccacataccaagccacacaacctgcaaaaggagccactaggggggtaaataatccgaccgggcgactaaaaacggacagagagaccgagcgcggaacaggcagcccaccgcggggcatcgagacccccagaagaagcgggaacaatcggacgagcgaccaaccgcagtaaccctaccactcacacagaagcagcacacgactacgaan

SEQ ID NO: 21287 - DNA, 866 bp, Homo sapiens
  misc_feature 1, 2, 862, 863, 864, 865, 866: n = A,T,C or G
nnagctactatatatcgatggaaagttgtaccccaaggaatgttaaatagtcaaacttttgttggaaaggttattcagcttgtcagggatcagtttcctgattgctatattattcattatgttgatgacattttatgtgctgctgcaagcagggacagacggattgagtgttttgctaggctacaagaagtggtgggacttacaggtctcgctatagcaccagataaaatccatactacaccctatcattacctgggaatgagggtacaggagaaaacagtaaagcctcaaaaggaggaaattcgtaaagagtccttaaaaaccttaaatgatttccaaaaattattaggggacgttaattggataagacctactttaggaattcccacctaagcaatgtctaaactgtttgctttgctgagatgggatccaaattcatgtagcaaaagaactctgatgcctgctgcagctgaagagttacaaatgattgaggaaaaaattcaaagtgctcaagtccgtagaagagatcctagtgttccattacagctcttagtgttccctactctccattctcctataggagtgattgttcaaaatgttgacttagttaaattgtcctttttaacgcacagtacgactagaactttctcaatttatttagatcaaatagctattcttataggccaaataccactgagaatagtcagactcattggcaccgatcgagataaaaatgtagttcctttaaacaaagcacaggttcgacaagcctttattaattcgtcagaatggcagtcaaatctggctgattttgttggcagtatagatattcattaccctaaactaaaatgtttcagttccnnnnn

SEQ ID NO: 21288 - DNA, 929 bp, Homo sapiens; identical to SEQ ID NO: 20094
  misc_feature 1, 2, 3, 4, 5, 6, 7, 8, 9, 10, 11, 12, 13, 14, 15, 16, 17,18, 19, 20, 926, 927, 928, 929: n = A,T,C or G

SEQ ID NO: 21289 - DNA, 759 bp, Homo sapiens; identical to SEQ ID NO: 20638
  misc_feature 749, 750, 751, 752, 753, 754, 755, 756, 757, 758, 759: n = A,T,C or G

SEQ ID NO: 21290 - DNA, 905 bp, Homo sapiens
  misc_feature 1, 2, 3, 4, 5, 6, 7, 8, 9, 10, 11, 12, 13, 14, 15, 16, 17,18, 19, 20, 21, 855, 905: n = A,T,C or G
nnnnnnnnnnnnnnnnnnnnnatagtaaattattatatattatttatatttatatatttcttagaattggtattattaggagcgacccacgcgtccgggtagctgagcttcaggctgggacgtgcttcattaacaactataacgtcagcccagtggagttgccctttggtggatataagaagtcaggatttggcagagagaacggtcgtgtgacaatcgaatattattcacagctgaagactgtgtgtgtggagatgggtgatgtggaatctgctttttgaaaacctgcagtgaaacctattgacatggccacgctgtggaatgatgtgaattggccctgtttacagaggcagtacagatctcatcaggtatgagggcagtctctgacgcgaacgtctcttcctcgtggtttttattgtcagtattcacacgaagtttaagtctcctagtgggcacccagacgggattgacgatctcctggtaaaacacaagcataccctcttccccacgttataattgttccaggttcccaggtattggtttgggagtttttccatgacactggcttgccttcgtttagggagaattttttgcctgtataatggcatttagctgcagtcagagtattgtttttaggaacatttagaaagcttaaacaatgctaaatataattgggagtggggagtagttaaattatgcttttaaaccagccttgtcttcttttacagtaacttgaagaggtttagtaattttttcacgttttggaccgagaccgagtctggaaataaaccccatgttttccattatatgttgactgggagcactgtaaaagttatgtggaatattaatttcagnccccaatttgtgccagcaatctctgccccgaagattaaggggatgggcan

SEQ ID NO: 21291 - DNA, 625 bp, Homo sapiens; identical to SEQ ID NO: 20220
  misc_feature 1, 2, 625: n = A,T,C or G

SEQ ID NO: 21292 - DNA, 510 bp, Homo sapiens
  misc_feature 493, 508, 509, 510: n = A,T,C or G
ggcggccgcccgggcaggtaccacctgaagaccctcacactcaacttcaccatctccaatctccagtattcaccagatatgggcaagggctcagctacattcaactccaccgagggggtccttcagcacctgctcagacccttgttccagaagagcagcatgggccccttctacttgggttgccaactgatctccctcaggcctgagaaggatggggcagccactggtgtggacaccacctgcacctaccaccctgaccctgtgggccccgggctggacatacagcagctttactgggagctgagtcagctgacccatggtgtcacccaactgggcttctatgtcctggacagggatagcctcttcatcaatggctatgcaccccagaatttatcaatccggggcgagtacctgatcagtttccacattgtcaactggaacctcagtaatccagaccccacatcctcagagtacatcacctgctgagggacanccaggacaaggtcannn

SEQ ID NO: 21293 - DNA, 508 bp, Homo sapiens
  misc_feature 502, 503, 504, 505, 506, 507, 508: n = A,T,C or G
actctttctcttcatttctcagccggctgacacttacagaaaatagaaagaacgtgcgttgaaatattaggggcaggttcccccaatatctggcgcccaacgtggttttctttttcctaagtgcatgtgggaacccgattccctttggtaggtgcggagaaatgttcatcggtccagtccacagaaatgcttgttcggctccccgacgattggtgagttgtctgtgtattgtccggggtaactatgggtcacgcagagtctaaacattatgcttatctctgctatattaaattcctgttaaaatgggggagttcgggttcccatggaaaatatggtcaccctattcagggcagtggaagaacactgtccttggtttcctgaaaagggaacgttagatgtggaactatgggatcatgttggtgcaaaattccgagaactggtcccaacaggaaattatgttcctgtcactgtttggggtgattgggccttggtcatgcccacnnnnnnn

SEQ ID NO: 21294 - DNA, 1026 bp, Homo sapiens; identical to SEQ ID NO: 21285
  misc_feature 1, 2, 1025, 1026: n = A,T,C or G

SEQ ID NO: 21295 - DNA, 1026 bp, Homo sapiens; identical to SEQ ID NO: 21285
  misc_feature 1, 2, 1025, 1026: n = A,T,C or G

SEQ ID NO: 21296 - DNA, 1026 bp, Homo sapiens; identical to SEQ ID NO: 21285
  misc_feature 1, 2, 1025, 1026: n = A,T,C or G

SEQ ID NO: 21297 - DNA, 475 bp, Homo sapiens
attaattaaggcggggtcgaagaagagtggacttttttgcactactagttccttctccctgtagctgtagtcgtagcaagtaaaggggttgtactgatgctttttaaggcatattatcaacatacagccatgacttgtccagagaatctcacctgacaaaaactcagagaagaaagagaaagaagatgaaatggctggttttcagatgtgtattctcattttatggaagacatgttgccagagtaaagcacaatatattcatcttgaaatgtaatactgagaagatatggaagttatggaagttgtggccttcagaattgacacttacggagagactagaacagcgtgggtgagttgtgaggggcaggaagcatgtcttaatggacttaaccaattttcgtcaactattcacagtaaaatctttcaatgtacctgcccgggcggtcgctctagaaactagtggatcccccgggct

SEQ ID NO: 21298 - DNA, 794 bp, Homo sapiens
  misc_feature 784, 785, 786, 787, 788, 789, 790, 791, 792, 793, 794: n = A,T,C or G
caggagcttggttttcagagaggggcactgagaagctatggagtccacctctgaggcaagggcatctatggtcacaatgcccttggctttagacaactgtagtcgatagagaatgtctttggccttcaacaggatggtcgcaggaatgaagatgatccctgttcgcatgcagcccacagccaccagccaccactcaggaactcgaggcagcatcaaggccagatggtctccctgttgtaggccacaggtctgtgtgaagacgttggctacacggcgggttaggtctcccatctctctgaagctccactttacttcatccccttggccattcacccaccaaaaagctggatttggacctctcttgccctcctggtcaagaccatatattatgtgttattttctgcttcaaagaaaaagggcacttagtaaactaatccacagccatagtcacgttccaatgtgaacacagcttaaggactgagatcccattttaaaacatttatacagccaggcgcagtggctcatgcttgtaattccagtactttaggaggcggaggcaggttgatcatgaggtcaggagttcgagaccagcctgaccaacatggtgaaaccctgtctctactaaaaatttaaaaattagctgggcatggtggtgcatgcctgtaatctcagctattcaagaggctgaggtaggagaattgcttgaacccaagaggcagaggttgcagtgagccaagattgcaccattgcactccagcctggatgacacaatgagactccgtcnnnnnnnnnnn

SEQ ID NO: 21299 - DNA, 740 bp, Homo sapiens
  misc_feature 1: n = A,T,C or G
nagatcatcaggcattagattctcataaggagtgtgcagactcattcccgcgcgtacacagttcacagtagggtttgtgctccaatgagaatctaatgctgctgctgatctgacagtaggcagagctcaggcagtaatgcttgcttgtccactgttcatctcctcccgtacagctaagttcctaacaggtaccagtgtctgaagcctggggactggcggctgctggtcaaggccacattagtttattgttaagtgcaaggtttctggtaacagaaataaagaattcaattgattcatcatcaagaccaaatatatttactaaagatctaccttaaattcattttttagcaggtagtatggcattgtggttaagaatttacatttgtgaacatttaccagctgatgaccgaggtgagcttctgtttcctcctgcataaacttgagattataaaaatcccctagttggctgggcacagtggctcacacctgtaatcccagcactttgggaggccgaggcaggcatcacgaggtcaggagatcaagaccatcctggccaacagggtgaaaccccgtctctactaaagatacaaaaattagctgggcgtggtgttgcacacctgtaatcccagctactcaggaggctgaggcaggagaatcgcttgaaccagggagtcggacattgcagtgagcccagatcgtgccactgcactccagcctggcgacagagtgacactccatct

SEQ ID NO: 21300 - DNA, 2569 bp, Homo sapiens
  misc_feature 2557, 2558, 2559, 2560, 2561, 2562, 2563, 2564, 2565, 2566,2567, 2568, 2569: n = A,T,C or G
agggagtcgacccacgcgtccggagctgaatcaccagaatggggaacccacggaggtagaagatggcactgtggatggtgcagacagggatgaaaaggacttcaggaatcctggccaggaagtcaggaaactagacctgccagtgctgttcccaaacagacttggtaagactcccttggctctgatggtcaaaggatggcaaagtccactttagaggccattagcctagcagttgagtaggagctgtcactgatcctggcatcatcatcatcttgatgtgtgaccctatccaagttttggttttcatggagttaaaggttattccccttgcattttacagccctgattttgcatttgccaacctctttcaactaagttcatgtcatcttttcccatggagtttcactatgcattgtcagactgctggttaggcctccagaccaggtccatcttctccctttttctctagcatggccttgccctttccacagccctgagcctatgcctggcctgggtaccttagccccttgcctttccttccctgtttgaagcctgcccaagccccagggttgcccttttgttattctgctgcctagaagttagaacattcaagaattgagggtacacctataaacagactggcagatgatatagtgcttaatgtcttgcctcagtttgtcattgtgtcagaacatccgaaaaaagataggagaaaagttggagtttagggcataattttcctgtaataatttggagctcaaaaatattacaatgagaaaataaaaagctattaattagcaggagacttaatcacatgaagaatttcaattagatatttcttctacgtagtatagttataactttgcattccattgttttccttctctatagtccattgtatttctgtggggtttttttttttcaggttttgagttcaagaacgagattaaaaaagaaaatctaaaatgggatgattcagaggaagtagaaataaacaaggctttacagagaaagtccagaggagtttattggcactctgagctacaaaaaggcttggagagtgagccaacatcaagaaggcaatgtagaaattctccaggggagagtgaggagaaaaccccatcccaggagaagatgagtcaccagagtttttgtgccagggacaaagcctgtacacatatcctctgtgggaaaaactgctctcagagtgtgcactctccccacaagccagcgctcaaactggaaaaagtatctcaatgtcctgaatgtgggaaaacctttagccgaagttcttatcttgttcggcatcaaagaatccacacaggcgagaagcctcacaagtgcagtgagtgcgggaagggctttagtgagcgctccaacctcactgcccacctacgaactcacacaggggagaggccctatcagtgtgggcaatgtgggaaaagcttcaaccagagttccagcctcattgtccaccagaggacccataccggggaaaagccttaccagtgcattgtctgtggaaagagattcaacaacagttcccagttcagtgctcaccggcgcatccacactggggagagcccatacaagtgtgcagtgtgtgggaaaatcttcaacaatagctcccacttcagtgcccaccgaaaaacccacactggtgaaaagccttacaggtgttctcactgtgagagaggcttcactaagaactctgccctcacccgtcatcagacagtacacatgaaagcagtactctcatcacaggaaggaagagatgcgttatgagtgtgtcggtaaactgtcagattaagttcctcaggtcagcatgtatgagctttcttctgctgtggagagatctagccagtccctgactttgcaacagacctactgactactggatcttaagacccatgtctaggaccaggagtcagcataaggacgctgacctctcctggctgtgcctgtgactccagagtcctatcttactgtgacttaaagtttgatggagagaaagctgtaggatccataaattctaccaggaaaccagggtcttcctgttcctagcactgagaatgggcacccagtggtccaagaacactttctgggctaacatagtcctcacacagggctgagaaagaaagtgtctcctttcctggaaagcacatgtaaaagttaagggcctgaatctcttctaaaccaataattgacctctaggcacccaccataatactgctaccttcagggcagaagacactgctctttgtaacccagccaccaccaaaaagcaaacagaaagaaggaaggatggttaagccattggataatactgaatctgtttccctaagtgacttaaccttagagcaagcacaacatccaggttaattttttgtaagatttctccttttattattgccctcatcatagttcctgattgtctcttaaagtaagtggtttatagacattactatttctgataataatttacaaactactataaacaaatttataaacattactaatttctgatgaaaataaagttgtttctccctccacaaannnnnnnnnnnnn

SEQ ID NO: 21301 - DNA, 1026 bp, Homo sapiens; identical to SEQ ID NO: 21285
  misc_feature 1, 2, 1025, 1026: n = A,T,C or G

SEQ ID NO: 21302 - DNA, 620 bp, Homo sapiens; identical to SEQ ID NO: 20930

SEQ ID NO: 21303 - DNA, 5145 bp, Homo sapiens; identical to SEQ ID NO: 20824
  misc_feature 1, 5144, 5145: n = A,T,C or G

SEQ ID NO: 21304 - DNA, 1304 bp, Homo sapiens
  misc_feature 1, 2, 3, 4, 5, 6, 7, 8, 9, 10, 11, 12, 13, 14, 15, 1304: n = A,T,C or G
nnnnnnnnnnnnnnncataaccctagacacttgcatgatacgattcgactcgtacccagagctgtggagtgcaatgagtgggcggaacgggcatccagcaactgaggaagttcctggacaatcctggcattgcctgtggtctgtacaacaggcttgtagttctttgtgaaggatgcaggcaagagggatgtccagtttagacgggccctgacagcagcagcctcttccacatcaagtgaagtgtgattgttaacgatcattgcctgcacaaagtcatagttgcctttgaagtagtccacccaatacttcaccatgacatagcggggcaggattggggtgttcacattttgctgataagatggtgtgttaaaatctaaagcttgaagaactggataaattaaagcttgtagtttgagcttattttttaggctggcatcttgagtaaactgttgtccaagggcagcagccagatttccaccagcactgtcaccagaaatgcaaattctgcctggatcaaccatatacttctgtaagacttctggcttcaggaaatactttgtggcccgtacaacatcatgaatttgctcaggaaaataaacctttggaactagcctgtattcaatggaaacaatgacagcattcaattcctcagccattgctgtacacagctcatcataatacctgatttttgcacttgccaaggcccagcctcctccgtggatataaacgacgctgcgtttcagtggctcttcgggcttcggagggccttcaaacactctgacttccacaccatcaaagtctgtgtcggtcaccttcacttgggcagaagaccacgcgctttttttgccaaaagaaacaatgataaaattcagtgccagcaggtgatggctcagtcccaggtagtggatcaggttactcacttgctgtgcaccccggaaagtggcgtccagcagcatcagcttccaggggtcggacacggagccaggcagcgggatgtagacgtaataggcggccagcgccaccagggcggtgagcaggacacaggacgacctcatcttgccccggctcggctcgccagcgggctggcaaagaggaaagggcgataccacccggagacctccggcaactttctgcccgcggcagctgctcattcacgcgtttcttataagcccaggagccaatcagaggctgcgtcgggaggaagttggagcgcggacatgccccctgtgcggtgtccttgcaaagtgtggcagtcactacaggtttgaggaaggctctgtcgccggacgcgtgggtcgactccn

SEQ ID NO: 21305 - DNA, 425 bp, Homo sapiens
  misc_feature 425: n = A,T,C or G
ccgcccgggcaggtacgctgattgggctgtttcctaccttacccaaccgggtttaagcgtcttacaattctaagaattaagtgcagttcaatctcagtttggttatccagaaaatcagtgctgtggataaagatgagccatccaatggacaccagttttacttcagcttaacaacggatgcaacaaataaccacaacttttcattgaaagataacaaagacaacacagcctcaatactgaccaggagaaacggcttccggagacaggaacaatcagtttactatctgccaattttcattgtggacagtggatctccctcacttagcagcaccagcaccctcaccatccgcgtgtgtgactgtgatgctgacggcgtagcccagacctgcaatgcagaggcctatgtcctacctgctggcctcagn

SEQ ID NO: 21306 - DNA, 3440 bp, Homo sapiens
  misc_feature 1, 2, 3438, 3439, 3440: n = A,T,C or G
nnacctgggagcggcgctggcggctgccggggcggccccgaggtgccgcagactcctgggcccggcggggaccggaggccgcgccatgagccccgcagccgggcgcacccctgcgccgcgcgcgggcccaggcgagcggcctctgcgagccccgggtcccgccctggggccggcgatgtgccaccgaggctgaggatgatggtagattgccagagctccacgcaggagatcggtgaggagctgatcaacggagtcatctactccatctccctgcgcaaggtgcagctgcaccacggaggcaacaaggggcagcgctggctcgggtatgagaatgagtcggccctgaacctttatgagacttgcaaggtgcggaccgtgaaggctggcacgctggagaagctggtggagcacctggtgccagccttccagggcagcgacctctcctacgtcaccatcttcctgtgtacctatagagccttcaccaccacccaacaggtcctggacctgctgttcaaaaggtacggtagatgtgacgccctcacggcctcctctagatacggctgcatcctcccctattccgacgaggatggtggaccccaggaccaacttaaaaatgccatctcctccatcctgggcacctggctggaccagtactcggaggatttctgtcaacctccggactttccctgcctcaagcagctggtggcctacgtgcagctcaacatgccaggctcagacctggagcgccgtgcccaccttctcctggcccagctggagcactcggaacccattgaggcagagcctgaggctctgtcaccagtgccagctctaaaaccaactccagagctcgagctagctctaacaccagctcgagcacccagcccagtgccggctccagccccggagccagagccagctccaacaccagctccaggttcagagctagaagtagctccagcaccagctccggagctccagcaggctccagagccagctgtgggactagaatcggctccagcgccagctctggaactagagccagctccagaacaggatccagctccctcacaaactctagagctggagccagctccagcgccagttccatcattacagccttcctggccttcacctgtggttgcagagaacgggctgagtgaggagaagcctcacctcttggtgttccctccagatctggtggcagagcagtttacactgatggatgcggaactgttcaagaaggtggtgccctaccactgcctgggctccatctggtcccagcgggacaagaagggcaaggagcacctggcgcccaccatccgcgccactgtcacccagttcaacagtgtggccaactgtgtcatcaccacctgcctcgggaaccgaagcacgaaagccccagacagggccagggtggtggagcactggatcgaggtggccagggagtgccggatcctcaagaacttctcgtcactgtatgccatcctctctgccctgcagagcaactccatccaccgtctgaagaagacgtgggaagacgtttccagggacagtttccggatctttcagaagctgtcagagatcttctcagatgagaacaactactcattgagccgggagctgctcatcaaggagggcacctccaagtttgccaccctggagatgaaccccaagagagcccagaaacggccgaaggagacgggcatcatccagggcaccgttccctacctgggcacgttcctcaccgacctggtgatgctggacactgccatgaaggactatctgtatggcagactcatcaactttgagaagaggaggaaggagttcgaggtgatcgcccagatcaagctgctgcagtcggcctgcaacaactacagcatcgcgccagatgagcaatttggggcctggttccgggccgtggagcggctcagcgagactgagagctacaacctgtcgtgcgagctggagcccccatccgagtcagccagcaacaccctcaggaccaagaagaacacagccattgtcaagcgctggagcgaccgccaggcccccagcactgagctcagtaccagtggcagctcccactccaagtcctgtgaccagctcaggtgtggcccctacctcagcagcggggacatcgctgacgcgctcagcgtgcactcggccggctcctctagctccgacgtggaggagatcaacatcagcttcgtcccggagtctcctgatggccaggaaaagaagttctgggaatcagcctcacagtcatccccggagacctccggcatcagctcagcctccagcagcacctcgtcctcctcagcctccaccacgcccgtggctgccacacgcacccacaagcgctctgtctcagggctctgcaactccagctccgcgctgccgctctacaaccagcaggtgggcgactgctgtatcatccgcgtcagcctggacgtggacaatggcaacatgtacaagagcatcctggtgaccagccaagataaggctccggctgtaatccgcaaggccatggacaaacacaacctggaggaggaggagccggaggactatgagctgctgcagattctctcagatgaccggaagctgaagatccctgaaaacgccaacgtcttctatgccatgaactctaccgccaactatgactttgtcctgaagaagcggaccttcaccaagggagtgaaggtcaagcacggagccagctccaccctccctcgcatgaagcagaaaggactcaagattgccaagggcatcttctgagggcatcctcccagggtctggctggctggtagccaagcacttatggaccagagtggcccaggccagctgggcgccttcctcccacctgccagcccagggtaccccagactccagtttcatcctgaacctctcccgctgctgggattgacgcctgccattggtcaggctgacctggcctcccgtggaccactcgctgccttaggtgccttctgctctctggaaccagaggactagctgacttttgccaaggagcagtgccaacgggcatggcatggtgccctgcctgcccccgggcgccacctctgtacacttccctgacaccttcccaggtgtgggtcactgccacctgtgcccatgggcaccccagagcacccactgtgaccactgcagttctctcatgcccacaggcactggcctgtgaccttcgcaggggtcccggcccctcccaccactctagcctttctcaggctgcaccaaagattccatcatcagggccaactgagagtgagggagtctcacccaccgcttaccccagccctcccctgggagcagagagagaaaccctcttcatggaccagactctgcacccggtgagtgaggacagtcccagctgagtcccatcgatgcgggaccaagccggaggcatgccacggccagggctannn

SEQ ID NO: 21307 - DNA, 5145 bp, Homo sapiens; identical to SEQ ID NO: 20824
  misc_feature 1, 5144, 5145: n = A,T,C or G

SEQ ID NO: 21308 - DNA, 2407 bp, Homo sapiens
  misc_feature 1, 2383, 2384, 2385, 2386, 2387, 2388, 2389, 2390, 2391,2392, 2393, 2394, 2395, 2396, 2397, 2398, 2399, 2400, 2401,2402, 2403, 2404, 2405, 2406, 2407: n = A,T,C or G
ncgacccacgcgttcgcccgcgcggcggagttgagggcgatgagagcgggtactgcgaactgccgggcgatgctgtcgctgccgccgtgatacggagagcaacagttccccagcaacacccctccccgacacaggcacacaccccccgacaggcacgcacacccaccccacagtgcccggctcggctgcgcctcctctattggcccaggaagcccacccagccccgccacgcagagcccagaaggaaagaaagcctcatgcctgagccgaggggagcaccatggatctgacaaaaatgggcatgatccagctgcagaaccctagccaccccacggggctactgtgcaaggccaaccagatgcggctggccgggactttgtgcgatgtggtcatcatggtggacagccaggagttccacgcccaccggacggtgctggcctgcaccagcaagatgtttgagatcctcttccaccgcaatagtcaacactatactttggacttcctctcgccaaagaccttccagcagattctggagtatgcatatacagccacgctgcaagccaaggcggaggacctggatgacctgctgtatgcggccgagatcctggagatcgagtacctggaggaacagtgcctgaagatgctggagaccatccaggcctcagacgacaatgacacggaggccaccatggccgatggcggggccgaggaagaagaggaccgcaaggctcggtacctcaagaacatcttcatctcgaagcattccagcgaggagagtgggtatgccagtgtggctggacagagcctccctgggcccatggtggaccagagcccttcagtctccacttcatttggtctttcagccatgagtcccaccaaggctgcagtggacagtttgatgaccataggacagtctctcctgcagggaactcttcagccacctgcagggcccgaggagccaactctggctgggggtgggcggcaccctggggtggctgaggtgaagacggagatgatgcaggtggatgaggtgcccagccaggacagccctggggcagccgagtccagcatctcaggagggatgggggacaaggttgaggaaagaggcaaagaggggcctgggaccccgactcgaagcagcgtcatcaccagtgctagggagctacactatgggcgagaggagagtgccgagcaggtgccacccccagctgaggctggccaggcccccactggccgacctgagcacccagcacccccgcctgagaagcatctgggcatctactccgtgttgcccaaccacaaggctgacgctgtattgagcatgccgtcttccgtgacctctggcctccacgtgcagcctgccctggctgtctccatggacttcagcacctatggggggctgctgccccagggcttcatccagagggagctgttcagcaagctgggggagctggctgtgggcatgaagtcagagagccggaccatcggagagcagtgcagcgtgtgtggggtcgagcttcctgataacgaggctgtggagcagcacaggaagctgcacagtgggatgaagacgtacgggtgcgagctctgcgggaagcggttcctggatagtttgcggctgagaatgcacttactggctcattcagcgggtgccaaagcctttgtctgtgatcagtgcggtgcacagttttcgaaggaggatgccctggagacacacaggcagacccatactggcactgacatggccgtcttctgtctgctgtgtgggaagcgcttccaggcgcagagcgcactgcagcagcacatggaggtccacgcgggcgtgcgcagctacatctgcagtgagtgcaaccgcaccttccccagccacacggctctcaaacgccacctgcgctcacatacaggcgaccacccctacgagtgtgagttctgtggcagctgcttccgggatgagagcacactcaagagccacaaacgcatccacacgggtgagaaaccctacgagtgcaatggctgtggcaagaagttcagcctcaagcatcagctggagacgcactatagggtgcacacaggtgagaagccctttgagtgtaagctctgccaccagcgctcccgggactactcggccatgatcaagcacctgagaacgcacaacggcgcctcgccctaccagtgcaccatctgcacagagtactgccccagcctctcctccatgcagaagcacatgaagggccacaagcccgaggagatcccgcccgactggaggatagagaagacgtacctctacctgtgctatgtgtgaagggaggcccgcggcggtggagccgagcggggagccaggaaagaagagttggagtgagatgaaggaaggactatgacaaannnnnnnnnnnnnnnnnnnnnnnnn

SEQ ID NO: 21309 - DNA, 920 bp, Homo sapiens
tatagggagtcgacccacgcgtccgtgggaagtctcggtgggttccccgcaaaatcagagatggcatctcactatgttgcccaggctgatcttgaactcctgacctcaagtgatcctctctccttggcctcctaaagtgctgggattccaggtgtgagccacttcacccagccacatttatccatcttgtaaaatattgctttgttttttggtgcatttcaaacccacaggtcctgacttcaggagcaagacacttcaagtgaggtgaggaggaggttccaggacctggataccatcctttgcagggatgtaattcaccagagaccaagatttctagccagaaattgagggcagctcaaggagagactacagacacagcatcctacttactggctatttcccagtaacaaaagaaaatgatcaagtcccaggaatcactgaccctggaggatgtggctgtggagttcacttgggaggagtggcagctcctcggccctgctcagacggacctgtaccgagacgtgatgttggagaactatagcaacctcgtgtcagtggggtatcaagccagcaaaccagatgcactcttcaagttggaacaaggagagccatggacagtagaaaatgaaatccacagccaaatctgtccagaaatcaagaaagttgacaatcatctacagatgcactcacaaaagcaaagatgtctgaagagagtggaacaatgccataaacataatgcatttggaaacatcattcatcagaggaaaagtgattttcctttaaggcaaaatcatgatacatttgacttacatgggaaaatactgaaatcaaatttaagtttagtcaaccagaacaaaaggtatgaaatcaagaattctgtgggggttaatggagatgggaaatccttccttcatgccaag

SEQ ID NO: 21310 - DNA, 513 bp, Homo sapiens; identical to SEQ ID NO: 20543

SEQ ID NO: 21311 - DNA, 572 bp, Homo sapiens
  misc_feature 459, 460, 527, 560, 561, 562, 563, 564, 565, 566, 567, 568,569, 570, 571, 572: n = A,T,C or G
acaagggaatggaatggaatggaatgcaatgttatggaatcatccgtaatggaatggaaaggaatggaatggaatggaatggaatggaatggaatggaatggaatcaactcgattgcaatcgaatggaatggaatggaattaacccaaatagaatggaatggaatggaatggaacggaacggaatggaatggaatcgagcggccgcccgggcaggacatattgtatctgtgtaacattttgtatattccagggggtagggcgcgccccctgtatcatacctagcagaggttggagctggcacatggggaggaggttctaataattatttggggctgggaaacttatttattgatagcataggacagaggaaggaggcggggatgggggtcgtggcgccctggtgatgcgactcctgtttattttgctttttatttcggagggggtggatttagccatannaaaaaaaaaaaaaaaaaaaaaaaaaaaaaaaaaaaaaaaaaaaaaaaaaaaaaaaagggggggccgntaaaactatagtgggggggccgcttccctatcnnnnnnnnnnnnn

SEQ ID NO: 21312 - DNA, 997 bp, Homo sapiens
  misc_feature 997: n = A,T,C or G
gcaggagatagtgtacactcagctgcggttttgaaattgttcgacagtgtatactcagctggggttttacaactggttaaatgaatgtcctacagaaatgtgcatagggttaaggcaactacaaagggatgtcgaggcacccaagagccagcaacagagggagctctcacacccctaaacatgaaggggtcaggtgacgagggcagtgtcattggagcttagtgagagcttgagctctgaaagaggggctgcccaacaggaactgtgctcatggagggccacgccattgtcaggagatagaccctgacttcttttgccctcctactttccagcctcttgcaggaatcttctatcagccaaatatagccagaagccagaaagcaatgaacacttgagtgatacaatgtgccttgcatcactcagtgcacaaaggcaggggagagactgtaggagagtgaagaggagggaaggtcaaatggaaataatgaacacatagaaaatactggttccaggtctgagtcctacctggggccctgttgagaaggagtataccctttaaatgtcaatcagaaatttccagggctgaccattctcctctccagatccatcccatcctgtgtaacatggtgccacactctcccagcatgggaatgtcaatgagaattttccagccattgggagtctgccaggctcatatggcttttgtctccactagatctggcaccactccttctacaatgagctgcgtgtagcacctgaagagcaccccaccctgctcacagaggctcccctaaatcccaaggccaacagggaaaagatgacccaggtcagaagccaggaagacttgaacactggcataagaatgcaacatggatgcttggccagatactttctccccttcaaacatcagtgcaacagaactctctgaggacctgctatgtctgtggtccatgccaggccctgggggagtgggtgtggaataatgaactatcaaacn

SEQ ID NO: 21313 - DNA, 713 bp, Homo sapiens
  misc_feature 1, 2, 60, 712, 713: n = A,T,C or G
nnacccacgcgtccggcactgggtccatgggaagcatgagtctgttgggacttgggacangaagaaaacaagacatcttcacaaggaaaaccaagtactaaaaaaagtatcctcccaactctgaagagatagaacacaaacatggccgacagtggacttagggaacctcaagaggactctcaaaaggatttggaaaatgatccatcagtaaattctcaggcgcaggagaccacaatcatagcaagtaatgctgaagaagctgagatcctacactctgcctgtggtcttagcaaagaccaccaagaggtagagacagaaggtccagaaagtgcagatacaggtgataaatcagaaagtccagatgaagcaaatgtggggaaacatccaaaggataaaacagaagatgagaacaagcagagttttctggatggcggaaaagggcatcacctcccttcagaaaatctgggtaaagaacccttggatccagatcccagccattctccaagtgaccaggtaggaagagcagatgcacacttagggagcagctctgtggccctccctaaggaagcgagtgacggaactggagcatctcaggaaccacctactacagactcccaggaggcccagagtcctggtcattccagtgcagggcaagagggtgaggatacactgaggaggcgactgctggccccagaggctggaagtcatccann

SEQ ID NO: 21314 - DNA, 1001 bp, Homo sapiens
  misc_feature 681, 682, 683, 684, 685, 686, 687, 688, 689, 690, 691, 692,693, 694, 695, 696, 697, 698, 699, 700, 701, 702, 703, 704,705, 706, 707, 708, 709, 710, 711, 712, 713, 714, 715, 716,717, 718: n = A,T,C or G
ctccaccgcggtggcggccgaggtactgaggctgtatacagccacagcctctccccatccctccagccttatctgtcatcaccatcaacccctcccatgcacctaaacaaaatctaacttgtaattccttgaacatgtcaggcatacattattccttctgcctgagaagctcttccttgtctcttaaatctagaatgatgtaaagttttgaataagttgactatcttacttcatgcaaagaagggacacatatgagattcatcatcacatgagacagcaaatactaaaagtgtaatttgattataagagtttagataaatatatgaaatgcaagagccacagagggaatgtttatggggcacgtttgtaagcctgggatgtgaagcaaaggcagggaacctcatagtatcttatataatatacttcatttctctatctctatcacaatatccaacaagcttttcacagaattcatgcagtgcaaatccccaaaggtaacctttatccatttcatggtgagtgcgctttagaattttggcaaatcatactggtcacttatctcaactttgagatgtgtttgtccttgtagttaattgaaagaaatagggcactcttgtgagccactttagggttcactcctggcaataaagaatttacaaagagctactcaggaccagttgnnnnnnnnnnnnnnnnnnnnnnnnnnnnnnnnnnnnnncacatgtttaaaaaatgtttttatgggcttcctaggttatttacaaagctgcttatctttcaggacaataaaatcataagcgatggaattatcctctctaccagagagaaatcatttgcattcctactggaatgaaatctaccacgtaacatgtaattttagagagtcaggaccttagttaatggtaaacagtgagtcatacagagctgcactcctttaaaccaccaccatcaaatggaagtataatttaagccactatgtgatttgaaattctctagcaggt

SEQ ID NO: 21315 - DNA, 635 bp, Homo sapiens
ctcaccgcggtggcggccgaggtactacgaagccatcttggctctgtggaaccagctctacatcaacatgaagagcctggtgtcctggcactactgcatgattgacatagagaagatcagggccatgacaatcgccaaggtatgtcctcagggccacttaggctgcctggagggagggcagcgctgccccccgcagtgcctgtgtccaacagttcaaccttcttgctgtgtagcagtgcttttgtgtctcgtcaagcaagtcagctcagccctccttagaggttctggtctgtccaatagagaacgggagggattagcatatggctgattatgagagaaagaagcaatactaattcaggtggcctgacaagcaagccagaagtgcctgtggaaaagttatgcactcctgtaagattctggaccctatgctcctttgatgtaatggaaagttaggtcataaaggattaactgggtatcacaaaagtaaaaggtgggatagaattcttggaagagcacccaaagcattacttactctaaatcagttgttttcagatcatggtctgaagaatcctagcaggagagggagatcctttaggagtgacagggatggaagtgaggagaggggcacagaaagt

SEQ ID NO: 21316 - DNA, 1415 bp, Homo sapiens
  misc_feature 1, 2, 3, 4, 5, 6, 7, 8, 9, 10, 11, 1415: n = A,T,C or G
nnnnnnnnnnnatccaaagtggaaaatttcaagaaaggacaactcactgtacacttgagaataatacctacagaggttcatactgaagagtagtctcaataatgtaaagaatttgacaagcatgatgctattgaaatagttctgtaaggaagtggtgttctttatacatcaattattacaaaaagcagtgaattgtaagtgtgaggtgtgtttacttagatgtgaagagttctccttactgctgtgatggaataacaagggtcagatttcctctcctgccttaaacaactggaagctatacaatacgtataataggtaatggtttttagacataggacaagcacaggtttgtgatcctcaggagactgcagacagagtgaggtgagcaccatggtttctcagcctgcccccgcacggcagttcctaggttgcagttcagggaagggaaacaataaatctcgctgaattgaagagacaggactggcagttggggaggccacagcagctagaatttccaggggaaagtactggagagatgggatccttctagatacagggctcaagaagtctgctgggagtcccctgagtcctttgacttagtactgacttgcactgaggccaggaaaagaagcactggaaagcagcaggctgaacaattcctggaactcatgcagggctgggaatagtttatgttctcagcagccagagtggaaacagagtggaaacacatggagcatcaggtagaattctcagaaaggttttgttttagtagtgcagctaattaactctagattaaaagctactctggacctacagtgtccggcatccaaaaaaactaatgtgttatgcaaagaagcaataaaatatgacttataaccaggagaaaaatcagtagaaacccagaaaagacagaggtgatggaattagtagacaaggatattaaaagagctattgtaaatataaagtagaggaaaacataagattgatgaaacctgaggtataagagatatttttactggccaaaatggaacttctagggatgaaatcaacttctgattttgttaaaatcccgagtggagagattagatacagaaaaagaagaaaaaatcaatgaacttgaagagtaagaataaaaactaccaaagtgatatacagagagaaaaaaagacttagagaagaggaagagaataggaaaaccattacagtagtgtaatatatgtttaactggagtcccagaaggagaggagaaaatgaagaggcatgaagaagtatttgaataaataatggctaaagattttccaaatctggtgaaaacaatacccccacatattcaagaagctcaaatgacctgaagtagaataaacataatttacatcacagcagtgcacctcagagtcacattcatgaaaaagcan

SEQ ID NO: 21317 - DNA, 360 bp, Homo sapiens
acgcgggtgagctaaaaaagaattgcaaaaaaaaatctcataatgtttcaagaaagtttacaaatttgtgttgggccgcattcaaagctgtcctgggctgcatgcgtcccgcgggccaagggttggacaagcttgagttagaggtttctgcaggattacagagatgtgggaacttccagccattgacgtgtggaggttaggatatgaactactgtgaggtgcactttcagaggttgaggctaatactccttttcctacttcccaaggaggtgaagtttcctgaagacagtgcttttttacatgtagagttttttgtggttctgttactctgctgtctccattagtcaaggaacacgtttt

SEQ ID NO: 21318 - DNA, 349 bp, Homo sapiens
accctgtggtcagcatagtagataacatagttacagaagaattgacaacaggaaagttgttttatagaggagggaataagggctccgtaacatgacatcataatttctagacaaacgcttaacttccctgaagcagattccgccgagagggattgggccatgtcggaaagagaccagtttgcctgtaatattcttcctttctctaatcctgggctcccttcaggtagaacccagatcaccatcaggaaccagagaatgagaaaaagtagagagattgtggaacctctaagccatcttctcacagaggaggaaactagagttcaaagatgcagccacctgcccgctctag

SEQ ID NO: 21319 - DNA, 360 bp, Homo sapiens; identical to SEQ ID NO: 21317

SEQ ID NO: 21320 - DNA, 516 bp, Homo sapiens
accttgcctctagtggacaagggccctgagctttacacagccctctgcatttattaggcaaaagagatagttgggggggtgcagtggaagtaggggtcagctgctcagtccagaggaggcttgcaagactacattctctaaatgttgcagtagataacctcagcaccagggagtgattgcctccagaaaaccttctgtcggcaggagcaatggtgagtttgctcacatcctgcattcatgataaacagtttgctgtttgatcatatagcctccagtggaatgctgagttggtcacgtcccacggacctttggctccctgtaagtgggaactacataaaggtgtgaacactgggagggtggagttcattgagccatcaaatctgcctgccatagatctgtcatatagtaaactatttttgagtgtggattgaggtaagactttcactttacttttttccaaatagatagctatctcacataaataatttagaatgggtaaaccaaccaggattaagt

SEQ ID NO: 21321 - DNA, 673 bp, Homo sapiens
  misc_feature 669, 670, 671, 672, 673: n = A,T,C or G
ctccaccgcggtggcggcccagggacctctaaaggcctgacctctgaagtaatcccagatatcattttccccatatggtattgggtcaaagcactcccagggccatcccaggttggaggggagggcaaaaagactcagaaatggttggtgttcatctttggagactatttacacagtgattgtatattaaaaaaaacagcaattatatctttgaatttgagtaaagttaaagaaatggtatctgtgaaacttcgaataaacaagtggagcttaaaatatttgattcttgcatattaggttaatgtgctctatgctaatcaggttggagaaatattaagctctgctaggaattctattggactgaaggtaagtcatcctgccagtaactacctaagtcaaggtgtgaacaagctggaatttcttcccattctaatttttttcaagtatacccgtagaaaacaaaatgaagaatcgggctcagaatcatttccagctacctatcacatctttggaagcttcaaggttagatataatggaaagcatgcaaaaaaaaaaaaaaagtcgacgcggccgcgaatttagtagtagtagtaggcggccgctctagaggatccaagcttacgtacgcgtgcatgcgacgtcatagctcttctatagtgtcacctaaannnnn

SEQ ID NO: 21322 - DNA, 508 bp, Homo sapiens; identical to SEQ ID NO: 21293
  misc_feature 502, 503, 504, 505, 506, 507, 508: n = A,T,C or G

SEQ ID NO: 21323 - DNA, 606 bp, Homo sapiens
  misc_feature 1, 2, 592, 593, 594, 595, 596, 597, 598, 599, 600, 601, 602,603, 604, 605, 606: n = A,T,C or G
nncgtctgccgggacagtgtggctggacccacgtggcaggtgttaaccaccgaagggaggtagaatgtttttccccaccagaggaggcagcgaccacgtctcctctatggaggcattcaagagccgtccagctgaagcagcatcactgtctgagctcggaaggcacaatccacataggtctgcatggtccacagagctgcatacccacggggccagcgggaggtgggcagctgccgggctctcttctgaagcagacaggatctcactctgttgctgaggctggatcacagctccctgcaaccttgaactctccctcaagcaattctccccactctgccttccaaagcactagcattataggcctaagccaccactcccatccactgtagtgtaaactgtctccttcaatgtttccaatagttgcggagcagatcagataagggttcttcctgtctgttgcttcaagtttcattctctctttaaacaatacaaggttggcttccatggttccttcttaaagaatgttgaaggtgtgtcttcagattcatttagtgttcgtggaaccccagggaaagctgatgtaaaaacctcnnnnnnnnnnnnnnn

SEQ ID NO: 21324 - DNA, 1411 bp, Homo sapiens
  misc_feature 1411: n = A,T,C or G
agggagtcacccacgcgtccggtaggtagtaagacagtaaacaaactggaaagtccagctatttttaatttccaaccaaactgttgaatcaattaaaaaaaaaaacgagtctatagtgcctttcaaatgcctgaattttgacatttgtacatcagctgatggattaatattttgaattgctatgtgatggctctgcatgggcatggtggccagtgcttcagttttgacagcattaccatccttggtgatgacatggacagcaatgtttctacaattgtttgaaatggtaaatatatttttgattacatgctgccttttaggcatacgcttttattcattccaagtatttatcgaacctgctgttacaggatacagtgcatcctgcataaggatacagtgatgaacaaagcagacaagatccccgcagtcctgtagtttacattcttatgggacaaagactaatagtgaacaagtaaaacatgaaataataatttccatgtagagaagtgtaatgggttgatgtgatagactgacagtatgatttctttaaatcgcatattcagggaaactctttactatgaagctaacatttaactaaagactaaatggggaattggcagtgccacgatcataagaatggcttttccagatagggaagaggttgtgctaagttactaatccaggaatgagtttggcatgtcaaagaacagaaaaaaggggccactaaggctggagcttagagaggaaaggagacaatgttatgagacgggtttggagagactggctgggacctacgtcataaaaggtttttgtaaggtgatctgaagcattggatttatatagtgcgatagaagctttcagagcatttgagatagggaagtattgttacctgataaatatttgagatttttaaacacagtcttttgcatgtgatttataattgtggcataaatagaagtttaaatcagtggcaatcagttaaggctgggcaagttcctctctaaatggaggtgtgttacaaaggaaaatcagtaatagtctgtaagtactcaaaatatctcagcaggtctaggagtggggaggtagaaagacagaggtaaaaccaatctttttgtgggggaggtggcgatgaagggttaaggtggaacattacaaagatttcgaggtctcatctcattagggatataatataatttgtgaggaaatcatctgaattggtaccgtaataagcttgagagggaggtactattttcttggtaattcgtaggagcaacgattgtgtgcaacggtgtggttaaatcggcagggaaatggattcattatgaataggttggtaggaagcttggtaatgggggttaaaagtgttgaccgtattgtgattaaaaaggttcaagcagatgtttggttatan

SEQ ID NO: 21325 - DNA, 1647 bp, Homo sapiens
  misc_feature 1, 1646, 1647: n = A,T,C or G
natctggtccctgtcagatccacccctagactcttgacagctcgcggacgccgccccgaggccccccttgtcctcgagctttgtctcccacatcgacgacaccgcctctgccttccacccctacccatcgtcgccctgatcacctcaactcacgtcacaccacgtggcccgctcacaccttacgtcgaagccctcgccatcacgcaatcgccactgatgtatggggcgtcatctgcagcgtctcgctcatccaacgtgcacctagcagagtgaccgaggattcagtcacgcgcacgatcgacactctgcgccagcatccactctgccctgtacctcagtcgtgaccgcatcgcctgtgctcctccaccgctcagtcacactactcgcacctcttgctctccgcatctcagcgcgcggacacagcgaccgctctcgcgctcgccatcgccgctgacccaggcacgcttccgagccctgcgactcgctctctcgccgcgagcgccgtgagcgtcgtcagctctctgcttcatcggcgcctcttggtctaccgctcctctctcctcgtcgcctgtcgtgtccgctgctcctcgtgtcgcgtgttcgtctcccgtgagcgtgtgcgctctgcggcggcggccagtggtgcgatgggctgtgtgtgtcgtcgtcgttcatgacttcgtgtgtgttgtgtcggcgtggcggtcgtcggctcgctgcgtcgtgtggcggcggggtacgtcgtctgaccagtcacacgattgtcagctgccgcgttttgtgcgctacccaactgtttaaattaaacctgcaaacaagttccgtaagaaaagactggtaagacaaatggtgcccagaggaaaccagcactattaatattaagcaatccttatcaacacaattgaccattttaataaaaagctagtccaaaaaaggttctcattctataaagattaaatcatttccaaatcacagtgaaaggaacttgagtaattaaccaattttgttttctactatgtgccttagagatacctcactaaaattttgtatctgatacaacagaataacatttgcagaatgtaatattgtagtgacagtactgaggttgattgttacagactattaaatggttacatcttaattgtttatacagaacattggtccaataacattaaaatagagaacagcatctggaaatttatctcattcaatgttcggagataaaagagttaaacatcctttccattattttctgcagtcagtccttgttcacaatcaaatctgatggcaactacattctggcattttccccagctactgtatgaagaggatgctgaaggccattactatacagcatactgcaacataaggactcttccgttcaccaattctggcacacttccaaaatatacccaacaatccagttttatttctgtccaggaggctgggtgccaaggatcgaatataagcacaggtacatataagcagcaagattacagtcaatagactctgaaaattgaaaatggcagacatagcgaggccggcgatgccgcagccacatcacccttccggggctcaggcggaagaggctgcatgtcccgtctgcccttctcgccctctccaccgtccggttgggcttgtcaccnn

SEQ ID NO: 21326 - DNA, 935 bp, Homo sapiens
  misc_feature 927, 928, 929, 930, 931, 932, 933, 934, 935: n = A,T,C or G
acttcccaactaggggtgagtttgccacccttacccccatcccagtgaatatttgcaattcctaaagacgtgttttgattgtcacacctgggtggggaacatgctactggcatctaatgcatagagggcagtaatgctgctaaacatctttcaacgcacaggacagagccccacaaaagagaattatctagccccaaatgtccataacactgctgttgagaaaacctaccgcaggatcttactgggcttcataggtaagcttgcctttgttctggcttctgtagatatataaaataaagacactgcccagtccctccctcaacgtcccgagccagggctcaaggcaattccaataacagtagaatgaacactaaatattgatttcaaaatctcagcaactagaagaatgaccaaccatcctggttggcctgggactgtcctagttttagcattgaaagtttcaggttccaggaaagccctcaggcctgggctgctggtcaccctagcagctgagggactcttcaatacagaattagtctttgtgcactggagatgaatatactttaatttgtaacatgtgaaaacatctataaacatctactgaagcctgttctgtctgcaccgacattttcattgagtacggattcttcctaccagatacagctgctctacaactttcgagggctggtataaaactagcttttacctatttttaaaaattacatgaatagtaaaaacttggattaacccagtattcgggtattttcaatttccttgggagcttagaggacggacaaataaaaagattatttcaacatcaaatatatgctattgtttacatatgaagataaccacatatatgtataaattcaccgttactttttagcaatactataaaatccaacagaaaaaaatagcatttactannnnnnnnn

SEQ ID NO: 21327 - DNA, 562 bp, Homo sapiens
  misc_feature 1, 2, 3, 4, 5, 6, 7, 8, 9, 10, 11, 12, 13, 14, 15, 16, 17,18, 19, 20, 21, 22, 23, 24, 25, 26, 27, 28, 29, 30, 31,32, 33, 34: n = A,T,C or G
nnnnnnnnnnnnnnnnnnnnnnnnnnnnnnnnnngagacatgtactctttctgtcacccatattgtggaggtttctgccagtataaattagctaaatcttatcatttgtgtgtgtgtgctttctcctcataggtgactttacttcctgggacatacaggaatctgaattcagtaatgggtctggaggcagcaaaagatgatccgggtggatcttgaaaaggttagcctaacagtgagagggtccccaagtcaggcaggaccagccccatagactggggaaaaagggctgcttctgctgccaggggaaactcagtgagggttggggtttagggtgctcagatctatccaaatcaatcctgatgttcctattcctagtctcaaggtcccattgttccctaatcagtagccatgtttttgcatatgagacctggagatcctatgaattcagcctgcgttgtaattcagcaacctgcaggatttggttttatgtctgatttcaggctgcatcagtcctgtgcctggaagagataaaaagaaaactcaaaaaaaaaaaaaaaaaagt

SEQ ID NO: 21328 - DNA, 681 bp, Homo sapiens; identical to SEQ ID NO: 20120
  misc_feature 1, 2, 12: n = A,T,C or G

SEQ ID NO: 21329 - DNA, 809 bp, Homo sapiens; identical to SEQ ID NO: 20847
  misc_feature 809: n = A,T,C or G

SEQ ID NO: 21330 - DNA, 862 bp, Homo sapiens
ggacatccggctgatggtcatggagatccgcaatgcttatgctgtgttatatgacatcatcctgaagaacttcgagaagctcaagaagcccaggggagaaacaaagggaatgatctattgagagccctctctcccattccctggcaggtaccgaggtcattttgcttcctatagactgccaccttttggcaaaagctgttctaactccatctcagcatttacaattccatacctggtggtcagaggaggcccgcctgcaggctcagctaaatcgggctgatggcattccaattactcaggctcagctcacaggctccgataattactctgatactactgctcatttaggctttgatgctctcaccacggaacaagtaacaaaggtgtgtatgagagcttgggataaattacgcaccccaggccaagcttctgtttcttttactattgttaaacagggtcacaatgaattatatcttgattttttagctaaattacaagatgctgttgaaaaatctgtctctgatgagcacactcaaggtattcttcttcatatgttagcttttcaaaatgcgaaccatgagtgtaaaatggccgtgcattccatcctacgtcaaaatttacctgatcatgaggtgttgcctgcatatattaaagcttgtgaaggcgttggatcggagacccacagagctattctgtgggcaccggccatgaagcacggcaaccaaactggctcgactgattcttttcttggagcctgctataattgtggccaacttggtcatacccaaaaaaactacactgttaaaaacttaaaagcggccaagccggctcaacaaacacggccaaatgctcctgctactgt

SEQ ID NO: 21331 - DNA, 1512 bp, Homo sapiens
  misc_feature 1, 2, 3, 4, 5, 6, 7, 8, 9: n = A,T,C or G
nnnnnnnnncatgtcacatgggtaatgtaccaacgacatgacaagatttaagggaggcacatctcacagacaagcatgaaaacccaatcatcatgcttatgaactaaaaaggaaactggattcttacaatcagaaacaggaatatcaaccaaattgtggtaccctatgagccaggagccacagaccatgcccaccttccactccgcctcttttaactttattatacaaaaatagctgtatccctccccaggatacaggcaagtcactacagccttgagaagccagcaggaagaagaattaaaccagatctccctaagggtgaagtagagctgccttcaaagataggaagttcctgcctctggagttgtttgtttattatggtacaagaaatcgagcacaattgggtcagaagaacagaagacccttccagcgccaattttctgggaggtggtccaaaggaagtcagtggggccagctctctccctcagacagctaacaggagcaaggcttggtcagccttcctgaagctctgcaagtccaaggcttctgagctatttattctatacttactttgaaaacacaaaattgctccaacaggatggatatgttacggaacaattaggcataataggatgtgcatttctgtctactgagaaacaccaggtagaaaactgcaccaagctgaattgagcttcgtggtaatacacaaaaaatgcacacagctcagctcaacaagtgcactgagtcacaccaaacacatttgatgttacaactttccatccaattccagataaccttcctcccactgcttctcaactgctcaaaagcctaactctccaaacccatttccacaaggtaatttgaagactttttcaaataaaatgccaaatttaccatagtagttatgtatttcttaaccatttaacatttataaaactatatcatttttattcagttccttttttcagatgtgtcactgacaaagttttagaatattgtgcccttaaccaaattttccccgtgagacctgtggtttcattgtgcagttctgcttaatgtggtaatttttagaatgcgtatgtcatgttgtattgtagcagaactatttccagggctctagtgtagagtatttacattcattcttaaaaattacactaaatgtccaaaaggaaaataaaataaacatttgtatgattaattaaatcatataaacaggtatccctctgctgcccaggctggagtgcaatggcaagatcatggctcactgcagtctcgacctcctcagcctggctcaagtgatcctcccacctcatccccctgccgagcagccgggactacgggtgcatgccaccatgcctgaataattttttgatattttgtagagatgagttctcactattttgcccaggctagtcttgaactcctgggctcaagtgatccgcccacctcagtccccaaaaagtgctgggattataggcatgagccactgtgctcggccgccaccgcggtgga

SEQ ID NO: 21332 - DNA, 635 bp, Homo sapiens
  misc_feature 1, 6, 628, 629, 630, 631, 632, 633, 634, 635: n = A,T,C or G
ncatantaaaaaactaggttctccttagggaaaaaatacatgcaaatgctcacaaacttttaaattcacactttagcggggtggtgatttctgaaggcctctttctgtaacccctggtgtcttttcaggaaacccccaggtggagatcccatgttataaattacctttccgtttacaagagcaccttcccttagattctttaaaaaaggacccatcttaaattttacaccttactgttacaccaaaattagccaggcagtggtggtacttatgcctatagtcccagctactcgggaggctgaggtgggaggatggctttgggcctgggaggcagaggttgcagtgagctaagatcacactactgcactgcagcctggccgacagaaccagaccttatctcaaaaataaataaaaaacaaactttaccttgttaatgctatctactgagaagacacaatgatttaggaatttttaaatttaaagctgtaagttttattttctaaaaaataaatttttttcagctttttctaagagtgtcaaccggcttattttgtcaatatgtctatttatttttaaacagaggatttttctccaacaatatagaagatcaggctcgtgaacatattcnnnnnnnn

SEQ ID NO: 21333 - DNA, 471 bp, Homo sapiens
  misc_feature 401, 405, 407, 425, 441, 469, 470, 471: n = A,T,C or G
tgaatctctttattttccctggtagagacatcttcaaggcatgaaatagcttaaagagcagagtagaaatggaagaggctttgcaaaaggctagataactaacaacacctgggttggggcggcggcctcttctcttcagctcccttagcttggctccgtaagtggatcacttgccaaatgctttagatgattgcctctcaataattgaaaggtggtggtagttgtattgctgcactgtcggtgttaagagaaattactctcacaagagcagaggcctgaagattctttcttctgaagggatgatgagcctggactctctggactcctgattatgaactcctgcagtggaccatgtcctattttttggacgcgttggggggaattgtcttacgcagctcccnagcncnctggtagtcagtggcccnaaaaagggagctagcnctgcataaagctccccccgcgtacctcnnn

SEQ ID NO: 21334 - DNA, 613 bp, Homo sapiens
  misc_feature 612, 613: n = A,T,C or G
actgcaataaccccctaatagttcttttacccaccaatctggcccccaacaaagtttcctttgatttctccttcctaccaagacattctcaacattctccctccaccaggtggatctggccatgattatcataaatctaattgccttctgcttaaaatatttcagggagacccattaatgcatttggataaaaattatttattagctgtgtgactttgggtgaaagatttgagctcatctgtaaagtaaggcaatatggcacccttgaagagtggtgtgaggattatggtgtttaatgtccaccacaatgcctactgtcttatagaagctgagtgggaactaacgctatttctacttatttttgacaagctgcacgtgacagtgggaaaagtattgtatttggagtcagataataatgataacaaccacaaactactagcaaatgcttacacaatgcttttctgtgtggtaggtctttttccaaatactttacaaatactaattatttttaatcttcacaacaaccagaggtaggtgctggttatcatgcccatttaacagatgagaaaagtgaggcatgaaggttaagtaaattgatctctacagaagtann

SEQ ID NO: 21335 - DNA, 569 bp, Homo sapiens
  misc_feature 552, 553, 554, 555, 556, 557, 558, 559, 560, 561, 562, 563,564, 565, 566, 567, 568, 569: n = A,T,C or G
accatgagacaaagaggcagctttcaacatctgtcaggtctccaacatgtgatgccatcttacgatggcactaattcaggaaaacaaaacaaaactcttttcttcctttcctcaccactttctgtgccttccaatcccagaggagtcaataccaacggctagccagcctggatagccaaggaaggggaagagcaacccagtctcaatgccacccacttactccactgcacacagagactctgtggtgggcccagctgggggaggggagaaaatgtaagttcaatcaagtttagagttttgggttacaatttgaaatggacattctaatttctggatagagtctgagatgatggtttagcatgaatgcaaaggtctctattgcctaacagtacccagaaaagtcataagatgttctttataaataaagtttaaagggacagtttgaaagcaaataaaatgtgttttacactttgggagaccaaggtgggcggatcacctgaggtcaggagttcaagaccagcctagccaacatggtgaaactccatctctacnnnnnnnnnnnnnnnnnn

SEQ ID NO: 21336 - DNA, 491 bp, Homo sapiens; identical to SEQ ID NO: 20202
  misc_feature 1, 2, 3, 4, 5: n = A,T,C or G

SEQ ID NO: 21337 - DNA, 209 bp, Homo sapiens
  misc_feature 209: n = A,T,C or G
tgtcgtttctgccctggtatcagagatccaaaggaggaggaagctgaggaggtgaacctgggaccccataaccttggccctgacctgcatctacaccaagaagagaggacagaggccagacttcacagacaccatcattctccggaaaggggcctcagtggagcacgtgtgccaccgcatccaccggtcactcgccagccagttcaagn

SEQ ID NO: 21338 - DNA, 1231 bp, Homo sapiens; identical to SEQ ID NO: 20570
  misc_feature 791, 1228, 1229, 1230, 1231: n = A,T,C or G

SEQ ID NO: 21339 - DNA, 4742 bp, Homo sapiens
  misc_feature 1, 2, 3, 4, 5, 4742: n = A,T,C or G
nnnnnatggcgattgggcggctgcagagaccaggactcagttcccctgccctagtctgagcctagtgggtgggactcagctcagagtcagttttcagaagcaggtttcagttgcagagttttcctacacttttcctgcgctagagcagcgagcagcctggaacagacccaggcggaggacacctgtgggggagggagcgcctggaggagcttagagaccccagccgggcgtgatctcaccatgtgcggatttgcgaggcgcgccctggagctgctagagatccggaagcacagccccgaggtgtgcgaagccaccaagactgcggctcttggagaaagcgtgagcagggggccaccgcggtctccggcctgtctgcaccctgtcgcctgagctgcctgacagtgacaatgacatcccagttaccagtgtccttgaattgatagtggcttctgtttgtcagtctcatataagaactacagctcatcaggaggagatcgcagcagggtaagagacaccaacaccatgttctgcacgaagctcaaggatctcaagatcacaggagagtgtcctttctccttactggcaccaggtcaagttcctaacgagtcttcagaggaggcagcaggaagctcagagagctgcaaagcaaccgtgcccatctgtcaagacattcctgagaagaacatacaagaaagtcttcctcaaagaaaaaccagtcggagccgagtctatcttcacactttggcagagagtatttgcaaactgattttcccagagtttgaacggctgaatgttgcacttcagagaacattggcaaagcacaaaataaaagaaagcaggaaatctttggaaagagaagactttgaaaaaacaattgcagagcaagcagttgcagcaggagttccagtggaggttatcaaagaatctcttggtgaagaggtttttaaaatatgttacgaggaagatgaaaacatccttggggtggttggaggcacccttaaagattttttaaacagcttcagtacccttctgaaacagagcagccattgccaagaagcaggaaaaaggggcaggcttgaggacgcctccattctatgcctggataaggaggatgattttctacatgtttactacttcttccctaagagaaccacctccctgattcttcccggcatcataaaggcagctgctcacgtattatatgaaacggaagtggaagtgtcgttaatgcctccctgcttccataatgattgcagcgagtttgtgaatcagccctacttgttgtactccgttcacatgaaaagcaccaagccatccctgtcccccagcaaaccccagtcctcgctggtgattcccacatcgctattctgcaagacatttccattccatttcatgtttgacaaagatatgacaattctgcaatttggcaatggcatcagaaggctgatgaacaggagagactttcaaggaaagcctaattttgaagaatactttgaaattctgactccaaaaatcaaccagacgtttagcgggatcatgactatgttgaatatgcagtttgttgtacgagtgaggagatgggacaactctgtgaagaaatcttcaagggttatggacctcaaaggccaaatgatctacattgttgaatccagtgcaatcttgtttttggggtcaccctgtgtggacagattagaagattttacaggacgagggctctacctctcagacatcccaattcacaatgcactgagggatgtggtcttaataggggaacaagcccgagctcaagatggcctgaagaagaggctggggaagctgaaggctacccttgagcaagcccaccaagccctggaggaggagaagaaaaagacagtagaccttctgtgctccatatttccctgtgaggttgctcagcagctgtggcaagggcaagttgtgcaagccaagaagttcagtaatgtcaccatgctcttctcagacatcgttgggttcactgccatctgctcccagtgctcaccgctgcaggtcatcaccatgctcaatgcactgtacactcgcttcgaccagcagtgtggagagctggatgtctacaaggtggagaccattggcgatgcctattgtgtagctgggggattacacaaagagagtgatactcatgctgttcagatagcgctgatggccctgaagatgatggagctctctgatgaagttatgtctccccatggagaacctatcaagatgcgaattggactgcactctggatcagtttttgctggcgtcgttggagttaaaatgccccgctactgtctctttggaaacaatgtcactctggctaacaaatttgagtcctgcagtgtaccacgaaaaatcaatgtcagcccaacaacttacagattactcaaagactgtcctggtttcgtgtttacccctcgatcaagggaggaacttccaccaaacttccctagtgaaatccccggaatctgccattttctggatgcttaccaacaaggaacaaactcaaaaccatgcttccaaaagaaagatgtggaagatggcaatgccaattttttaggcaaagcatcaggaatagattagcaacctatatacctatttataagtctttggggtttgactcattgaagatgtgtagagcctctgaaagcactttagggattgtagatggctaacaagcagtattaaaatttcaggagccaagtcacaatctttctcctgtttaacatgacaaaatgtactcacttcagtacttcagctcttcaagaaaaaaaaaaaaaccttaaaaagctacttttgtgggagtatttctattatataaccagcacttactacctgtactcaaaattcagcaccttgtacatatatcagataattgtagtcaattgtacaaactgatggagtcacctgcaatctcatatcctggtggaatgccatggttattaaagtgtgtttgtgatagtgtcgtcaaaaaaaaggtttttgaatagaaattacattctttgacaccctcagttctttcaaactttcaactctgcattttattgcattttctcatttaactgttagtatatgtttgaatataggctgactttttttctctattgcactttcttctttttttctttttagaaaataagcaattaggggttagatgcaatatgaatataaaatagttctgtaaataccaaatattatttttagttctggaagttaaaaatactctccatagtaacgtgtgttataataataaatatttcttttgtttgacttttttaaaattctacaatggtaaaagctattttaatccatgttagcaatttaattcctattaattcattttactatcataatagcaaagtattcagaataaaagaggtttatatcttctattaaaatgcagtaatactattcaaatctaatttagctggaagcaacatgggagtaaagtaatcatccaggggacccaccataaaggacattggtaaaacatttacacacgtaaacacacgtgcaggcacacttggaacaatatggacccacttcagcagacatcttctattgccatgctgagctgtttaaagttttaagaagaaaatctaagtatggaagtagaaaataagacttgttcttttggtggatatctcatttttcttgagtatttgtgctgaacattttggtgtatgtctgtgaactaagaatcaagtttttgtctcattaaatatacatatatgaagtgtttttattctacttgaaatatcttgacttaaaaaaaacgactgttagtattgatgaagcaaatgaggcagtgactacattatggaaatgtctaagtattttttccggaacttcaactttttctttttgttttacataaacatttaagcagctaggaacttttagttttaattaggtcagttgaagttctctggtgaactaaaaaatctacattttggttggggataaagatttgattttaaaaacagcttgaatttaaagcaagaaaaagatgaacgttatagttttaaaatcaatattagcagagccatagataggctgagctcttatttggggttctgagaaataactcagtttaaaacttctttaactgcctcccttagtacccaggctagcccatggtgacatcagggatattcattactgattggcctctagtattccaagggtactactatagatattacaatgatgctgtttactaagtgataaccccgtatcttacaggactgactttgactcaataaaccactcagcctattattggaaagtgccataggccttgagaaagtatagttacatcctcacaaatatatgaagttaagtcactacttacaaggaaaaaaaaatgtaaatacatttttctttctggaaccgaactcttattatggggaaataatagaaataaagaaaatgtaaaagcatgaaatggaatgtagtcttgatcaaacatttcagcagacctcaatttgcttacaatctgtactcaaaaagtttataattcaatcagaattcaaaaagtattttgtgtgtttgtgatgtattagcatatacacaaaacaaatgaggggaatgtatataatcttggtgaaaagttgtatgggagttttttgtacgattcctgcaacttttctataaacgtggcattatatctaaataaaaaattaccaaaaaccatattttcacagtgaagttaaatcatctgtgatagn

SEQ ID NO: 21340 - DNA, 522 bp, Homo sapiens
  misc_feature 520, 521, 522: n = A,T,C or G
ggtaggtgtaagcttctgtactaatttaaaactatacatttctaagttaatgatttcagcatcttgcggccataccagacatggcatggaattaaactttcagtcccactgttcattttattcatacattagggtggcaagggtggtcttgctcattgcaagcaaagtcatcctggttcatgaaatgaagaatgtggactgtgcagttttcccagtcatgaagacttttgatacatcacttgaaatgttcctcctgaagttgagggtcttttgtaatatcaccagggcagtgaatggcagagaccagatcatgaatcgcttcatttagagcctgcctccgggcttccctgcactctgtggctgctaataccacacccctgtgtcccttgtggtcttaagtcacaaaaccagctattattagatttgcctggagtgtctgaaaacaggcttagaatgaggaaaccttgtctcacttttatacaactggaaaacattacagaatttgactttttgaaaattnnn

SEQ ID NO: 21341 - DNA, 448 bp, Homo sapiens
  misc_feature 448: n = A,T,C or G
attattctttccttttgtgtatgtttgaaattttccattataaaaaggacaaaaaaaaaagagagagaaaactaaaaaagaaaaaatagtgttgcgcttgttagtaaaaccaatcttaaggccagttactaaaaagtaaactcctacaattttgaatagctatttgctaatacagtgatttgctgccttcttggggttagtttagcctgtccattccttatttaacttgctcccttccttcccttttaataaagtcctgcctaagctccaggctctattttccacctctcccctaagatttaggattgttccgttttaagtcagtggccatatgtcttcctgttctcctagtgtaactcttaccttacccagcagcaggccctgtgtttagggcagcctataatattgcttgtattgattaatcttcccttatccacaaacttaactn

SEQ ID NO: 21342 - DNA, 2976 bp, Homo sapiens
  misc_feature 2910, 2941, 2970, 2975, 2976: n = A,T,C or G
ggggggaaggagaaaaaaaaaagcagctgaaagacaatctgcttcatcctgattttgcggcattccaaactgtggtatccttgggggttctcttaacattgctatggtgcagaagatttaaaatcagctgatgttcacaaggaatagagtcacgtgatgtatgaagggaaacatatacacttctctgaggttgacaataagcccttgtgctcatatagccccaaactgtgcaagcagaggcgactcaacggctacgccttctgtatcagacacgttctggaggacaagactgcccccttcaagcaatgtgaatatgtggccaagtataacagccaacgctgcgccaaccccatccccaaatcagaggatcgtaggtactgcaacagccacttgcaggtacttggctttatcccgaaaaaagagaggaagaaaaagaatgatcctatagatgaggtgaaggtcaggcaccagatggataccatggcctttagcctgacagtgcccacgttggccttgaagatgcccaacggactggatggaatgtccctctctccacctggggcaagggtccctctccactacctggaaactgaattggaagacccatttgctttcaatgaggaagatgatgacctaaagaaaggggcaactgtgagaaagaagttgcagagcaagttggcccagaatcggcagcgccagagagagacagagattttaaaagttcgacaagagcactttagtccccctcctgcaccttcacagcagcagcctccgcagcagcactcccacctgtcacctttatctacttctttaaaacctccagcgccaccgcagggttcagtctgcaagtcacctcaacctcagaacaccagcctaccaatgcagggagtggcacccaccacacacactatagcacaagcacggcagttgtctcacaagaggcctctgcccctcctgccatccagtagggctcccactgtggacccacccaggactgaccggatcctcatgaaagccacagccttctctccacacttctcatgtataagccgactgcagagactggtgaaactgtgcacccagaaacatcagttggacactgatctgtttccccatttaggtttggactggtctgaagagagcggagaggaaccagaggactcagagcaggcctcgccctaccaggttgcatggtccatccgggaaaccctcagatatcaaagacatgtgtcagatgatgatgatgcggagagtaggagctccagggtgactcaactttgcacttactttcagcagaaatataagcacctctgccgcctggagcgggcagaatctcgtcaaaagaaatgccggcatacgtttaggaaagctttgctgcaggcggccagtaaagaaccagaatgcactggtcagttaatacaagaactgcggagagctgcatgcagtcgaaccagcataagccggaccaagctgagggaggtggaaccagcagcatgcagtggaaccgtgaagggtgaacagtgcgctaacaaagcccttccattcaccagacattgtttccaacatatcctcttgaaccactctcagcagctcttctcaagttgcacagccaagtttgcagatggacagcagtgctctgtgccagtttttgacattacacatcagacacctctgtgtgaagaacatgccaaaaaatggataattccttgagaggagataactcccgtaaagttcagcaccagcagcagaggaaacccaggaaaaaaaccaagcctcctgcactaaccaaaaaacacaagaagaagagaaggcgtggacctcgtcgaccccaaaaacccattccacctgcagtcccccaagggaacctcagcatgcctgccagcgtctcactgccagtggaggcctctcacatccggagcccatccacgccagagctgagtgctgatgagttgccggatgacattgccaatgagatcactgacattccacatgacttggaattgaaccaggaggacttttcagatgtcctgccacggctacctgatgacttacaagattttgatttttttgaagggaagaatggagacctcctcccaactaccgaagaggctgaggagcttgaacgggccttgcaggctgtaacttctctcgagtgcctgagtaccattggggtccttgcccagtcagatggtgtgccagtccaggagttgtcagatagaggaataggggtgttctccacaggtactggagcttcaggaatacaatccttgagccgagaggtgaacacagacctaggggagctattgaatgggcgtatagtacatgataatttctctagtctagagctggatgagaacctgctccgttctgctaccttgtcaaacccacctacacccctggcagggcagatccaggggcagttctctgccccagccaacgttggccttacttctgccactctgatcagccagagtgcacttggggagagagccttcccaggacagtttcatggacttcatgacggcagccatgcctcccagaggccacatcctgcccagctgctgagcaaggcagatgacctaatcacctcacgacagcaatacagcagtgatcactcacacttcttaccccatggaagccattatgatagtgagcatgtgccgtctccctacagtgaccatatcacctctccccacacaacatcgtactctggtgataatatggcagctaccttttcagcagagatgcccatcatggcgcagacttgctcccaacccaacttgaggtgccacttggaggcgtggtaaaccccagaactcactggggcaatctccctgtcaaccttgggagacccctctccatttaggcaaccttcttcggcgcagatgggacatcttcttttccactttncctattccacgggcacccaccatttcggaanttaggaggaccacacaggcctggcctttnggcann

SEQ ID NO: 21343 - DNA, 1498 bp, Homo sapiens; identical to SEQ ID NO: 20817
  misc_feature 1, 2, 1498: n = A,T,C or G

SEQ ID NO: 21344 - DNA, 537 bp, Homo sapiens
  misc_feature 1, 536, 537: n = A,T,C or G
ncctatgctgtggatctgtgcaccacgcattgtttctatacatattacattaaactgtgcctcatctggattgtggcacaaggtaaaatagatgcaggctgtcaaggctgagaaaaatgtataaaacaagaccagaagactggagggaccaaaagaggtgatgcatacacaaggttctaaagcccaagtctggactccatatgcacattcaaatttgaggaacactgagcagtaacatgcaaatcacctgagaatcttgcttaatcagcttctcattcagcaggtctgggggagaggctgagagtcagcatttcttgcaagttcccaggtgatgccagtctgcggcccacatgttcatctagaccccaaactagtagcaatgtgtgtggacaaggctgggtaacaggcatgaacaatcctccagtcatgagtaatttccttgagagcagttgttttctgtggaagacccagcgctcagcctccatgcatggtcgagcctccctggacactgacctcctatgctagcacctgtgcann

SEQ ID NO: 21345 - DNA, 652 bp, Homo sapiens
  misc_feature 635, 645, 646, 647, 648, 649, 650, 651, 652: n = A,T,C or G
cgacccacgcgtccgcagagattccatcctgacatggattcacttgattggaattgattctaggcatctcagtagttttaaagagctcctaggtgattctattctggccagcgttgagaatcactagggtagtgggttggtaagcaggctctgatgttttaaaggccaggtgaggccctatgcctcttgtctctcttagcctcaactttctccatgttagcaaatggatttcagaacagaaccaacgtacatgtgattgtgaaagttgttttagagtgcctagctcttacgtaagggttcataagaaagacaaaagtttatgaaactgttactaccagtcataaaagaccttttcctccctcattcacaggctggcttattagctgtaatggcccagatgggttgttacgtccctgctgaagtgtgcaggctcacaccaattgatagagtgtttactagacttggtgcctcagacagaataatgtcaggagagttttgggttccccattaaggttcttattcagtcatttagatgtgataaaagatatttgcttcttgtatatgagccttttaaatctaatatttgatttttctggtgttactttaaaaacatcactttttaagaactgcatagnctctctctcnnnnnnnn

SEQ ID NO: 21346 - DNA, 407 bp, Homo sapiens
  misc_feature 407: n = A,T,C or G
acttaccatcttgtctctcagtaggttcttgtgacctaagaggaaaatgtttaatatttgctttatctattagatcagaacctcttcgaaaaaagaagaaggtggatcctaaaaaagaccaagaagcaaaggagcgcttgaaaaggaagatccgaaaactggaaaaggctactcaagagctaattcctattgaagattttattacccctctaaagttcttggataaagcaaggtaaggatccttctctagggatgaagtcctcaggacaaaggagtaatatcaacttcaggtagttgtgtctgtagttcacacctgtgatagtcattggtcagtaggcttgagctgacttggccctaatgagtccttgctccttttggaagcaggagaaagcatccttgggtggtan

SEQ ID NO: 21347 - DNA, 900 bp, Homo sapiens
  misc_feature 1, 2, 3, 4, 895, 896, 897, 898, 899, 900: n = A,T,C or G
nnnnctgtaaaagcaagataccggaacacaaaatgtactctttccctaattggataaagtgagaaaggatattagaaaaccacccaatggaactgataaaaatgagttggaacttgtgaccagcagctggatgagaggagtgtgaatcccccaaatcttatggatatagtgtgctttctttgatgttcctgccaaagtgaggctggaaagctaggaagatctgtaagacgtgtgccagcacaaagtgactacaattcaaaagttccaaaaaccttgcttgaaacaattgcaaatagctcatcattttaaaccagtgaacccaaggctgagtgtttcatcaatttacagaaaaccaagaagagaaatctgacagctatcccagtgtatgacttaccatggagatcttcaaatagaatcactttggtttgggtctcattttcatattataacacaaatttgtgtatgtgggttaagattcatatttgataggaactgctgggaattcttgcagttatatcctcaaaagacaaaataagcataaccaacagaattgtgaagcaataaagttgattatggatgaaaactgggctgaacagtcataggacatgacttgttcctttgacctaaaatgtgcttttctttccttatctacccagtgtaatggtactactctttcaaccatcttgaattcactcacacttattcgtcaaatcctgctcagctattcccactacccacaaagtgtacctttttcgtattccttactttttatacattagctcattttcccccaaacaatgcaataaagtaaaaaatattactctattttatagaaacttgcagctcagaaaggataagaaacttgcaagttgatccaaaataaatttctgaaaannnnnn

SEQ ID NO: 21348 - DNA, 670 bp, Homo sapiens
  misc_feature 1, 670: n = A,T,C or G
ncagcatctccctgagatgctggcattccttgggccgatcccacagcagctgcagtggtgtgctggtgagagaagattgtgtggatttctttccagctttgtattcagcgaccaacctgtttgtggtttgtaagcggccatcgtggaagtatttacacaacggcaagcactaggactcaggcccccccacctttctctgctggtgctccttggagaggcaccccgtggcggtgcagttttggggctgcagccttcttctttagagaaggggcaggtgccactgctctctgagggaagggccttgagagaatagcagctgacagttcttccctccctactttctcaagaaccccagtttctaactctacccttccctttggtgtctcctcaggatgtgggctctcttgatgagaagatgaagagcttggatgtgaatcaggactcggagctcaagttcaatgagtactggagattgattggggagctggccaaggaaatcaggaagaagaaagacctgaagatcaggaagaagtaaagccgcctggctgagatggggtgggcagggcagagctgatcagggccgagcagaaccgcactcttcccaaataaagcttcctccttgaaaaaaaaaaaaaaaaaagtcgaccggccgcgaatttagtagtagtan

SEQ ID NO: 21349 - DNA, 501 bp, Homo sapiens
  misc_feature 1, 2, 3, 4, 495, 496, 497, 498, 499, 500, 501: n = A,T,C or G
nnnncgaattggagctccccgcggtggcggccgagcgggcaggtacatcagttcatcttctgctggcaggattccactaaaatcaaaatagcaccaaaggaagaaatggttaagggcagccagtggaagatcccactctcctgatggcaaattccagagctgtggtttagctctagtttctgggaagagcaatcattacccaactgtgagggtagggtgcattactaagtaattcattgacatctttcccagtagccttttacttaacagcgaataataagaggaaggtaaagtatttaattaagagccacagccctgtaaacatgaaatcattattccagacatcccttcgaatatgttgcctactttaaaaagaagttatttttctcccatctgggagaaatcttcattattaaaaaaaaaaggaaaaagtttatcatgaggataatattttgggagtcaaaggccgtggctcatgcctataatcccaacacnnnnnnn

SEQ ID NO: 21350 - DNA, 853 bp, Homo sapiens
  misc_feature 1, 2, 3, 4, 5, 6, 7, 8, 853: n = A,T,C or G
nnnnnnnngcttgaaaataattggcgctggggagtggttgaggatagaggtaaaagagattggccatgtattaacaattgggaagaaagcgagtgatgagtacacaaggattcattatctgtattaatttttctacttttctatgtttatggaaattaccttcaaaatgtaaaatatatgtttggaaacataaaaatatattccaaaatagctcatgaattaaatgttagtcaccatagaaattacacgttttttggaatagaacagtcatgaattatactatttcaaaacatgtgggatgcaggtaaagcaggacttaagggtaagtttattgacttaagtcttccaaaaaaagatgtaaatgaattaagttcaattcaaaagttagaaaatgaaacacagaaaagctggagggaaaaagaacagaaaaaatagaaataagttaataatgcagtcatcttttattaacaggtagctgagaagattggattgaactaaggcattattctgagggaggttggtctgtaatattcctctctttaatatccttggttctgtctcggtgctgtgctagcctgatagaagaattgggcagtcttgagccaggtatgatgctcgcctgcagtctcagctgcttgagagacagacagtaggattgtttgaagccaggcatttgagaccagcctaggcaacatagtaagacagaaaagggggaaaaaaaaaagggtgtgctaatgtaaagagaatttaaaagtaggacttcggtggtcttaaatagtttcggcctcagtgagtaactactcaagttatgtagaaatggctcagtatttttacagcgcacacttggtgccan

SEQ ID NO: 21351 - DNA, 729 bp, Homo sapiens
accgggtggcggccgcccgggcaggtactattactaggttcattgtttccagaggggtgaaacggggctttggagaggttaaataacttgcccagggtcacacagctattaagtggtaaagctgggatttacatgagcccagacaaagaacccaagaagctaagctattctcttgtaatacctccaacataggaggcaagaagtgaggtattatacaggttgaggagataaaggggagagaggcctgcagtgctaacaggaggagctgggattcatcctggcttgttctgataggtcagttagtcttagagatacccatgaggtcacctactcaaaatggggctcagagtagccttgtcccattcttgtccagtgggcgcagctacagtcttcctggcctggagtgactggaggctgtccccacgtcccacttcagtgaggcattcatgtgcacccagcacactttctagctttatttgcctggaggggaagattctccagaaccttgttaagatgcacagtgtggtcctcggactggcagtgtggcctcggcagtccctgggagcttgttaggaatgcagaatctcaagctcctccctactgaatctaaagctgcattttaacaagatcccagctgtttcgtatgcacatgaaagtttgagcagcactgctctagaaagttacttttatctttactgtgcccaccaaagtaatcaaactttgtgaagt

SEQ ID NO: 21352 - DNA, 1214 bp, Homo sapiens; identical to SEQ ID NO: 20119

SEQ ID NO: 21353 - DNA, 1213 bp, Homo sapiens
  misc_feature 1, 2, 3, 4: n = A,T,C or G
nnnngatgtactgcatgctgtggcttcgctttttaattttttttttttttttaagagagagaggagccactcttgcccaggctggagtgcagtggctaactgcagtctctcactcctgggctcaagggatcctccagcctcagcttcctgaatagttgggactacaggcacaagccactgtacacagctgctttgttatcttctacatatataccaaagggataagttaggaacaccagaaactcagtagtaactcactttaaccttgcttctggggctccaattcaagtgatgctcaatttcaaggtacaaggaaaaccatgagaatataaagtcataatgccatttccactcagatgaaaagatttatctatctttagatactcaaaattattcttggcattttagcacttttggtacacatttcctgatgtaggaaatagtaaaatttcagagcctatggcattggctttcaccacctatgcaattttctacacatctgaaaattaccagtttatctaactccttaaatgttcctctcttcaacaacaaaaaacacaaacaaaaattgctggaagaaacaggaagcatccaggtccaaatgacagcataacagactatgaagaaacagggcttaagtgcccatctagaacaagatggtctagattacaataaggaccccatgggacagaacatcaaaacattcaactttcaagtaaatgtcttggaagtaaacatttaaaatttataggacttcctctggcatgtaggtatgatattagaagagtttcctttgacaaaggacaatgacccaagaagtaggtttttttttttttttaaaggagagacagtctcactctgttgcccaggctggaatacagtggtgtgatcatagctcactgcagcctcttttaactcctgggctcaagcaatccttccaacctcagcattctgagtagctgggatcacaggtgctccccatcacaccctgctaatttaattttctttgtagagacagggtcttgctatggtgcctaggctggtctcgaactcctgggctcaagtgatcctcccgcctcagtctcccagtgttaggattacaggagtgagccactgcctctgccttcaggtagcaattttattagcaaactataagcctaaagtaatagttaaaattctcactgtgatattcattactaacccctgaacctgt

SEQ ID NO: 21354 - DNA, 2538 bp, Homo sapiens; identical to SEQ ID NO: 20316
  misc_feature 2538: n = A,T,C or G

SEQ ID NO: 21355 - DNA, 2688 bp, Homo sapiens
  misc_feature 1, 2, 3, 4, 2660, 2661, 2662, 2663, 2664, 2665, 2666, 2667,2668, 2669, 2670, 2671, 2672, 2673, 2674, 2675, 2676, 2677,2678, 2679, 2680, 2681, 2682, 2683, 2684, 2685, 2686, 2687,2688: n = A,T,C or G
nnnnggccctcgaggccaagaattcggcaggcgggactcggccgacgcgagcgccgcgcttcgcttcagctgctagctggcccaagggaggcgaccgcggagggtggcgaggggcggccaggacccgcagccccggggccgggccggtccggaccgccagggagggcaggtcagtgggcagatcgcgtccgcgggattcaatctctgcccgctctgataacagtccttttccctggcgctcacttcgtgcctggcacccggctgggcgcctcaagaccgttgtctcttcgatcgcttctttggacttggcgaccatttcagagatgtcttccagaagtaccaaagatttaattaaaagtaagtggggatcgaagcctagtaactccaaatccgaaactacattagaaaaattaaagggagaaattgcacacttaaagacatcagtggatgaaatcacaagtgggaaaggaaagctgactgataaagagagacacagacttttggagaaaattcgagtccttgaggctgagaaggagaagaatgcttatcaactcacagagaaggacaaagaaatacagcgactgagagaccaactgaaggccagatatagtactaccgcattgcttgaacagctggaagagacaacgagagaaggagaaaggagggagcaggtgttgaaagccttatctgaagagaaagacgtattgaaacaacagttgtctgctgcaacctcacgaattgctgaacttgaaagcaaaaccaatacactccgtttatcacagactgtggctccaaactgcttcaactcatcaataaataatattcatgaaatggaaatacagctgaaagatgctctggagaaaaatcagcagtggctcgtgtatgatcagcagcgggaagtctatgtaaaaggacttttagcaaagatctttgagttggaaaagaaaacggaaacagctgctcattcactcccacagcagacaaaaaagcctgaatcagaaggttatcttcaagaagagaagcagaaatgttacaacgatctcttggcaagtgcaaaaaaagatcttgaggttgaacgacaaaccataactcagctgagttttgaactgagtgaatttcgaagaaaatatgaagaaacccaaaaagaagttcacaatttaaatcagctgttgtattcacaaagaagggcagatgtgcaacatctggaagatgataggcataaaacagagaagatacaaaaactcagggaagagaatgatattgctaggggaaaacttgaagaagagaagaagagatccgaagagctcttatctcaggtccagtttctttacacatctctgctaaagcagcaagaagaacaaacaagggtagctctgttggaacaacagatgcaggcatgtactttagactttgaaaatgaaaaactcgaccgtcaacatgtgcagcatcaattgcttgtaattcttaaggagctccgaaaagcaagaaatcaaataacacagttggaatccttgaaacagcttcatgagtttgccatcacagagccattagtcactttccaaggagagactgaaaacagagaaaaagttgccgcctcaccaaaaagtcccactgctgcactcaatgaaagcctggtggaatgtcccaagtgcaatatacagtatccagccactgagcatcgcgatctgcttgtccatgtggaatactgttcaaagtagcaaaataagtatttgttttgatattaaaagattcaatactgtattttctgttagcttgtgggcattttgaattatatatttcacattttgcataaaactgcctatctacctttgacactccagcatgctagtgaatcatgtatcttttaggctgctgtgcatttctcttggcagtgatacctccctgacatggttcatcatcaggctgcaatgacagaatgtggtgagcagcgtctactgagatactaacattttgcactgtcaaaatacttggtgaggaaaagatagctcaggttattgctaatgggttaatgcaccagcaagcaaaatattttatgtttcgggggttttgaaaaatcaaagataattaaccaaggatcttaactgtgttcgcattttttatccaagcacttagaaaacctacaatcctaattttgatgtccattgttaagaggtggtgatagatactattttttttttcatattgtatagcggttattagaaaagttggggattttcttgatctttattgctgcttaccattgaaacttaacccagctgtgttccccaactctgttctgcgcacgaaacagtatctgtttgaggcataatcttaagtggccacacacaatgttttctcttatgttatctggcagtaactgtaacttgaattacattagcacattctgcttagctaaaattgttaaaataaactttaataaacccatgtagccctctcatttgattgacagtattttagttatttttggcattcttaaagctgggcaatgtaatgatcagatctttgtttgtctgaacaggtatttttatacatgctttttgtaaaccaaaaacttttaaatttcttcaggttttctaacatgcttaccactgggctactgtaaatgagaaaagaataaaattatttaatgttttaaaaannnnnnnnnnnnnnnnnnnnnnnnnnnnn

SEQ ID NO: 21356 - DNA, 488 bp, Homo sapiens
  misc_feature 488: n = A,T,C or G
actgacatgacacttaaagaaaatgctcattgaaccagcattttaggtttcagatttttggatttggaatataacttatacttctggcttacttgtttcttaaggtcatccctttaatgaccttgaaaattagaagaagcaaaattacttttcttatggttagccttctacgctgtgcctcagctctaaatagacattaacaagtagaacatagagatttctggggcttgtagatgtaggaagtattgatataagatgtcgagaaagttctgaatggagcctgttaccaggaggctagaaaaaaatccttccctctaagctacctgctataatgttttgcagaggcaatacaggctcagaaaaagtgatggatgtccatgcagtgacatatatattgtgtttttgtttttcaagatttcattttgagtccgtaataaatatgctatttaggattgttgacagcctgaaaaaggtcaagactccgggcn

SEQ ID NO: 21357 - DNA, 490 bp, Homo sapiens
  misc_feature 1, 2, 3, 4, 5, 6, 7, 8, 9, 10: n = A,T,C or G
nnnnnnnnnnacttttttttttttttttttttttaaatttccaccggtgccgaggcctcagtggagcctggctggcggcttgttagagcctgcagcctacctgtcctgcataggaatgaagccgggaggagttacatgatatgccctcgttgcaggccggggacacagctaccgcattcagagaccaggaaacagagcaaaagctgttctcagagtgcggctgagcgaggagctacaggggaatggagggggccaagctgcatggaagattgtcccattaacctggctttttaccagggtggtcctctccctaacccctaagaatcacaccctgcatccaaacggcagcaaccccagaaaacgggctaagaactcccccgaacagagctagatctagaaagcccagcacagggagctgagcctgagcagcctctctccaagggtggctctgaactccacatgtgtgtacagacaagggggcgactggcat

SEQ ID NO: 21358 - DNA, 508 bp, Homo sapiens; identical to SEQ ID NO: 21293
  misc_feature 502, 503, 504, 505, 506, 507, 508: n = A,T,C or G

SEQ ID NO: 21359 - DNA, 649 bp, Homo sapiens; identical to SEQ ID NO: 20099
  misc_feature 1, 2, 3, 4, 5, 6, 7, 8, 9, 649: n = A,T,C or G

SEQ ID NO: 21360 - DNA, 351 bp, Homo sapiens
  misc_feature 1, 2: n = A,T,C or G
nnaacaacctaagttaacatttaaatgattaacactaaattatcaattacgcaagcattatttttaaaagcacatgtaactaagcttcaggagtctgattagtttaatccaagaaaacataaaatgtgaagccactgttttcatactcactcaatttgggcatcactggctacaagcaggcttaggcactccaggcttccaacttttgctgccttgtgtagtggagcttctcctaaaacatccttaaggtaagatggtgcattttagagtctcccaaaaacactttttgtgaaagttgatgagcgacatttaatattagctatttaaggaagctagttagaactgcattgt

SEQ ID NO: 21361 - DNA, 2315 bp, Homo sapiens; identical to SEQ ID NO: 20885
  misc_feature 1, 2, 2313, 2314, 2315: n = A,T,C or G

SEQ ID NO: 21362 - DNA, 649 bp, Homo sapiens; identical to SEQ ID NO: 20099
  misc_feature 1, 2, 3, 4, 5, 6, 7, 8, 9, 649: n = A,T,C or G

SEQ ID NO: 21363 - DNA, 1018 bp, Homo sapiens
gcgtccgtaggttaggcggccagggacccgcgccggtttccgcgggcgacctgcaaatcctgcccggggcccggcaggcgctgcgtcccggcgcgttggcagttggcgacccccctcgaatcccccctctgctgcgggctccccgtggcctttgggaggctcgctgttatactttctgctgagtgccctgggcctgacggtctgtgtgctggccgtggcctttgccgcccaccactattcgcagctcacacagtttacctgtgagaccacactcgactcttgccagtgcaaactgccctcctcggagccgctcagcaggacctttgtttaccgggatgtgacggactgtaccagcgtcactggcactttcaaactgttcttactcatccagatgattcttaatttggtctgcggccttgtgtgcttgttggcctgctttgtgatgtggaaacataggtaccaggtcttctatgtgggtgtcaggatatgctccctcacggcttccgaaggcccccagcaaaagatctaacattcttgctcaaagttgcgagagaaagtagcacatggagtagctgggttggggcggcggcctcttctcttcagctcccttagcttggctccgtaagtggatcacttgccaaatgctttagatgattgcctctcaataattgaaaggtggtggtagttgtattgctgcactgtcggtgttaagagaaattactctcacaagagcagaggcctgaagattctttcttctgaagggatgatgagcctggactctctggactcctagattatgaactcctgcagtggaccatgtcctattttttggaggcgttggggggaattgtcttacgcagcacccaagcacactgctatgcaatggaccacagataggaagcaagcactgcatttggctcactgagtttgtagcccctgccttttatagcaaacaagttgataataattgtgagagtgaaggcagatgaaacacacagtactcagagtgagcggacgc

SEQ ID NO: 21364 - DNA, 731 bp, Homo sapiens; identical to SEQ ID NO: 20529
  misc_feature 1, 2, 3, 4: n = A,T,C or G

SEQ ID NO: 21365 - DNA, 953 bp, Homo sapiens
  misc_feature 1, 948, 949, 950, 951, 952, 953: n = A,T,C or G
ncggtcctcgataggcagactgctctagtactcacgttagggagctagctggataccagctgccagggggcaggactaacaccctgaagtatgggctgctgagacagctttctccctggggagctgagtcatcactgggctgctccctattgcccaaggcccaaacaaaaactgtgctatgccagaaacccaagttgccaatgagcctgaatggttcaggttaccaaactgcagctgtattctgtttccttggcccaatactccaaagcaccacttcttccctagagtagggcctgtgctgtgcctggccgcccagaaacgaaaagctacaacctggccctttgggcccaagctgctagggagtacatcagagttacagatcttggctctgtggtaaacctacctccaattctaccacatggagcaaatctatagctcaaaacccaggtgccacaataggttcatcagatgctgagcctagaaccccagacccacagctgccctgagcacctgcacctggaacccagagccactgtacctgcctataggccatatcatacttgacagccgagaagtatcttcatggctaagtaacttcattgtggggcaaatgaaaataggaggactccaaaaaagcccttgccattaacaacctatgccattactgctacaaacttttacaacctaggccactgaggaaaacaaagttactgccaacattaaatactgtggataaagctgaacaaagactataccatttcacttatctggaaacagagttactacacccttctcaactagcacactaaggaccaagtgcaggtgaaagcctctatgaaagtgactgtagaaaaatgggaagacgccattgtttcgccagatgccagacatcaatgcagggacaaaagaaacatgaaaaagcaaggaaatgtgaaacatgaaaggacnnnnnn

SEQ ID NO: 21366 - DNA, 634 bp, Homo sapiens
acacaaagaaaaataaggcagaggagggggatggtgactgagaggggaaagggtcaagattctctcaggaggtgctacttaaggagagacgagaataaaatgagggtgtgaaccatgaggatattttggggagaaggcagaggaaacagcaagtgcaaagttcccaaggcaggcacacacttgatctgctctaagaacagcaaaaggatggatggagcagggtgagcagaaggtgtggaaagctagatcacctgaggccatgataaggacttcagcattaattctgaggaaggtggagagccccagagggcactagcaaagaagtgacatgttttcttatttaccactccagggacttttaatgttgaatgccttacaactgatcattacacaggcggcatgaagcaaaaatatactgtgaaccaatgcaggcggcagtctgaggattccaccttctacctgggagagaggacatactatatcgcagcagtggaggtggaatgggattattccccacaaagggagtgggaaaaggagctgcatcatttacaagagcagaagtaattctccagactctgattcccaatttcagcagtaattttaggtttccttttcagagaagtaagaattaccc

SEQ ID NO: 21367 - DNA, 689 bp, Homo sapiens
  misc_feature 1, 2: n = A,T,C or G
nnctgtttctgtgtggtatcgaccgccagaatcatgggccttggttgttcctggtgttaaaaaaaaacccaactccccgtgtcttgcggcttccctggcatgaaaaaaagcgtgctgaagtggttggagaagagttcagtgaggacatcatgggtgagaaacttccgtaggttcaagccattctccagaaagaggcggacaaacttgggtctgtcctttatgagagccgtaaacatgacttcttgaaggtcagcagactcccatcggcggtcattggtgaaaatctcatcattggctaagtccagctggttccactccagcagaagcttcagctgcccattccagttatccttgtcttgctcactggtgctgaaggctttgtatagagcgtaggagatggcattgctcacaatttcatccccagcttcttccattttaataactgttaataggtgagaacattcgagaatttctttgagctgtagtggagttccggatcagcttctcatttctgaattgcaatgagtccttgactacagtgagaataaagtattggttatacacgtatcaaaaagcccctatcaaaaagctgagagcctcatttgactagagatgtgtgcatctgcgtgcaggtgctgtgtgtgtgtgtgtgtgtcacaaagcctccccgctggcagatgcccccgcgt

SEQ ID NO: 21368 - DNA, 879 bp, Homo sapiens
  misc_feature 1, 2, 3, 4, 5, 6, 750, 846, 852, 872, 879: n = A,T,C or G
nnnnnngctataatttcttaaaattcaatcaatttcacatccattaaacttacaagtaccgtaatccagttttcctaggaaaactaagcccagccgaaccttgggaaaaatacctctgtgttaaacatatatacatgatcgattttaaatgttttcaccacaaaaaatggtaagtacgtgaggtgatggatttgttaactctcagaaactggcatgccaaatcaaaatgggtctggttcaatcctccctaatggcaatgtaaacccctctaactaatcccacttctcctaattatctttttctccttacgaacctaaaaatctcaccatttctattagcctgaaaataacatccctctgttcttctcttcctccttcagcactggatctcacttacaataggttttatttaataattatcttccttacactttctgtctcaccagtttccccttaaactgatttacctgctacacaaaattattcttattgggcttatgtgccttttcctccacttattcgacctctcacctggatggatgctcctgcagaaatctatactaacgatagtgtgtggatgcctggaactacagatgaccgttgccctgctcaaccaggagaagaaggcactacatttaatgttatcatgggttataaataacaccctctgtgcctcagaaatgcacctggttatatccatctagaaactcaagtctgggctgcttatcttcccgagggatcagcttcagangaaccgggacatttggtctctgggcctctcctttctcctttaaaacaaatgaaaagggggagtaatgggacataccccatactttcaataagtagncttcangcatttcctttcacccagangagcaan

SEQ ID NO: 21369 - DNA, 906 bp, Homo sapiens
  misc_feature 1, 2, 3, 4, 5, 889, 906: n = A,T,C or G
nnnnngtgcccatagtaacagtgccaatcacagctccatcaaacaaagaaggagaggaagaactgaggctactaaagataaagtgatcatgcctggtacaatgaggatacaatgtgtagagcacagcatactgaatggcagggaagtgaacagccaggtcactgtgcacaatcatcagattcttactcagaagtgcaaagacagttggagatagcgcccacatccctattagtgagtttttggcatttccaattgtagtcagggcactgaggtcaaatttaactacaaattttgcattgtctacattgaacacatgattcttaaaagcctcatgttttatttcagaacaggactcaggaagctgcagactgtgcaggaggttgtttagggcacaagtcatttctcccaatattaacttataggcagtctccagaacaggaatattcttcaagctgagcactgcttgataaacagcatgggctacagcaacaacctctttttctttgtggtatcgtagaaatagtagtttagatgatggtataaaaagcttttctacaaaggacgatggaagtttcgtatttatctgctcaacaatcagcgtgagcaaattcaagactgagatgatataattggtaccacaagtctggcaattctccagttggtctaatccatatgtaatgaccatgtcacaatgtatagtcatgctaggatccaagctgtgtctctgaagcagcggtttcccctcgaacttggccgacaccaccaggactcggaagcacatgctccgcctccaggtcccgctgcagcttctcgcggaggtattcggcgctgagttccatggcggcagtccagctggaacggcagcccagcagggacacaaccccagccngggcgccggcccggacn

SEQ ID NO: 21370 - DNA, 891 bp, Homo sapiens; identical to SEQ ID NO: 20416

SEQ ID NO: 21371 - DNA, 743 bp, Homo sapiens
actccagcctggcaaacagaataagattctatcgccaaaaaaataaataagtaaaataatgttccaactaagtaaataccaatagttttaagttatcccctttcttgtgctttgatcactctccaggttaatgtcagcaaaaagggtggccgctctggtttcagaatccagaggatcagccacaggcctaagcgcctgtccctggtccctccacggcctctcctgctggggacacgacgggctgtgaagagggtaaaaataatacacgcactgtactttaggcactaactgtcagcatgtggtataaagttagacgttaagagaaattcctgtgctcctagctgcttcatcatacagtgatgaaagcagaaagcacaaacacagggtcaaagtggagaccggaatcacaggtgtgcatcccaacccaccatgactggcaaaccagcagtgggttcaagggcactgctggcctcttcctctcctttcatacaatgaggagcaacagaaacactgagtcagcgctggtcagggccgaggacacagctcatctacccaaccgtgcccaaaatacagttggtatcacaggcaggtgacatcatgcaggggctttttaactcaagtgagcaaacacgaatgagctgcaaataccccaaatggacaaacgcgcttcccagtggccctgtgtgtgtgctggcgtgtgggcaaacacccatacactctggaggtagatgtggggtataggt

SEQ ID NO: 21372 - DNA, 1462 bp, Homo sapiens
  misc_feature 1, 2, 3, 4, 5, 6, 7, 8, 1462: n = A,T,C or G
nnnnnnnnacaattatttttttgtgtaacttttctctgaaaaaaaggtttattgcatatggaaatcaatagatatcttttacaaaaaaaggttagaataaagatctcacatttgtaaaggcacatatgaaacattttatagcaagcacaagggcagtgagaacatcaacaaggtccaatatctaaataagactttataaaaacagataggaaacagtgcaaaaaatactgtcaaagtcagttctatacacctcataactgtgtatacaactggcaagcataagcttatttactgatataaaatagcacatagaatagcatgcatagttttattttaggcttttcatattattaaattgatagggagtctataccaaagtacagttgacatgaatagtgataaaaatcactccccagcttagggaatgtcctataaacatctcacccctccctctgcttacaactacagtttggtagtaaggagactgggcttccatcttgcaaggtggcaagcggccaccacagggggcgaatgtgctctcaggatcccaagtcccaacctggaatgcatttcttacggcaacaacataagagatggtgattaaatgtctgggtcagcccacaaaagccaaccagatctggctatcacagccctccatttgggctgtggtggaggtcagtgggcttctatgggctgacgcaagaaccttaagaacaaaccggtttctaagttggggacttgtctgtacatcgtttcaaaatgaaacctaataaatgtcatttgttttgaatgataccaaaattcacaacattttgtgaaacaaagatcaaggaaagcatcaaaatactgaagtagggagcacaagcctagtccagtgaaacaaactagattagcttgttacttgatgtaacacaagttacataaggttacacatttattagtaatttgcatatttaaacctttttttccactgaagtatcctcaagcacattaattagctattgaaggaacaaaggacatacataggaactcatctctgatgaagagtagctttatgtcagaaaggagaaggctaatgaatttttaagattccaaacagtggcaagaaagttcaaaggaaattgcagtaaaattgtacaatgttcaagttgaaaaaaaaaatggctctgaattacagcattcagttctatgctcaaggtatgtattagctaacactgcagttgtcagaggtgggaggcccctgagaaatgctgagaatgccaggcaccccagttctgagagccaccctagctaaactcaaagcagcattcttgagattttagcaaaacgctccgccccaagccacaaaaagatcccaatccaatcttttcagctttatcctctaaaaccttttgtcagatgagatagcatttgtgtttcccaggaggagaaggttggggaagaaaatgaagatagcttacan

SEQ ID NO: 21373 - DNA, 508 bp, Homo sapiens; identical to SEQ ID NO: 21293
  misc_feature 502, 503, 504, 505, 506, 507, 508: n = A,T,C or G

SEQ ID NO: 21374 - DNA, 799 bp, Homo sapiens
  misc_feature 1, 2, 3, 4, 5, 6, 7, 790, 791, 792, 793, 794, 795, 796, 797,798, 799: n = A,T,C or G
nnnnnnngagtcgagggtctcactctgttgcccaggctggagtgcagtggcttgatcatggctcaatgcaaccttgaactcctgagcccaagcaatcctcctgcctctgcctctgcctcctgagtagctgggactataggtcaccaggccagggtaatagagatgggggtatcgctgtgttgcccaagctggtctcacctcaagtgatcctcctgccttggcgtcgaagaaacttttaacgtttttatgtagtgaacttagtggctgtgttgaatacttatacctagttgtcatatttattctaaaaattcaaatcattcccttgccagagtctgttttcaatttgcattccctaaggaacactttctttgattcagttatcaggaactgttgccgttattacatcagatgggagaatgattgtgggaacactgaaaggttttgaccagaccattaatttgattttggatgaaagccatgaacgagtattcagctcttcacagggggtagaacaagtggtactaggattatacattgtaagaggtgacaacgttgcagtcattggagaaatcgatgaagaaacagattctgcgcttgatttggggaatattcgagcagaacctttaaattctgtagcacactgaggaaaaactacatacttggacatctgtaaatctttgtacagaaactgattattctgaggatgatatatggaggttttatgagtgtgtcactggattttgactccttattgattcattgtaatatgtaaattaaaatatttctacannnnnnnnnn

SEQ ID NO: 21375 - DNA, 2745 bp, Homo sapiens
  misc_feature 1, 2, 3, 2734, 2735, 2736, 2737, 2738, 2739, 2740, 2741,2742, 2743, 2744, 2745: n = A,T,C or G
nnnatgaatttacttttcttaaaaaaaaaaaaaaaaaaaaaaaaagagtttctggctgatgggtgactcaaagtgcaggacctcctggccgtggggcagaggggtttgcccttctcggagggtacctcctgttccctgtctgagcatcctgcatggaagtcaaaggaaatccctttcttggtgacgacttaaatctgggttccctcagacattgggttgcaccccaacaaatattaaatggcttcttcttaaagcccagagaaagaggttttttaaaagactgtcgccaaatagctgagccaaaaggctgatcagaattcactttttggaatgtggcagttaaacactaccttgatcattctctcctctttcctcgaggaactcctggagggtttgagcgtctggaaactctctgctctgacccgaggaagcaccctcctgacgccgccttcctccggttattgaaaggacgcctcagaaatgctttgttttcttttacgatgtattcagaagcctttactgattaaagttttcttttatttgggtggccgggagagacccagggaggttctggaggttcctttctgtctcctggccccaccagggatttccccatttctgtttgctgcctgaaagcaggatgaggaaggccaaggagagtccttgcacccgtgagcgtcaggatgaggaaatgacaggaggaagacgtgggtttgggttagtggctgctggcgttttggcccttggtgtttctggagcctccagggatctaggggagcctgggctgcgtgcatgtcgataagcagagctgttcttggggagaaggagggaggtctcgggagtgtagcaccatgccaaccagccctgcgcgaagacagagtgagccacgcccggatggcagggcatgtttctgttttggtgtctcactttcctcccagcgtgacttatttggggattcctcagggcctactggaatgtgactgcccactgcccagctgcctcgggtacaagtcctggccctatgtcccagctgtcaggggctcagggaatcctacccagccacctgtcctgggatggagtgtcagcatccaccccttggttgtcatcgaggccgccctcccagtcctgggtgaagatatttgggccaccagggctcccttggccccttcacgtaggaaatagacacgtgctttttaatgcaggacactttgagtgttacaaaatctgtagacctggcagtagggtcatgatgttgggaagggtgtagtgccctaggttggtgacagaagggacagacacttgtgcacaggtgtctttggtgatggggtttttttttttataacttagtaaaaaaaaaaaaatgtatgtggaattctgtctcttggtaaagctcaaagccaggctagcctgaggtggcgcagggctctccttcctgtcccttcgatctccttgagaattaagagctggcagctgctgatggtgtttcccaacccccctcacttcccaagacaacccccagcttcaggtcctcatggggaggggagggcacgttcttgacacatgggaacttcgctcaggagggcctccccttcccctctccctcagagttttcactgccgtctcgtctttagaaagctgtttgaattccccccgcccccagtttggaccgtgtagatataactggatatacggatttttctctttgtgcaggcttcttatgccgttggtatacagggcaggaaagagaggaataaagggagagagcagtgtggaaaccacggtggttttgctttgttcttactaggttttggtgccaccttccctgcctgcgcttgtgccccctctcctccttggcactggcggcctccttgcctcccttccaccagtgctgccatcccgtgcctgtcgtgttggttcttcacacgtgctctgttctcggggttgttccattcatgccttcttggagggtgagggtggcttgggaaccgacccagtgatcatgcctactttcttctttgtatctccctccttcccagcccacccgggcagcagactctgatggaaggaaggtgccgtaggtgggcttttagaaactaacgggactggttttcaaagcagttatcttgggaaactgtttattccagcgatgtgacttttttcagaatatttcttggaatcatattcagagtctggggctgtgtgttgagcagccttaaggatgctagacactcatttagtgcccagggagtccagcgaatgacgtctgtggccaagcgaggtctcaggtgcaaagcaaaaggaccatttaaagtaaaatagcttggattcaatcatgtgacttttaaattggctcagaaagcaattttgtaatttcagagagtgttttgagccatggccacgttgtcattgtgagtctatagcttgactccttggagaacaatattcatttggttgtggagactgatttgctgggagaaatctgtcctgttactttctggtcatcccaggttctgacttttaccaggggcaaaaaaaaaaaaaaaaagcaagagggagataaatcccatctgtgagtttgtcttattggcgcctttttcctcagctgtcttccaagtattatttttactgttaaaaaattttttaaaaatgtgaaatgtaatgtttttacagcaacaatatgaaatatattttataaggaataaaatggtaccttgtctgaaaaaaaaaaaaaaannnnnnnnnnnn

SEQ ID NO: 21376 - DNA, 417 bp, Homo sapiens
ataggggagtcgacccacgcgtccgtaatgacagtgcccttttgggtcagtaatgtggcttttcctctcttctctcggctcctcacctcaccctacccaccccctctctcgacgctcagtgctcgccaaacccggagtcatcagtgtgatgggaacctaagcgtgggtggccaacatcatatacctcttgaagaagaaggagtcagccatcgccaacttgtctctgtagaagctccgggtgtagattcccttgcactgtatcatttcatgctttgatttacactcgaactcgggagggaacatcctgctgcatgacctatcagtatggtgctaatgtgtctgtggaccctcgctctctgtctccaggcagttctctcgaatactttgaatgttgtgtaacagttagccactgctggt

SEQ ID NO: 21377 - DNA, 436 bp, Homo sapiens
accttagtcttgaggacttatcagcctgagggctctcatgaccagcacgcagttatgcagagctcagcactcagatcagagccacctctaggaaccacatggctgagagcagacacagacaggctccgcagcccctgacacagtcccatggctgggtttacttaagacaacagctacacacagaacgatgtcaagccccattctcccatgtttttcttacctaaggtaatgatggcatgtgctctaatcacagagggcatgacagaacctctgacctgggggggtggctgagacgctggggcctcactgctgccttgagatgatggtgagtggtcagcatcagcagacgaagccaggacggactgaatcagaaggaagatgcgcttctccaccctggctggacacagctgggctatatcccctaaggtaaaaatgt

SEQ ID NO: 21378 - DNA, 227 bp, Homo sapiens
acataccataggttaagtaggcgcctgatattaggaagatcaataattcatctaagtgctgtatgaaacagcatctacaaaagttgctttattcaacaaactttgagggaaccgtggtacatcaccctgctgagggacatccaggacaaggtcaccacactctacaaaggcagtcaactacatgacacattccgcttctgcctggtcaccaacttgacgatggactt

SEQ ID NO: 21379 - DNA, 1231 bp, Homo sapiens
actttccgccgccgccacagcggccccctctctgaagaatgcagccttcctaggtccaggggtattgcaggcaacaaggacctttcatacagggcagccacaccttgtccctgtacagtggacagcttagcatgttgacaactgagaataaaatgctcagttctgaactggacaatgtaagacacaacgacgaaacactggaaatggaaattcaattacatcattgtagactggctactgctctacatgattgtgaccaaagtcagagagctgaaagagacttctttccagagaacaagacatgaacaggtttatttacagaagacaatgaattctcatttgtctaacctaaaagattacagaatctttctcaacaagtctaatgtagacagtaaaatcaacaggctaaaaattaagttccatgaaacaagataaaactctgagagaaaagatggggcaggccgccatctttcccgttcgggcaacttagtcattccagcctgagggctttggagagtacaaactgaccagggaaagaagagatcccagagcacagcatagctgctttaccaaatcatggccagactgcttctgtaagcaggcccctgatcctgttccacctcactggacaggacctcccaactggggcctccagctacccccaccagcatcccttggccaatggaaatttgaaatgttcctgggacagagctcctggagagaggggcaggccaccacctttgctgtttgggtgactagccgttctggcctgcaggctttggagagcccaagctgacaaggggtagaagaggtgcctcagcacagcacagccacgctacgaaaacatggccagactcttgtttaagtcagtccccgaacacatttctagtcagtgggtgaagtctttcaaccagggtctctggctaccttgactgctgttctctggccgacagaggtctcaggcctccctgagtcagagctcccggggggaggaccagattgtcatctttgctgtttgggtgacccagccatttcagccttagggcttcagagtgtctgaggtagccaggggctgaagtgaacccccagcacagcacagctgctctataaaaacgtggccagactttttctttaagcaagtccctgttcttattcctcctgactaggtaagacttctcaacttgcctccagccacatcttattggtgtgttcagattggcaacaggttcgt

SEQ ID NO: 21380 - DNA, 1782 bp, Homo sapiens
  misc_feature 1766, 1767, 1768, 1769, 1770, 1771, 1772, 1773, 1774, 1775,1776, 1777, 1778, 1779, 1780, 1781, 1782: n = A,T,C or G
gtcagctcaagctctgcaaccagttagagacaagttttcagactgttacatcgttcactatgttgatattttgtgtgctgcagaaacgagagacaaattaattgaccgttacacggaattcttctagaattaattaacgcgggactgacaataacatctgataagattcaaacctctactcctttccgttacttgggaatgcaggtagaggaaaggaaaattaaaccacaaaaaatagaaataagaaaagacacattaaaagcattaaatgagtttcaaaagttgctaggagatactaattggatttggagatattaattggatttggccaactctaggcattcctacttatgccatgtcaaatttgttctctttcttaagaggggactcggaattaaatagtgaaagaacgttaactccagaggcaactaaagaaattaaattaattgaagaaaaaattcggtcagcacaagtaaatagaatagatcacttggccccactccaaattttgatttttgctactgcacattccctaacaggcatcattgttcaaaatacagatcttgtggagtggtccttccttcctcacagtacaattaagacttttacattgtacttggatcaaatggctacattaattggtcagggaagattatgaataataacattgtgtggaaatgacccagataaaatcactgttcctttcaacaagcaacaggttagacaagcctttatcaattctggtgcatggcagattggtcttgccgattttgtgggaattattgacaatcgttaccccaaaacaaaaatcttccagtttttaaaattgactacttggattttacctaaagttaccaaacataagcctttaaaaaatgctctggcagtgtttactgatggttccagcaatggaaaagtggcttacaccgggccaaaagaatgagtcatcaaaactcagtatcacttgactcaaagagcagagttggttgccgtcattacagtgttaacaagattttaatcagtctattaacattgtatcagattctgcatatgtagtacaggctacaaaggatattgagagagccctaatcaaatacattatggatgatcagttaaacccgctgtttaatttgttacaacaaaatgtaagaaaaagaaatttcccattttatattactcatattcgagcacacactaatttaccagggcctttaactaaagcaaatgaacaagctgacttgctagtatcatctgcattcatggaagcacaagaacttcatgccttgactcatgtaaatgcaataggattaaaaaataaatttgatatcacatggaaacagacaaaaaatattgtacaacattgcacccagtgtcagattctacacctggccactcaggaggcaagagttaatcccagaggtctatgtcctaatgtgttatggcaaatggatgtcatgcacgtaccttcatttggaaaattgtcatttgtccatgtgacagttgatacttattcacatttcatatgggcaacctgccagacaggagaaagtacttcccatgttaaaagacatttattatcttgttttcctgtcatgggagttccagaaaaagttaaaacagacaatgggccaggttactgtagtaaagcagttcaaaaattcttaaatcagtggaaaattacacatacaataggaattctctataattcccaaggacaggccataattgaaagaactaatagaacactcaaagctcaattggttaannnnnnnnnnnnnnnnn

SEQ ID NO: 21381 - DNA, 1782 bp, Homo sapiens; identical to SEQ ID NO: 21380
  misc_feature 1766, 1767, 1768, 1769, 1770, 1771, 1772, 1773, 1774, 1775,1776, 1777, 1778, 1779, 1780, 1781, 1782: n = A,T,C or G

SEQ ID NO: 21382 - DNA, 1214 bp, Homo sapiens; identical to SEQ ID NO: 20119

SEQ ID NO: 21383 - DNA, 445 bp, Homo sapiens
  misc_feature 1, 2, 3, 445: n = A,T,C or G
nnngccggccgcccggcaggtactgtgttatggcgcagtgggtgacagttggccacatagttgtcaaaagccatggccagcagcactgtggattccatgccagataaggagtggatggcaaacatctgtagcagacaagcatcaaactggatggaggaattgaaccagaagatggccagcattttgggcatggatgaggtggagatgaggatgtcaatgcctgaaagcatgcaaagaaatatatacatgggctcatgcaggctgtgctcagtccgcacaatgtagatgattgtcaagttacctagcacagcaataaggtagagggagcacaatgggaaggccaaccagaactgagcctcttctaaaccagggaggcctattaagatgaagtatgtagcactggattcattgccattgggatccaccatcatgaagaagctgaacn

SEQ ID NO: 21384 - DNA, 673 bp, Homo sapiens
  misc_feature 1, 2, 672, 673: n = A,T,C or G
nncccaagtgtcttgcaatctttatccccagattgccacctattttacccacacaactataccccaagccaattacctctacaactgagacgcttccacagtcatctaaaaagttatagcgacccattacttctctgtgcccatctcctcatcctggaatctttatgtacacatcgtttattcacctggcaacttgaaaggcacctcgcttgtcccacacacaaagacgtggtacttctgggccacaagatccaccatctcttgtatgtgagctcattaacccttttgaagactgctgctaaccagaggaaggtaaccattcctccttatataaacacatatggctttggcagtctggaaattggctggattaccaagggttaaccatcaaaatcctcacttgctggccctccctccaccctctctttgcctgcagcaaggcagggaagagataggtggtaggggagggagaacaagactgtttagacccacaggccctttttaatggagattaagtgaccagattggtccttctccagttctctatttgttctatggtctcatttcttcctctcattatttttggtttcacaacgggaaacgttgatttcttggtgcaaggctggtttttgaaaattcgacacttactatccaatttttttgcgacgtcann

SEQ ID NO: 21385 - DNA, 338 bp, Homo sapiens
  misc_feature 1: n = A,T,C or G
nctctaacattacataaaatttcctcttgtgctaataaatcttgtgaactgtgtcttcccttagaaaaagtaatgaaagagttcagtttcttcacgatggaagttgctaaattctccatggacatagagagaaaggaatgatattctcatcatcatcttcatcatcccaggctctgactgagtttctttcagttttactgatgttctgggtgggggacagagccaatttcagagtaatctagtatgaacgatgaaagtttctgtgctacccctacaaacccatgcctcactgacagaccagcatttttttttaacacgtcaataaaaaaataatctcc

SEQ ID NO: 21386 - DNA, 1512 bp, Homo sapiens; identical to SEQ ID NO: 21331
  misc_feature 1, 2, 3, 4, 5, 6, 7, 8, 9: n = A,T,C or G

SEQ ID NO: 21387 - DNA, 580 bp, Homo sapiens
  misc_feature 1, 2, 3, 4, 5, 6, 7, 8, 9, 10: n = A,T,C or G
nnnnnnnnnnccgcccgggcagcgactctgtgggcatttatcttcactctgatgagggctcagacttgataacgcccgtggtgccccatccctataggagctggtgagattgcagcctgctgcctcccctccatcagccacagctattggatttcccacccagaatctttaggtaaatgaggtaagtcctgatttttaaaacttcttttgaatctggaatccaaacacctgagtggaaagagaagcctgctttaaactggacagatgaaactagaacagactcttggagacggctggcaggaagtgaagctcaccttacctgggcttacctcactgggtcaaatcagaattttattttggagggcaggttggctactttggatattatctgtgaatttcctgcattgtctggacttctaatctctgtgaatttaaaagccccctcgtttccctatgcctgggtggcaaaaccattcccctgggttgaattcttctggaacaaataggcagctagagataggtggctctgatatagctcagagaagaagtggttggctaagtagctgttagggctcagagt

SEQ ID NO: 21388 - DNA, 5032 bp, Homo sapiens
  misc_feature 1, 2, 3, 4, 5, 6, 7, 8, 9, 10, 11, 12, 5025, 5026, 5027,5028, 5029, 5030, 5031, 5032: n = A,T,C or G
nnnnnnnnnnnngtttttttttcatttaaaaaattttatttaatatttacatttatttttaaaataaaaattagaggaaagcccatgaactcattttccatgaacataatataatagtactcacctatctcctctacccaacttgtgttttagatgagtccttttggatctttttccccataatggcctctctccttttgctttacagtgcaatcagggcagaataacagatatgttgagtagctaatttatatttctgaagatctccatagaactcttaagttctaagtcttcatagtctttgcaccttgccaagtttgctttcctttgggaattctgtcataaccacaaggttattccccagacatgcagtttggggaaattaacccggcagtagtaaacagactggattagaaaaggtggcagtcgtaataaggatattccaataaccggggaaagctacagaaggatcttgagttaggatgatgacagttacaatagaaaggagaccagtacaagagacggtgaaaacagaatggatacaatttagttgaagaattggctgtgggtgaaaagaagaaatcaaagatgcctgaagttgtgagtttcaggtagccctgagtttataatcctagttctgactcgtactatctttggatatactagctgctgactactaactgaacaaggtagtaaccttgtcatcttgtaacttacctaagtctgtttcctcctctataaaacaaactatcaaaataaagccgatgaaaagattgaagtaaaacataaaacccttagcacagtgcctagtatccattaagcagtagataaatgatggcggtcattattagggagtagggtaaagaacagaaggttaaaaacatgagtagcagtaaggacttttgggtggggattcggtctttctactacacattacacatacctctaagcagagaaaggggttggaggggagtttgataatgtgactaataatcctcctccccctgggggggatcttgataaaggatagccacccacatggaggcctaatataaactggattgcagaatgcacttgagctgggagcccaagcgggccaggcttcttgattcctattttatcccctttaacctaggatagctaggtctatagtgcagactcagacctaacttacactttcatttgcagctgaagtttcggaacaaagacaaagatagccagatcatattaattacacggataggcaagaaagcatgagccctgaggaggaaggaagggactgtcccaggtgtacttacctcaaagatgaagaaatatcaaagacaggaaaccctaggttcttgcccttcagtcgctatctccttgccattagtaaaatgcggccgatgaatgtcctcacttctgtccatctgggcaggaggtgggaagggtgacgtgcaaatggatgggaggaacccttttttcggcagcacccaccacacccagcctagtgccacgcaccgcaagcgctccataaacgcacacagcgtcgcctctaccaggatcccgggcggccttcgcgggatttctcctggcgtcggctttcagactcccgagggtgggataaatcgagagggtggcatcctttggcttttcttctcccaggcagctctgaaccatgtttatgcaacgtttaatgggctctaataaaacggctaataattttgatccgcggaagcaccgactcgctcgctaagccgagtctgcgagggtgaagctgcaactccaacgccggaaagcgcggctaccgaaaagcgcatgcgccacggggtggcacgaagctagagtaagctgaggaggtgggcggaaaccatggcaaccatgggtgatgacgacatggggagcgtctctagcgctggattatgacgctggattatgacgcaggcagtgggcgcggactctgcggttcgcttgactgacggcgcagcctccgggcctagccacagcagcaacggcagaggccagcgggcgaggtcaagatggtggctccgcgggcgggggaggcagtggagggaggaggagtcagaccttagccagccggaaacaccgaaacccagagacctcctggggagccgccgccgccgccctctcggccatcgctgcctccgccgcctgctccacctcgagggacgcgagcgggcggcggggctggccgtgagagagacaggagaggaaggagggcaggggcggagttgcccgccttagcccccgcccccggccgcggccccgggccctgccccgcgcggccctgcccggcccaccgagccctggtgtggcagcggctcatggcggccgtggggcccccgcagcagcaggtgcggatggcccatcagcaggtctgggcggcgctcgaagtggcgctccgggtgccctgcctttacatcatcgacgccatcttcaactcctacccggattccagccaaagccggttctgcatcgtgctccagatcttcctccggctctttggtgtatttgcatccagtattgttctgatcttgtcacaacgatcacttttcaagttttacacgtacagctcagcctttctgttagctgcaacttcagtgttggtgaattattatgcttctttgcacattgacttctatggtgcctacaacacgtcagcttttggaattgagctgcttcctcgaaaaggtccctcgctgtggatggcacttatcgttctacagctaacatttggaattggatacgttacactactccagattcattccatctattcacaattaattattttggatctcttggttcctgtaataggcttaatcacagagctaccattacacatcagagagactttactgtttacttcttccttgattctcacattaaatacagtgtttgtcctggcagtgaaactgaagtggttttattattccacacgatatgtttatcttttggtgaggcacatgtatcgaatttatggattacagttattgatggaggacacatggaagaggattcgtttcccagacatactacgagtcttttggctaacaagagttacagctcaggctacagtgttaatgtacatcttaaggatggcaaatgaaactgattccttctttatttcttgggatgatttttgggacctcatttgcaatcttataattagtgggtgcgattctacactaactgtactgggcatgagtgctgtaatttcctcagtagcccattatttggggcttggaatattggcctttattggatcaactgaggaagatgacaggcgtcttggctttgttgcacctgttttattttttattttggctcttcagactgggttaagtgggctaagaccagaagagagacttattcgcttaagtagaaacatgtgccttttattaactgcagtcctgcattttatccatggaatgacagaccctgtattaatgtctctcagtgcctctcatgtgtcatcttttcgtagacattttcctgtgctgtttgtctctgcttgcctgtttattcttcctgtcttactcagttatgttctttggcatcactatgcactaaatacatggttgtttgcagttacagcattttgtgtggaactgtgcttaaaagtaattgtttctctcactgtttatacgttattcatgattgatggctactataatgtcctctgggaaaagcttgacgattatgtctactacgttcgttcaacaggcagtattattgaatttatatttggagttgtaatgtttggaaatggggcttacactatgatgtttgagtcgggaagtaaaattcgggcttttatgatgtgcctacatgcatattttaacatctacttacaagccaaaaatggctggaagacatttatgaatcgtaggactgctgtgaagaaaattaattcacttcctgaaataaaagggagccgcttacaagaaataaatgatgtatgtgcaatctgctatcatgagtttacaacatctgctcgtattacaccgtgtaatcattatttccatgcactttgccttcggaaatggctgtacattcaagatacttgtccaatgtgccatcagaaagtatacatcgaagatgatatcaaggataattcaaatgtatctaacaacaatggatttattccacccaatgaaactccagaggaagctgtaagagaagctgctgctgaatctgacagggaattgaacgaagatgacagtacagattgtgatgatgatgttcaaagagaaagaaatggagtgattcagcacacaggcgcagcagctgaagaatttaatgatgatactgactgatgaaaatagcatttattaatgattgaggtatttgtttaaaattcagttcatccaaaatggagtaatatccttcaccttcagtgtgtaaccaagcacaaaaacagtatcaatgttgaatctgtgaatggttttccgtttactgtgatgtgctactgtaaatatacctctttaattacttctggtctctttggtgacctgtttaaatttgtgtacattattgtacatagaataaaatgttttcacatttttatgacaaaatttgaacaaatagctttttaatagatgtaatgatcatatggtgcgtcacctgtgccaaatattcttcaatgaaattatataatgtaactttggacctcagtttttctttagaaatgggtgggagaatgaaaatgcaaatcaggaaaccacattaaagtcaaggaaataaaataatttgaccagaggataaaggacatgagagagtattttaaaactaaagaaaaaattagctgccagaagcaactgaggaccttttttgaaacttgagtagcagtgtaattgagctgagtttgaaagtcctgattcagagagagactgagggttgacaaataaactgtatcaactaaactttgatataaaccagaatgtgctaagtgttttttatgtaaaattgtatatttgttagccattctgtgtctgcagtattgtcataaaattgtcctttcannnnnnnn

SEQ ID NO: 21389 - DNA, 466 bp, Homo sapiens
  misc_feature 466: n = A,T,C or G
acgcggggcttctgggaatctccacaccctgaagacacagtgagttagcaccaccaccaggaattggcctttcagctctgtgcctgtctccagtcaggctggaataagtctcctcatatttgcaagctcggccctcccctggaatctaaagcctcctcagccttctgagtcagcctgaaaggaacaggccgaactgctgtatgggctctgtaagtaaaactgttttgttcaatgaaaatgcttgactctagatgaattggactttctcacccacagggagtaatttcctcacaatgtgcagaattagattagatgttggtatggtgggctgaggaggacggtagaatttcagaattatttattcccaggaaatacgtagagaatgggtattttcgttctgcctgatataggttagataacttgtttttagtcaaatggttaatcagtgtgctgatatatttatcan

SEQ ID NO: 21390 - DNA, 816 bp, Homo sapiens
caggagatcgagaccatcctggccaacatggtgaaactctgtctctactaaaaaatacagaaaattagccagtcatggtggcacgttcctctagtcccagctactcgggaggctgaggcagaagaattacttcaacatgggatgtggaggttgcagtgagccgagatcgcgccactgcactccagcctggtgacagagcgagaccccatctcaaaaaaaaaaaaaaaagttgtatgtgacagctaaccataataaaaaaaaagaaagaaaaaagagagagaaagtagggacaacactaaatcattagtaatttgagcacatttcctccaaggcatatgctatttttcaacttggcttcaatcatgtatctttattgtttttcttaatgttataagcatgtttggttttattgtagtctttaaatcatgtaatacttcattagtatgtattattccacataatagtcctttaggtagatgtaccatactttagtttactattccagccagagaaaagtactgatgtgcttatgggcaactggaaataagctagtgttagaaataattatgtttatcaagccaataaagataaggagaagtgtagtgttaagggtcacttgcctcccacagcctgcaagtccttgtcacagctgatcttgaacatagccagcacccgtgttctgatctgtttggttttggcaccatagatgatgggattgatgacaggaggcagcagcaggtagatgtcacccatgacaacacgcacaatgggatgaaggctgtttccaaagcggtgtacctgcccggacctgcccgg

SEQ ID NO: 21391 - DNA, 458 bp, Homo sapiens
  misc_feature 1, 2, 432, 434, 435, 436, 437, 438, 439, 440, 441, 442, 443,444, 445, 446, 447, 448, 449, 450, 451, 452, 453, 454, 455,456, 457, 458: n = A,T,C or G
nncgaattggagctcaccgcggtggcggccgaggtacactgggctctcaacgtggtgtggaaggtagcctgttacagtgctggattcataaaagggcctttatggtttgtgaaagaatatctgtgtgcttagggaggaaactttttgatctgcagaaaagccagaagacatctaggacatccataaaaattcatcagagagcattttactactgagctgcaaagggaaaaacttaaaatggatatgaaaagtgaagaaagtgatcataggagaaaaccatttcagatgacaagagcacctcaaaggcagcagcctcaaggagcagccatggccccagacttgtcgcacggatgcagaaaacttaatggaggaggctgaggtcagaatgggaagagtttttaaaaaataaaaaggggagctaatatgtgaggnannnnnnnnnnnnnnnnnnnnnnnnn

SEQ ID NO: 21392 - DNA, 1203 bp, Homo sapiens
  misc_feature 1203: n = A,T,C or G
ggagtcgacccacgcgtccggttggaattatctaacaaggattttgaagaaaccatcataaaagtgtttaaataagcaattatatattgtattctcttggaacaaataaaagttaaaattaaaaataaattcaataatgacttataagttataaaaagtaaacatgaactaaataaaattaaaatacaataatggaaataatagatgcagaggatggtcacaaaagaagagagcacagagcagaagatggaatcagtgaatctgaaaacatgccaacagaatttactgtctgaacaagaagaagaaaaccgataaaaaaaaatttaacagcatttcaggaaactttagaacaataataaaagagctaacattcataatcacaggagatatagaagacgaggagatagaatgtgggactaaaaaactattaaaaaataatgacttcaaccttcccaaattagatggaagacataaacctaaatattcaagaaacagagcaaaccctaaatagaatacacccaaatacattcaatttctggaaatgaaaaaaaaaaaattaaaaatcttgaaagcaaacagagaaaatggcacatttcttacagaaaaacaataatgtaaaccacagcagattttccatctgaaaccatgaaggttggaaggaaacagataatatttttgaagtactgaaagaacagaactgtgaactgtaaattcaatacccagcaataatattcttcaggcactaaagtgacatagaaaacattgtctaatgaaagaatgctaaggtaatgtgttgctaacaaacttacctttaaagaataagttctctaaacagaaaagaaatgataaaagaagaaggtttgcagcttttacaaacatccatctaaatgggtaaaattaagcataaatataatgtataatcaaacttctcttaagtttttaagccatttctaatagttgaagcaaaaattaatgacctatctggttagatgctcaaggaacatagaggaagtatttaaggtaattatatctaaaaagtagtgatagtaaagagactcatatggaaacaagttttctacacttcactcaaagaggtaaaacatcattaacagtagatcttgacattacacatatattattttaaccagtgcaattaataaaaccaatcaaaatcatgtacaatcatgcactgcataacgatgn

SEQ ID NO: 21393 - DNA, 508 bp, Homo sapiens; identical to SEQ ID NO: 21293
  misc_feature 502, 503, 504, 505, 506, 507, 508: n = A,T,C or G

SEQ ID NO: 21394 - DNA, 1000 bp, Homo sapiens
  misc_feature 1000: n = A,T,C or G
gcgtccgcttctaaagcctctctgacatatattcaatctcagttttgtagatttccttgtaatacatctattgcttttgaacattgtatcttctaccctatctactcacatcatatattcttccttatacagtttgttatctatattgtagttgttggtttaaagacatttgaggccataatatgatcttactagacattccgagctgtgacctctcacctccagcaacagcaccagttacattgaccctctttcagatattgggcagtgatttgtgggagtggagattatggttggattagcttcaattttttttttctttgtgggggatgcaatttgcaaaagaaagttcttataagagtgagactttgttcatttgaagaatgatggagctggcttttctgtcaatttctgcagctttttcttattctccaaaaaccagaaagtggtaatatttgttagtgatcaaatcaaagatgatatttaaaaacacatgttgacaggaggacctagaggcattatgagtattagaaagtctgcaaattaggttgtttgctttgtggtgaggtgtgaaacaggatatgcatttttgaaaatgtatctttggatttgctgaactgggctcaaatgtggtcaaattgagagagcttatgatgccagttttactgcattctttttagttgtgttccccaaaatcctgccccatgacctttaccagaacaagtaaacacatcctaaaaacaaagttatgttctagtatggttttaaaagtcttcccttttggttatttggaaaatagtgcaaacgtgcggtctagtggttatggccaaaggcagagcaaagggagtgcggccttagccagccccagccagctgccattgctcccacgctctgtgtggtcttgacccaatgcccagaaaagcaaggttccccactttctacctctttatttttaaaagtaaaaaaaaaaaaaaaaaaaaaaaaaaaaagggcggccgcn

SEQ ID NO: 21395 - DNA, 549 bp, Homo sapiens
  misc_feature 1, 549: n = A,T,C or G
nagtcgacccacgcgtccgtctgagtatactaattatacaattttactattatatctgactggcttttaaataggtttaactagctttccttattttagctgccttcttcacccacacttccagaggtacctggtacaaccaatctggagcttacttaggattttctagtgcagtagttctaaaatatggtccctggatcagtagtgttagcatcccctgggattttgtgttttaacaagttctctatatgattctgatgcacactaaagcttcagaatcactgctgtagtataaactgtgatggttctcagccttccccactgctggcttaggtgtttgctttcttgggtctactaagtcagttagttctttatctgtttcctttccagtttccaaaatttttgttgctatcttttcctctccagttttcctcatatgtgtgaatttatatctttttttaaaaaaatctctttattgtataagaggccaggtatggtggctcacgcctgtggtcccagcactttgggaggccgaggtgggcggatcan

SEQ ID NO: 21396 - DNA, 498 bp, Homo sapiens; identical to SEQ ID NO: 21110

SEQ ID NO: 21397 - DNA, 1867 bp, Homo sapiens
  misc_feature 1, 2, 1842, 1843, 1844, 1845, 1846, 1847, 1848, 1849, 1850,1851, 1852, 1853, 1854, 1855, 1856, 1857, 1858, 1859, 1860,1861, 1862, 1863, 1864, 1865, 1866, 1867: n = A,T,C or G
nnctggtctcgagctcctgacttcaggggatccacccgccttggtctcccaaagtgctgggattataggcgtgagccaccgtgcctggcccagaatgtttttttaaatcagatgtagcatcttcataaggtaaagcctgtcacatcagagtaacaaagctcctggagtacagtgatgctagagtagaatgttccagaagtctggccatagccccagcttctgaattacctgggagagacaagatgctcaggttactattttttctttattctgatagtacagcctctactcagagaccacggtgtgtgtcacacaaccgaggcagctagggcatattctgagggctttttttttttttttggtttccttaatgattctttaacagagtaactggattggccaaggtctgattcaagaggctgtgaggagagtagagaacaaatagactttgcctctcagagttcagagctttaagttgtataagcatggtccatgtccacctcttgtagacacttattccttaaaagtttccatcatgaaaaataatatcatgtcaaaattttataagcacccagaatgtcccagtagtcaaatgtagtgtctttctccagtctctgttttcgataataaataccttgctctcaatttaggatgatcgtaaagcctatgttcatgctgtgagtcattgtctcccacagcttttgaaacatcgttctttgtcttttctatacaacacctgattctttgtgcctcagactcattgctatcaggaagagactttgccaagatccaccaccacatttggccagtagtgtatacacattaaagtgagagctgatgaaatcacaatgctctattttgttccgacaatcagtatgaaggggtaggtcccagtttgccaatgagcaacagcctctgtatgctggtgtccaagacttacacaaaacaagtgtcagtgcagtcacagcattttcttgaatgctgttgtgacagactccagttataaacatctgcgagccatatggcacaactcatagctaaagaggccggtacagggcacatgcacagagctttgaagaacatacacaaacctgttgaatcaagttactttcctcatcctcagagactttgacaattcagagctcacagatggcagggggaattctcaggcttcccttcctcctgattgacactttttaaaggaagtgatgtggaagttgttctagaagttagatggacagtgggagcacattcgtgagtggggcttgggagagctcaaaagtggcactttgattttaggctgggcaggcagaagtctcacagtaaaatatatttcactagacgtccaaaccaacactgcattgtagtaacctcttctgaagtaactggttaaattaataactggtcccataagtcagggtcaagccacatttataacccattcgggccggccatgaagggttctgactcgacattggtatttaaatgctgttactttcccaatgcttagtagcacttgagactttatttccatcgacaaaaaccaagaaggccacagaagtagcctaacagtcctccctggtcatactcgtttcaaacaggtctgcctgtctagacatattcaggcaggaggttgcttgctgctatcttgaaaaccactggaagattcagcttcttggggacctcagagcccatattcatatggaagcccacccatataagcctcacagagcaaatcacagcaatgttgaagttgttattttcaagtgcttatttcacgacattaaaaaaaatattttttcctggtgtattaaaattaaaaataaaatcataactttgcannnnnnnnnnnnnnnnnnnnnnnnnn

SEQ ID NO: 21398 - DNA, 2297 bp, Homo sapiens
acccacgcgtccgcggacgcgtgggcgcggcggcaacagcagacatgtcgggggtccggggcctgtcgcggctgctgagcgctcggcgcctggcgctggccaaggcgtggccaacagtgttgcaaacaggaacccgaggttttcacttcactgttgatgggaacaagagggcatctgctaaagtttcagattccatttctgctcagtatccagtagtggatcatgaatttgatgcagtggtggtaggcgctggaggggcaggcttgcgagctgcatttggcctttctgaggcagggtttaatacagcatgtgttaccaagctgtttcctaccaggtcacacactgttgcagcgcagggaggaatcaatgctgctctggggaacatggaggaggacaactggaggtggcatttctacgacaccgtgaagggctccgactggctgggggaccaggatgccatccactacatgacggagcaggcccccgccgccgtggtcgagctagaaaattatggcatgccgtttagcagaactgaagatgggaagatttatcagcgtgcatttggtggacagagcctcaagtttggaaagggcgggcaggcccatcggtgctgctgtgtggctgatcggactggccactcgctattgcacaccttatatggacggtctctgcgatatgataccagctattttgtggagtattttgccttggatctcctgatggagaacggggagtgccgtggtgtcatcgcactgtgcatagaggacgggtccatccatcgcataagagcaaagaacactgttgttgccacaggaggctacgggcgcacctacttcagctgcacgtctgcccacaccagcactggcgacggcacggccatgatcaccagggcaggccttccttgccaggacctagagtttgttcagttccaccccacaggcatatatggtgctggttgtctcattacggaaggatgtcgtggagagggaggcattctcattaacagtcaaggcgaaaggtttatggagcgatacgcccctgtcgcgaaggacctggcgtctagagatgtggtgtctcggtccatgactctggagatccgagaaggaagaggctgtggccctgagaaagatcacgtctacctgcagctgcaccacctacctccagagcagctggccacgcgcctgcctggcatttcagagacagccatgatcttcgctggcgtggacgtcacgaaggagccgatccctgtcctccccaccgtgcattataacatgggcggcattcccaccaactacaaggggcaggtcctgaggcacgtgaatggccaggatcagattgtgcccggcctgtacgcctgtggggaggccgcctgtgcctcggtacatggtgccaaccgcctcggggcaaactcgctcttggacctggttgtctttggtcgggcatgtgccctgagcatcgaagagtcatgcaggcctggagataaagtccctccaattaaaccaaacgctggggaagaatctgtcatgaatcttgacaaattgagatttgctgatggaagcataagaacatcggaactgcgactcagcatgcagaagtcaatgcaaaatcatgctgccgtgttccgtgtgggaagcgtgttgcaagaaggttgtgggaaaatcagcaagctctatggagacctaaagcacctgaagacgttcgaccggggaatggtctggaacacagacctggtggagaccctggagctgcagaacctgatgctgtgtgcgctgcagaccatctacggagcagaggcgcggaaggagtcacggggcgcgcatgccagggaagactacaaggtgcggattgatgagtacgattactccaagccccatccaggggcaacagaagaagccctttgaggagcactggaggaagcacaccctgtcctttgtggacgttggcactgggaaggtcactctggaatatagacccgtaatcgacaaaactttgaacgaggctgactgtgccaccgtcccgccagccattcgctcctactgatgagacaagatgtggtgatgacagaatcagcttttgtaattatgtataatagctcatgcatgtgtccatgtcataactgtcttcatacgcttctgcactctggggaagaaggagtacattgaagggagattggcacctagtggctgggagcttgccaggaacccagtggccagggagcgtggcacttacctttgtcccttgcttcattcttgtgagatgataaaactgggcacagctcttaaataaaatataaatga

SEQ ID NO: 21399 - DNA, 3261 bp, Homo sapiens
  misc_feature 1, 2, 3, 4, 3260, 3261: n = A,T,C or G
nnnncagggacagactgcttccgggtcgaagggcttgcttccggagagcgggaaggctaaaacgcggtagctaaactgcagccaactttggttgtgtgtggaaaaggctttagccatggacaggagtggctttggagagatatcatcccctgtaatccgggaggcagaggtgacacggactgcacggaaacagagtgctcagaaaagagttttacttcaggcatctcaagatgaaaattttggtaatactacaccaagaaaccaggttatccctcgaactcctagctcatttcgacagccttttaccccaacaagccgaagcttactaaggcagccagatatttcctgcattcttggaacaggagggaagtcgccccgacttacgcagtcttcagggttctttggaaatctctccatggttactaatctggatgacagtaactgggcagctgcattttcatcacagcgttccgggctgttcacaaacacagagccccacagtataacagaagatgtaactatcagtgctgttatgttacgtgaggatgatcctggagaagctgcatccatgagtatgttttctgatttcctgcagtcttttctgaagcactcttcgagtacagtttttgatcttgtggaagagtatgaaaacatctgtggtagtcaggtgaatatactgagtaaaatagtgagtcgagcaacacctggacttcaaaaattttcaaaaacagccagtatgctctggcttcttcaacaggagatggtcacatggaggctgctggcttctttgtatagagacagaatacagtctgcattagaagaggaaagtgtattcgcagttactgctgttaatgccagtgaaaaaacagttgtggaagcgttatttcagagggattcacttgttcgacaaagtcagctggtggtagattggttagagagtattgccaaagatgaaattggagaattttctgataatattgagttttatgcaaaatcagtatattgggaaaatactctgcataccttaaaacaacggcagctgacttcttacgttggaagtgttcgtccgcttgtcactgaattggaccctgatgctcccataagacagaaaatgccccttgatgatctggatagagaagatgaagttagattactcaaatatctctttactctaatccgtgctggaatgacagaagaggcacaacgactctgtaaacgctgtggtcaagcatggagagctgcaacacttgaaggctggaaactgtaccatgaccctaatgttaatggaggaacagaattagaacctgttgaagggaatccatatagacgcatttggaaaataagttgctggagaatggcagaagatgagctttttaatagatacgagagagcaatttatgcagctttaagtgggaatcttaagcagctgcttcctgtctgtgacacctgggaagacacagtttgggcctacttccgggtgatggtggacagtctggtagaacaggagatccagacatcagtagcaactctggatgaaactgaagaactccctagagaatatctgggagcaaactggacgttagaaaaggtttttgaggaacttcaagctactgacaaaaagagagttctggaagagaatcaagaacattatcatatagttcaaaagtttcttatcctgggagacattgatggtttgatggatgagtttagcaaatggctttccaaaagcagaaacaatctacctggacacctgcttcgctttatgactcaccttattttgtttttccgtactctgggactacagaccaaggaggaagtttctattgaagttttaaagacatacatacagcttttaataagagagaaacatacaaatcttatagcattttatacctgtcatttgcctcaagacctagctgttgcccagtatgcattatttttggaaagtgttacagaatttgaacagcgccaccattgcctggagttggctaaagaagcagatttggatgttgcaacaataacaaaaactgtagttgagaatattcgaaagaaagataatggtgaatttagtcatcatgacctggccccagccctagatactggcactactgaggaggatcgtttaaaaattgatgtaattgactggttggtatttgacccagcgcagagggcagaagcactgaaacaaggcaatgcaattatgagaaaattcttggcatcaaaaaagcacgaagctgcaaaagaagtatttgtgaaaattcctcaggattctatagcagaaatctataatcagtgcgaggaacaaggaatggaaagtccacttcctgctgaagatgataatgctatccgagaacatttgtgcatcagagcttatttggaagcccatgaaacctttaatgagtggtttaagcatatgaattcagttccacaaaaacctgctttgatacctcaaccaacttttactgagaaagtggctcatgaacacaaagaaaagaaatatgaaatggattttggtatttggaaagggcatttggatgccctaactgctgatgtgaaggagaaaatgtataacgtcttgttgtttgttgatggagggtggatggtggatgttagagaggatgccaaagaagaccatgaaagaacacatcaaatggtcttactgagaaagctttgtctgccaatgttgtgttttctgcttcatacgatattgcacagtactggtcagtatcaggaatgcctacagttagcagatatggtatcctctgagcgccacaaactgtacctggtattttctaaggaagagctaaggaagttgctgcagaagctcagagagtcctctctaatgctcctagaccagggacttgacccattagggtatgaaattcagttatagtttaatctttgtaatctcactaattttcatgataaatgaagtttttaataaaatatacttgttattagtaattttttcttttgcattaccatgtaaaatttagacatttgaattttgtacttttcagaatattatcgtgacactttcaacatgtagggatatcagcgtttctctgtgtgcttgttaataaaactatataaaaattaaaattttctgttttaccaaaaaaaaaaaaagggggggtctaaagttcctgcgagggcaagttaaggttaccagttttgaaaaggggcctaaggggcgattaaagaagaggggggtaaagttggtgggaaggctgggttggaggcccttgggggcaatggann

SEQ ID NO: 21400 - DNA, 483 bp, Homo sapiens
  misc_feature 482, 483: n = A,T,C or G
acatggattcttcacttgttaagagttatttatacacaatcccctgtaggatttggtataaataactcttaacaagtgaagagttatttataccaaatcctacaggggattgtgttttgtcactctagaggagttcttcacagagacttaaaacctcaaaatctcttgattgatgacaaaggaacaattaaactggctgattttggccttgccagagcttttggaatacctatcagagtatatacacatgaggtagtaacactctggtacatggattcttcacttgttaagagttatttataccaaatcctacaggggattgtgttttgtcactctagaagagttcttcacagagacttaaaacctcaaaatctcttgattgatgacaaaggaacaattaaactggctgattttggccttgccagagcttttggaatacctatcagagtatatacacacgaggtagtaacactctggtaccnn

SEQ ID NO: 21401 - DNA, 865 bp, Homo sapiens
  misc_feature 1, 865: n = A,T,C or G
nagtgaactgtgaggagtttgaggggtctgaagactgaaagagtcgaatggtttgttggcaggatgtcctggtggattggtttctgtaagttcagattctcataaatcgtgtgagcgtcgccgacacctctgagataaaagggcccctttcgactagcctctgctgaaaggacctagaagaatcccttaggatgaagctgagtcttaccaaggtagttaatggctgtcgcctaggaaaaataaaaaacctgggcaaaacaggggaccacaccatggatattccaggctgccttctgtataccaagactggctccgcccacacctcacccatcacacgctgcataatatccacggggttcctgccatggctcagcttacgctgtcatccctagcagaacatcatgaagtcttgacagaatataaagaaggagttggaaagtttataggcatgccagaatcactcttgtactgctccctgcacgatccagtcagcccctgcccggctggttatgtaacaaacaagtctgtgtctgtgtggagtgttgcaggacgagtggaaatgactgtttccaagttcatggcaattcagaaggcccttcagccagactggttccagtgcctctccgatggagaagtatcttgtaaggaagcaacttccataaaaaggggtcaggaaaacgtctgttgaacccgatcactttcttttcttggataacctgtctgcggctgcagggacaaattcgaaggtttccaaacagtgtgatccaggggggatggagggtgcctttcatgacaaaggggggagacaagaaaaaaacacgggcgggggggacaccggaggtacagacaccaccccgggggtcan

SEQ ID NO: 21402 - DNA, 758 bp, Homo sapiens
  misc_feature 1, 2, 756, 757, 758: n = A,T,C or G
nncgtccgggtcgcaccatcgcactctagcctgggtaacagaatgagaccctgtctcaaaaaaaaaaaaaaaaaagaaactttaagttcagattcctttttatagcagctttcagcctgctatagacaatacagaaatgagtggataaagttttatttagatactctgatagcttagccagtgacaatgacctatccaaatatggaatgctaaaatgttttctttttggaagcaaagcccatgaaaaattggtttggaagtagcgttaaaaacctggtgattaaatgacaacaagaacgtgagaagagatttttccaaaatccatttagtgtgtttggacagaaacaaaggaaagataactctttgttaaattggttaatagaggatttgaacactttgtttgctgtagacaaaacatctttatcttaaaactgtaatctttctaacttctgttgcatgcattgctgcatttccttttttacatgtgctctcatttattttcacggcaaatgcatttttagacagagtctgtgggataattattgccattaattagttttgatatttcttttttaatgatattttcatttattcccttttgctagctggattgccttttgcaattcttacttcaaggcatacccccttccaacgaggagtattctgtaatgatgagtccatcaagtacccttacaaagaagacaccataccttatgcgttattaggtggaataatcattccattcagtattatcgnnn

SEQ ID NO: 21403 - DNA, 1373 bp, Homo sapiens
  misc_feature 1369, 1370, 1371, 1372, 1373: n = A,T,C or G
acaaaagttaatagcatgttagagttctgatggcagttgttgtttatgaataagcttcattccatcctaataccttaaaataactaatttgctttcctttccaggtattcctgatgacagtctgcctctatcttacagtaagttgtttttcgaattctatgggcctattatctaatagataacttagccattttgatatttgttaccaaagcctgcttaacccataaagttttctggttcctcttgttctctgtagtgatgtttctagatagatgcccactgatatatgccccttttttctcagatagatgcccactgatctgcccagggtcagacgaatgcttgtcagttgtagctttccaggattctgctccaatgaggaggaaacatcctgccttacccctgttttagcctgggaaccagtaatgtgaactcaccaggttaacatgaagagggcatgagagcttattccataaggaatgtctgagacattggttaccttttcttagttgtccattagcaaccgtaactaaaatagtttggctgttgggataattagctaatgaatgatttttttggattcaggagcagcttgtgctatataccatgaaaagccttcagagctgagaggttagttgatatttttgttccttacagcttatgccaccaagtaggcagtttctatgatgaatcaaactagctcactatgaccgacagtgaaaatacatgaacacctgagaaactggagaacgcagggagtggggggtaaccatgtctgaggaatctttcacccacagcttgtttttctctaggtactactaaccaataacctgcttggctcaaagggccagcaccttctctctaaagcccaagaggagtttgaggaaaactaggtgtctgtgttcactccaggctgaagttacaggtctgagcaaataaggtgtataaaaaatggaatctgtcttggaggacatcagaaggtgaattttccaagttcttggacaacctagctgttgaaaagctttctgggttggggggtatttcagatgtaccttaaagtgttagcagacacagattaagacactggggagccaatgaacagcagtgagggttgctgtgtatcaccatttctgtttatcaccccttctgcaccattatttatctgggatctaactggccttgttttagatcagggctgggttgttaccacggggtcagcggtagcttagaaaccttccccgattcacatggggatgggtttttggccaattgtgctttatgcggccaacacacatgcgttatactaaagcatctgatgggggccacactggtgttacactcgcaacatagcatataggcccacgtggannnnn

SEQ ID NO: 21404 - DNA, 1941 bp, Homo sapiens
  misc_feature 1, 2, 14, 15, 20, 71, 1941: n = A,T,C or G
nnctaacctcgttnnggctngggcgcgcgcgagccaccactggcacagggtgacgtcgctccgccgcgcantggaagcctgccctgtcaaatagcagccgcggggaggctcgttcccatcggcatctgtgactggctgcgatcgagggcccgggcggccggccagccgtctcgccgagtgcggactggccggatctgctgtcagtcagcgggaacagacttctccctctccatctggtcaactgcgggagaaaaattttcgagaatttccagcaggcaaggcagtggccgctttgactgcttgcttcggagatccgagacgacggagaaggcactcttatttaccgaccaagaaagctcctcccccgtcctccgttagctaattaaaacatttttcagggacgtagccatccagagacattccattattgttccattgacctttccctcatcactgagtcctttggagctgagttatgtcaacagctgccttaattactttggtcagaagtggtgggaaccaggtgagaaggagagtgctgctaagctcccgcctgctgcaggacgacaggcgggtgacacccacgtgccacagctccacttcagagcctaggtgttctcggtttgacccagatggtagtgggagtccagctacctgggacaattttgggatctgggataaccgcattgatgagccaattctgctgccacccagcattaagtatggcaagccaattcccaaaatcagcttggaaaatgtggggtgcgcctcacagattggcaaacggaaagagaatgaagatcggtttgacttcgctcagctgacagatgaggtcctgtactttgcagtgtatgatggacacggtggacctgcagcagctgatttctgtcatacccacatggagaaatgtattatggatttgcttcctaaggagaagaacttggaaactctgttgaccttggcttttctagaaatagataaagccttttcgagtcatgcccgcctgtctgctgatgcaactcttctgacctctgggactactgcaacagtagccctattgcgagatggtattgaactggttgtagccagtgttggggacagccgggctattttgtgtagaaaaggaaaacccatgaagctgaccattgaccatactccagaaagaaaagatgaaaaagaaaggatcaagaaatgtggtggttttgtagcttggaatagtttggggcagcctcacgtaaatggcaggcttgcaatgacaagaagtattggagatttggaccttaagaccagtggtgtcatagcagaacctgaaactaagaggattaagttacatcatgctgatgacagcttcctggtcctcaccacagatggaattaacttcatggtgaatagtcaagagatttgtgactttgtcaatcagtgccatgatcccaacgaagcagcccatgcggtgactgaacaggtgacccagagcttctgcctgaaaagtcccaaggagaaggaaggaaaggacagtccaggcattgtgttttagcttttgagtgttgcagtgaattttacacttgattccataatatttccaattataaaatttttatttccccaagttaaaattttaatatgccaaggaaatgtgctttgtttattctttgactttgtatataccttgaaatgatagtaacagcaatagtaaattataatagtaaactaatattcacttgctatgtgtcagacaatattcatatgtattagctcattactgtatgtattgtacagtatgtacagttacatatattgtaatcatcacaataaccctattaggttggagctattattgtcctttcccacagatgatgaaaacaggtacagatgctacagagttaatcactgaaggtcataaaactattaaattgcagaactggacttcacacccagacaacn

SEQ ID NO: 21405 - DNA, 1498 bp, Homo sapiens; identical to SEQ ID NO: 20817
  misc_feature 1, 2, 1498: n = A,T,C or G

SEQ ID NO: 21406 - DNA, 2491 bp, Homo sapiens; identical to SEQ ID NO: 20436

SEQ ID NO: 21407 - DNA, 414 bp, Homo sapiens
ggccgcccgggcaggtacgcggggacacttcaggtgcccagtgtccacactgactagtggtgacggcgttggacagtgcagatacagaacatttctgtcatcacagaaagttcctttggacagagccatgttaagtgatgttatcacaagatggacagaaacattcctgtttgatttatttttcagacccagtttgtggagaaaaataatgatgctttacatatgtctcttgaatccttaatatgtgaatccagagataagtttatacgggaattatttgaatcatccacaaataacaacaaagatactaaacaaaaagcaggaaaacttagcttcatcagcgtgggaaacaagtttaagacacagttaaatttgcttctggataaacttcgaagtacctgcccgggcggccgc

SEQ ID NO: 21408 - DNA, 676 bp, Homo sapiens
  misc_feature 1, 2, 31, 671, 672, 673, 674, 675, 676: n = A,T,C or G
nnactgtttcatcaacaagggtgcaacatgngatagcataagtcattagcataatccaaatgcttgctaacggcctttggaatgcctaaacttaaaaaagtacactaccaaggacttggaaagaatctcgcactccaacgccaaagaatctattgcatattaatcttcattagaaaaaaaattgattggggacctaaagacaaaaataagcctattgtgcaatagcaaaacattaaaaaaatttaaaaagctttaggaaatttcatgtcattgtacaaagatgctacaccggagaaagggggatctggtgatcctaattttgtcaccagctttgaaatctttagctaggcatttcagccctataaaaatccattttctcacttgtaaaaagaagagttgaagttatgtttttccagggcttttttctctgacaaaccgaattgcagaacaattttatgactcaaccaacgtagcagagtccagagagagtttgaaaaaacaccttacaaaacttataactgaagttctccctccaagggcacttaattttttcaagtgaaagcatgcatgcagattcatccagctgttaccctggaagaggacagagtaaatatactccattttatatgaagcccaaagtgtgattgttaaaaatccccatgcacaattannnnnn

SEQ ID NO: 21409 - DNA, 607 bp, Homo sapiens
  misc_feature 1, 2, 3, 4, 5, 606, 607: n = A,T,C or G
nnnnnccgacgacggattctgtgagctggggaagacagatacccttttattgggggcagggggaggatgtagcaaaggaccaattttcctggagatcctattacgtgaagggacttatactggacacatcatggagaaaatcagaaagaaggctgcttaataagacccactcctggatgcggccactctcaattctcagtgtctttgggaagcaaggttcgccatccacttgtctaaacagatgatgatagcagaggtgctgcacaccttctccctgtgacttgtgaatgcctttcgtgctcccaaataaggaactcctctcactgctgtctgctctgagctgtatttcattttgatagccatttgcaggggacacctttgaactccatgcaatgtaaaagatgtggttgagaaattcttcaatggaatttcttccccttttcccccaccctcattttcctctgggtgatttacagcttgaacattaggtacttagagacagtatgtctgacctacctttaaaaatacacattaagacacacacaatttgaagaaaaaagaagccaaaaaaaaaaaaaaaaaagtcgacgcggccgcgaatttagnn

SEQ ID NO: 21410 - DNA, 3061 bp, Homo sapiens
gtcgtagtccgctcgcgctcccccgcgccgcgcgcgttttttttccataacccgtgcggcgtgaggggtgtcccctctctatttgggcgcaggtttagtggtccagcaccgtggtgtttccccccccccggtttggggggtggactatagcctgcctgtaaaaggggaaccccggacccgccttttatctgcccatgtcccaggcttgcgtgccccggcagtttagccattagggagtcgggggctcaaaagtggacccccatcttaagtatcccaacagcggaccgccttagtccttgccgcatccccagtgtctatactgggggcctggcagggagatgcactttactcaggtaatttactgagtggatgaaatagcataaaaacgaacaggaatctaaaaaacgcacaaaaccctgttttaatggaagtcaggcccaggctagaagatgacaatctacaaacacttttattagcaaaaggagtaagtgcagcattccatctccctgctccaaaaatccatttaatatattgtcctcggatatgggagaaagaggggctcctccttcccctcaaaggcatcactgccccttcccaaggggcaggccagcagggaacaagaggaccccagggttgcaagcaggctggaatcagacaaaagtgatccgtgtccgggaagcattgacctgccagacattgagctcctcatattcatccagagccgcctggaactgggcgggtgtgaagccacgagatacacagcgctgctctgcctcagagaaccggacacttcggccccctgagaccagttcacggacggtggcaaatatcacatctgctggtctctgagtcctagctgtctgccccttgtctcctagaagagagtcctttgacatctccattagcctgatggcttcattcacatcttctttctccaccacatccaccattctcagacgtgccagagcagtggaaaggcgcaggatagccagcagggctccgggcagaagtataggtggcatccttactagcccaagcctctcgcctcatctccacgtatgctgctgtgatgtagtcagccagagactctggcaccatgggctgcttctcgcggcacatggctatgtaacgcctgtgggggaaggttcatggggaagctcatgagcttcatgtccagaggttcaaactgggaggggggctgccggctgtgctggtgcacataggtgatgtgctgggccaaccgtaggtcattgtctcggtcgggccggtcctgaatcagccagaggaggtcaaaccgggagagcagtgcagcaggtagctgtatgttctgctccaggctgcggcgagggttgtagcgcccgtaggcagggttggcggcagccaggatggagcagcgggcattgagtgtggtgagaatgccggccttggcaatggagatggtctgctgctccatgacctcgtggatggctgtgcggtcggcctcagccatcttgtcgaactcatcaatgcagcacacaccctggtcagccagcaccagggccccaccctctaaggtcagttctccactcacggagtctctcagcacagctgccgtaagccccactcctgaggagccccggcctgttgtgtactggctgcgaggcgccagtcgatcaatgtatgacaggagctgagacttggccacaccaggatcccccatcagacagatgttgatgttgccccggattttcatgcctcgaggagactggtccacacccccgactagcaggagcagcagtgccttcttcacatcttcatgcccgtatatttctggggcgattgaagctgccagcttttcgtagaaatcctcctctgcaatttgcctcagctcctccctggtgagctctccagccccagactcatcatcctcactcttgttcatcttcacaatccgatgggcttccaggtaggtttctgagagtaaaccctgtaccacctgtcggaacccagtgcgcaggattggcaagaaaataccagtgacgctgacgtggtctccaggctgggcaatccttgtgttctctccttctaccagcaccgtgatactacgagggatatttcccacaggcacctgatcactcccaaactcactatgttcttgcatcttcatctcctggaatttgatgaatctggagccccgtgtctgcagatacagccgccctcctgagcggttggtttggcactcctggcttgggcacatgatcagaggcatgaaagtgggagactggatcggctggtaggtctctgccccacactggtcacaagtgtaagtggccaccaccatcttgggtttgacttcagagacacgagtgacgattccacgcacagttaccaacttccccacagagtcagcccgcacttcccggatcacacgaggcttgttgctgctagggccttgaaaatacagctcaaatctgcgcatgagttcagcagggtactggttctgggggcttcggaccatcccagggtcccgactccgctgctccatcattagccgatgctcaatgtaaacgtccaggacatctttatttaccacttccctctccttgtactgaggcagcagctcttgtacggcatcagcaaagagcttcgcgtagcgcctggcattctcacaaattgagtccaccaactcggggtcatcctcggctgcgtcgtccaggtccacatacagagccacctgttcccgatgagccagccgaaccaactggttcccatacttgaactgcttcttcccgagttcatcatcctggtagaactcttgtaagaacttcttaaccttttccttctctagcgcgtagtccttcagtgccatcgctgccgagggccgtgcggccgcgcttggcgggctcagaggtcttgctcctggggaagctgagaatctccgcgcggtggactgtggccggccagccgaaattggcgcgaaacgtcgccccccacgtgaccggcgccactgcgtgcgggccaatcggacaaggcggccttcttaacctcccgctagccgcaagccaatcaccgtgcgggccta

SEQ ID NO: 21411 - DNA, 408 bp, Homo sapiens
  misc_feature 1, 2, 3: n = A,T,C or G
nnntcatcagtatctaccgggataagctcttctttgtatctgtcatacagaccgaagtgccacctctctttgtaattgagttcctacatcgagttgctgacacttttcaggttggttatctatcatacctttctaagttaaatgacccaagttagctgaaggtgagacatgattatattatttaattacccaggttttgatgtttactgtctgtctctctctgtttaagcgtaaattcataggcccttttctgtgtggtatacagttacacacatggctgctctattcactattttttatatgtattacagattacggttggctctccatatacatgggttctgcatccataaagtcacccaaccttacatggcaaatatttgaacaaaaaaatcgagctgaacatgt

SEQ ID NO: 21412 - DNA, 460 bp, Homo sapiens
  misc_feature 460: n = A,T,C or G
acagcccacggaactgtgagccaattcaatcccttttctttttcaattacccactctcatgtatatctttatagcagtgtgagaacagattaatacactcctcctcagaaagcattcaatttagctgtgtctaaagtatgccaggtgtcctagggtgttatcttagccaataattcttcctcttcagcaagatctatttgcctatgacagcttgacctacagttcctaccatacttgtcagtaacaagtagcccataacatctgaagggacttcattgaaatcacagaggttctttagttctttacctcattagtaggcattagggaagcacatcaactttctaatttaataaggtgcctgttgctttgaaaaactgctcaaaaaaagataggagaggcttacttaaagatatcactataggcgtggcatgctgcttcacgcctgtaatcctagtacctn

SEQ ID NO: 21413 - DNA, 419 bp, Homo sapiens
tcgacccacgcgtccgcttggctcctgtggaggtgagtgaagggtctgctgctgaaatttgggggcaaataaccggagtaggtttgttcctgtgccttggcgagtcgccggtgcgtatcggagtctctgccagccattgatttctacgggtttcaagaagagggagaacaggatggaggagatgttgggctgatggtgtttggtcccctgacacccggagaacggctgcccgggttatcccagttaaattcctgggcctgaacggagtgaaacgatgtttttgttcgtgtgcagttgtccatgaggcagtgcttccttcatccgtttcctcccagtccataccttccttggcttgtctgaccagtctctttcctcagcttttctcccccagccattgcataaaagtcttacgtgtgggg

SEQ ID NO: 21414 - DNA, 293 bp, Homo sapiens
acactggaggctggagcctgcagatggcatggctctgcggctcaccttgctgcagttggtggtggtgacagagactgcagcttgactgtagtggtaagaggatgcctgtggcagccagatgataggggccttatagggtgggccagtgcattgagggtgacagcagaggtggttgtattggcatcagtgctagtggtggcagcagcagcaagtctgggaaaagaaaagatgaaaaagaaaaattcacaactgccagatcttctcctgtctggaagtgttgtgtgtgctaccag

SEQ ID NO: 21415 - DNA, 729 bp, Homo sapiens; identical to SEQ ID NO: 21351

SEQ ID NO: 21416 - DNA, 456 bp, Homo sapiens
cggtggcggccgaggtacgcctgggaaaagtcattttcaaatcttattaccaatttgagaaagaaggagatttccaagattctgagaagttcctgcctcagagggatgaatttggcttcatttttcagtgcaagcaaaatcatcgtgtttgtgaccttcaccacctacgtgctcctcggcagtgtgatcacagccagccgcgtgttcgtggcagtgacgctgtatggggctgtgcggctgacggttaccctcttcttcccctcagccattgagagggtgtcagaggcaatcgtcagcatccgaagaatccaggttggtgtcagatgccattttaaagttgtaggtgcatttgaagtagaatgatgtctccttttatttagcatcactatgttccagtgtaatgacatttaactctctcataaccaaaacgtgccgccattccagaatgttgtgtgt

SEQ ID NO: 21417 - DNA, 2538 bp, Homo sapiens; identical to SEQ ID NO: 20316
  misc_feature 2538: n = A,T,C or G

SEQ ID NO: 21418 - DNA, 809 bp, Homo sapiens; identical to SEQ ID NO: 20847
  misc_feature 809: n = A,T,C or G

SEQ ID NO: 21419 - DNA, 474 bp, Homo sapiens
  misc_feature 468, 469, 470, 471, 472, 473, 474: n = A,T,C or G
cgtggtcgcggccgaggtacttcttggatcttacataggcctgaaagtttagttgcactactttaggaatctctttttatgcatttgttcaattaaaaggcaacaaagacaaatccttaagaaaataccagcatttttcctacatatgaaatcaagggtccttgtctgacgatggattttactagcgtggtcgcggccgaggtacgcggggggactgacaacccggatagctcaaggtccaaaaaaccggttttcaaacattataagttccaggctttgcaagtctttattctctggggtaatatccagtctttctgttattgtctcttaaaattctcttccatggcccacattaagggagtttgcagagagtgagggaggcaaaacttgaaaagggcctgcaacactttaaaccttctcaggttcacccacatgaaacagctgtgctgagtgtgctgccggtgcccnnnnnnn

SEQ ID NO: 21420 - DNA, 547 bp, Homo sapiens
  misc_feature 545, 546, 547: n = A,T,C or G
acttttttttttttttttttgctgtgtgtgggatcacatccagagttgttgctgctgatctgggcacctgccctggatgtgcaaaagtggtggtgggaagctgagtggaagtctgctctgcctttttgcttgtgggatctggtcttgaaaaagtaactccagagctccttgccattgcagctggtgtgactgcacttgtaatgtgccctatagagaagggcaactgtgaggtagctgggctgatcatggtttccaaagtgagttcctggggagttgtggccccctgaggagctgaggtagtggctgtggctgatgaacggagatctcccagtgtcccagtcaagagtggacagagaatcaaacagaaaagtggacaggtgcgtatttgggtcagtctttgtactagcatgatctgtagaaaccattgaaacaggcacatcttctgcttctgtactactgggagtccaacttgtacttaaaatgtcaggaactgagatgctcatcctctggacacgagaaaaagttgagatgggagtagatgcagnnn

SEQ ID NO: 21421 - DNA, 681 bp, Homo sapiens; identical to SEQ ID NO: 20120
  misc_feature 1, 2, 12: n = A,T,C or G

SEQ ID NO: 21422 - DNA, 543 bp, Homo sapiens
  misc_feature 541, 542, 543: n = A,T,C or G
aaaagctatgaactgccagccattagctcctaattaaattggttaagaaaaaaaagctactgtttattgagcacttactatgtaccaggcactgtactaagcactttaaatgaatcactttatttaattcacacaataactctatgacacaggtactaatatgatccacagttttcagctgtggaggatctgagaaacagaggggtcaaatgacttgactagagtcacacagctggaatgtggagccaggatatgaacacaaacagtttgaatccagaagctttactcataaccatgattctatgtcatttccagaaatggtggccggcacataatctccctttgcacataacagatttcacacaagcctttcttgccaagaatcaggttcacttctgtaatgctcttgttagtagaaaagataatttcaatctgacaattctatatttcccaacgttcatgggccctttcaaccatcttatcacccagctaatcaagaatcagtgttcccagcaatttctcgaaacgtcatgggcaggannn

SEQ ID NO: 21423 - DNA, 318 bp, Homo sapiens
  misc_feature 1, 2, 3, 4, 5: n = A,T,C or G
nnnnnacaaataatgcaaaaatatatatgtaaattggatgatgaggctgattaaaaagcttgggctcagtggtcagacttgggcaagtggcctaatgtcgtcccctagtaagtggacttagagtggggtctccaaatacggagaatctttgggttgcagcaggagctttcactgactgctgcgtgagttgctcgttctttttccttcatcaggtgcgtagtttctctgaaaagcatcacccaggtcagaatgaaaggaaactctctgtgcagaccgttgtatgtgggacctttgaagacagtcaaatagtgttcaatt

SEQ ID NO: 21424 - DNA, 383 bp, Homo sapiens
  misc_feature 367, 368, 369, 370, 371, 372, 373, 374, 375, 376, 377, 378,379, 380, 381, 382, 383: n = A,T,C or G
actacaactgattactctgtttgaggaattcatgaatttgtctcagtcaaacaagatgaagaggaagtctccccgcctagcgccttgcctccaggtttgggtagtcgggccctggagagaaaagattcaggtgagcgcaagcccagagaaggcatcctgacctcatcctaatacaatcactaatgagctcatttcttgaagctgtattgattctaatccttgtcttattcagattgtagtttttacggcaatctttcattacgtttcctcttacaagaaaactaatgtattgagaaacaattaattttgcatgatacacacgcattcaaggatctagccaaaaataccccaggggttggtctatcannnnnnnnnnnnnnnnn

SEQ ID NO: 21425 - DNA, 508 bp, Homo sapiens; identical to SEQ ID NO: 21293
  misc_feature 502, 503, 504, 505, 506, 507, 508: n = A,T,C or G

SEQ ID NO: 21426 - DNA, 832 bp, Homo sapiens
  misc_feature 832: n = A,T,C or G
acatctacattttcctacactcttaaatatatagtagctgcagaatctgtttgtgtatacttaatagaggtaattttttcttcccctagttatttctttcccattgaatcaagttacatacaagtttctaaccattcctgttataggcttgttggtgattgacttcattttaataatctttttatttcattgcctttcacccagttttttaaactcatgaaattccacacccctttccatctctattttccttccttaaatcaatactttactataagcacctcttatatgtgatcctttgaccatagtcatcttggtttttgattagtcccttccctgcctttcatttactgtgttatcaactagaggtcttgtaggaactggagtaaactttacttgaagaaacattcagataagcagttgtcttgagagggctcatcacagtggattcaaagatgaatcagtgaacatacttgggctttatacttagggactttgattcagtaggtccaggatgaagcccagtgattttgtttcaggtggtccacagaccaaactaaaaaatgctgatttaggaaacacacccttttcctgatgaggaaagttgcgtttttgtccaatatcttaaatcttaaggagcttttaaggttttggcaccttttttccctcctgcttacacactcaactttgtttgctctaagatttacctgttttgaacatcatcagccttgtaaaatggaattactgattccatggttctctaccttgacttcccatcacagttactggtggagtatcttgtttttactttgagtaacagagatgcatgtgn

SEQ ID NO: 21427 - DNA, 2538 bp, Homo sapiens; identical to SEQ ID NO: 20316
  misc_feature 2538: n = A,T,C or G

SEQ ID NO: 21428 - DNA, 414 bp, Homo sapiens
  misc_feature 1, 2, 3, 4, 5, 6, 7, 8, 9, 10, 11, 12, 13, 414: n = A,T,C or G
nnnnnnnnnnnnnccgcccgggcatgtactttcttcttttttttttagatatattttgggctgatagaatttgacattgttcaactttaactttgtcctcattgaactttatcctgctaaggagctaaaaggtccatatgatcaaaaaggcagctctcaacccagcacgaaattccaaggctcattcatttctgtttacctactgccaaataagtcagacaactgcatacttgctttacagacgaatagaggacagcatgttgttcaataattgtagtttaaaaagtatatgtaagatacatccacaagaagaaagatagagggagcataccggttgtcttctaagtataggctccctgcccatggagatcacagagtagaattatgatgggtgccttagagaccagcctcccn

SEQ ID NO: 21429 - DNA, 2538 bp, Homo sapiens; identical to SEQ ID NO: 20316
  misc_feature 2538: n = A,T,C or G

SEQ ID NO: 21430 - DNA, 671 bp, Homo sapiens
  misc_feature 1, 2, 3, 4, 8, 34, 83, 106: n = A,T,C or G
nnnnctanaaaaggcctttgaagggctgaatttnagcccctaagagtgtggcccttctggggttccaacactaatttatgccnagtattcaacttgggtctttccnactcccaactagtaggagttgaacatctccctacacagaaaaactcccagtagttattctttgcatagctcacgaaatttccctaagaaaacacagctttacattcagccagtactcaccagaccccatatccctagagctgttccctccattccaacacccttcccagcatattccaactaccgccccaactctgagctctgtcttctcagctcagtaggaccaccactgctgaacttcgttcttcctctgagtcagtcctataagtgattccaggtagacagctggaatcattctagggctcaccttgtttcccatttttaggaattccaatcctatgctacctaccttccatccaatgtttgaacgtttttcatatggattttttcctctttttctagttgttttggcaacagagctaatccagtaccagttattctatcatgaacaaaagtatatgtatttggctgggcacggtggctcatgcctgtaatcccagcactttgggaggccgaggcaggaggatcacctaagctcaggagtttgagaccagcctgagaaacat

SEQ ID NO: 21431 - DNA, 414 bp, Homo sapiens; identical to SEQ ID NO: 21407

SEQ ID NO: 21432 - DNA, 689 bp, Homo sapiens; identical to SEQ ID NO: 21367
  misc_feature 1, 2: n = A,T,C or G

SEQ ID NO: 21433 - DNA, 1293 bp, Homo sapiens
cgacccacgcgtccggttgcttctgaaatctagctggggctctgtggtgtctgattttccctggctgcttctttagttttgtctccttttccaggctcaacggcgtgctgatggaagtggaagagcgtgaagtcttacaggactcactggatagatgttattcgactccgtcaatgtactttgaactacctgactcattccagcactacagaagtgtgttttactcatttgaggaacagcacatcagcttcgccctttacgtggacaataggttttttactttgacggtgacaagtctccacctggtgttccagatgggagtcatattcccacaataagcagcccttagtaatccgagagatgtcattcctgcaggcaggacctataggcaagtgaagatttgaatgaaagtacagttccatttggaagcccagacataggatgggtcagtgggcatggctctattcctattctcaaaccatgccagtggaaacctgtgcgcagtctgaagacaatggacccacgttaggtgtgacacgttcacataactgtgcagcacatgccgggagtgatcagtcagacattttaatttgaaccacgtatctctgggtaactacaaaattcctcagggatttcattttgcaggcatgtctctgagcttctatacctgctcaaggtcagtgtcatctttgtgtttagctcatccaaaggtgttaccctggtttcaatgaacctaacctcattctttgtatcttcagtgttgaattgttttagctgatccatctttaacgcaggagggatccttggctgaggattgtatttcagaaccaccaactgctcttgacaattgttaacccgctaggctcctttggttagagaagccacagtccttcagcctccaattggtgtcagtacttaggaagaccacagctagatggacaaacagcattgggaggccttagccctgctcctctcaattccatcctgtagagaacaggagtcaggagccgctggcgggagacagcatgtcacccaggactctgccggtgcagaatatgaacaatgccatgttcttgcagaaaacgcttagcccgagtttcataggaggtaatcaccagacagctgcagaatgtagaacactgagtaggacagctgacctgtctccttcacatagtccatgtcaccacaaatcacacaacaaaaaggagaggatatattttgggttcaaaaaaagtaaaaagataatgtagctgcatttctttagttattttgggccccaaatatttcctcatc

SEQ ID NO: 21434 - DNA, 547 bp, Homo sapiens
  misc_feature 1, 2, 3, 4, 5, 6, 7, 8, 9, 547: n = A,T,C or G
nnnnnnnnnctccccactacagtaaactttttatgagggtaaaagctgttctgtcttgttcaacactgtgcactgagagcctagaacagtacctttgcatagcgtaggtgctcagtaaatatttgtcgaacgaattaatgaaggactgagaaaattaagatccagtgaggcaaaaagcggccagataaaaagtacatgcatgagtgaacataaagaggatgggattagagaagttctgtaggcgaagtcctaaaatgattaaatgctgaggaaacatgccaaaaaagcttcttagggcagctatcactgataggtatggtttagtgtgaatcctaataaacagtcgaatggattcaggactggacataaaatgataaaagggaccagaaaaagagaaccaagttttttgcacatagcatttattatcattagggtgtaaacatcatgataaattattgtaaatgataatagcacttttgaggccttgccatgtgccagccactctaccagccctttatctgacacgagagattccacttttgatcan

SEQ ID NO: 21435 - DNA, 814 bp, Homo sapiens
  misc_feature 1, 2, 3, 4, 810, 811, 812, 813, 814: n = A,T,C or G
nnnnaaagcatttaattcttaccacagtcctttgtcatcttattgtctccattttacagataaagaaacaggcacagagggtttaagtaacatgtacgaggtcacacaatcacagctagtaaagccaggattaaagtccagtcagtcggcattcaaagcctgtgctcctgccccaaaatgacaagtaatgacttaaaggcaagaaaaacagaccctcctctacccaccatcctcatacacagccttccagcccaggatctgagccattcattcatttgctctcatattcattcattcattcattcattcattcattcagttcttcatcatacatttagtgaagctctgtcatggaatgtccacacagaaggtacaaaaatgaggcaggtgtattttctcccatctaacaggggatgaccacatgaaaagaactggtggcctgtgtgtcccatggtcttacagggcagtgctggaaggtggcccggccatccactttctggggaggcagaaccagaagcaccaggtggacaactgcatatgattatcatgtgttggggaataaaaactcatggatagtgactggaagtggatcagtggttacccataaattcattgccaattgctgcaggctccagaccaatatttcctaggttttccttgccaggatttttatagtcagaggatgtaatcttatgccaacgggtcttaataatcaaatgacttcacagtgagaatcattactctgaaaaattgatttttgttagaatgatgggaaatttaaatatttgaaagtgaaaacacatgccaccnnnnn

SEQ ID NO: 21436 - DNA, 727 bp, Homo sapiens
  misc_feature 1, 2, 3, 4, 5, 722, 723, 724, 725, 726, 727: n = A,T,C or G
nnnnnattaagagctattacaaagttctttcctctaagtaaaaaacccactagaaaaagatatttgtaaaaatcattgcagggttactgatactgaatgaagcacaggggtactggaacagggataagttcttggataaggtgccaacatacctataaaagctgatttttgagtaaattattgattctaacatatgtaatggatttggtgtgataattttctgatctttaactataagtgactttttattctccaccagaaaagataaatgactgagaatgtaagtctgcgctctgattaacacaatggagaaacggaaaaactatctctgttaaaaactgattcctgtcattcttctgatatcaaataagaggaaggaaaataaactttttgtgtgtagatagaaaaacatacctgaggccaggtgcagtggatcacgcctgtaatcccagcactttgggaggccaaggcgggcagatcagctgaggtcaggagttcgagaccagcctggccaacatggtgaaatcacgtctctactaaaaatacaaaaattatctgggtgtagtggtgcgtgcctgtaatcccagctactcgggaggctgaggcaggagaatcactttaattcaggaggtggagggttgcagtgagccgagatcatgccactgcactccagcctgggcaacagagggagactccacctcaaaaaaaaaaaagaaaaagtnnnnnn

SEQ ID NO: 21437 - DNA, 2928 bp, Homo sapiens
  misc_feature 1, 2, 3, 2928: n = A,T,C or G
nnnaattagtcagatgtagtaatatccacattccccgcatgcggtgtcaccagaacctgtagttttaattccagcctaatccggaggtgggtcgaaatgggcacccaccaagaaggggtctccaaaaggccaagcaccctgttcccgaccacgtgtttaaccccggcccgtggctttcttttaattcgctccccaatggggccgcctttgcaaaaaagccgggtaaaggttaacactggccccccacggggaatctttttaccgctcccccccttctttttttttgtgttgtttgttaggtggtttttttgtttaaagattcaatgacaaagttttattaaataccaatactggctaggcacaattagacacattattatctcatttgctgtatctggtatcaaacaacaaagcctgaaagattaccatagattttgatggcctcattaacataattaatccgtagtgacattccctggataataaatacagttttatgtccgtgtgtcttctgtgtcttccaagttgctacagggctctatttgatctgagaaactgactgctgtttacatccaggtatgcaatgtgacattagaattgaagcagaaaggaagcaaaacaaaacagggttcatgaggaaaataatcttctaagaactaacatggcctggaggtaaaatgcaaatatatccggtaataagaagcccagattactgcagataaaagattaaaataggattcaattattcatctccatttgcaaatctacaaactaggaggaaggactaacccttttcctgggattagtaactaaatttaatgattacagcaaatataaagttcttttgtaaattattgttggttaatgattgacttgcattgacaacacactttagctctcgcccctttcattctccccctgcaagaacaaaggcaaaatgaacagtgaggaaaacctggaaacaggaccgagtgtttgctatcacttgattcctttgaaggagcaatgctttctcataatataggttttatagtatcatcaagtacatcagttaagcaaatcaagtgctttgtgttctgtatataaattacataatacaagagtctgtggcagttaagaatctggttctgcactttgggaggcagttccttccctcaggtttgttagtagaaaccaaaaagtagcctgagagggttcaggtgccaccttggaggcactaccttatcttttgtccttttagagttttcttgctggggtgtttggctccagcactatagcccttaccacaatcattccacctggttcttcaataggactctgaggtatcaaaaaagtcactagggcagcccagagattggtacgatttacctttacacctcaaagttttttagatgtgagcagcgctggattatggcaatttaccttataataactcaccatagttggctgttataagaataaatattgttcttctaagatttttaattagttgcttcagttattacatttttttctatttttttttttaaatagagatgaggttttgctatgttgcccaggctggtctcctggactcaagcaatctcccacttcaggctaccaaagtgctgggatttacaggcatgagccacctctcccagtctcagttattattttaataaatgagactgaacgtcctcttataaggctcactcccttgttcctactacatttgctctgtttaagtatctctttaaattcttcagttaagatcatcccttttatcagaaacctagacaccacaaagtagctttctcacctttaattctccatagggatcactattatactataatatttgcatacgtatgtgtatatatgtatttgcttttttaaaaaagtaaaaatgctcttctcactctttgtcgatataggcacccaggtacgtagttagaaattaaataaaggccacaataatttcccaaggaagatcattaaaaagaaaaatcctttcttcctctaatatcacatagctggcctttatggcatgccagctaagaaaaaaggtattgcctatggtgacaggaagactcaatctttctctctttgggttgtagctgaatttctatcaaaagtcctagtaaaatatataactcctcatttgttctaagccaagtcttttcttcagttttccttcaaacaatacctttactttcccattagaatatgaagaattggagactgtgaacagcaaggtttggggtgggtatcagtcacttcaaatctggctatgcagagagagggaaagacatggcagaatagcaggggtggagggtgagtgaaatgtatcttcattgggagtattgaaagagagcaagtttttcaaagttgttgccggtatctcatgaaagcccaggctgctaccatggtgagggcaaacactggcaccagcaccataaatatgggaataccacttgggtccccttcacctcgatgtcctataggtccattctgcacctgtaacctgtgctgcactctcagagacacagcatagcctgcattacgaaagaggtctacagcatcctggtgcagcaggttctttaggtcttggccatttaccgaaaggatcttatcaccctcctggagccgcccatccagggccgcagccccattttctttgatgcggctgacgtagatgccactgtcgttggagacatactgctgatctgtcccaccgacgatgttgaagcccagccctgagggccctctggtaagattgatctcttcctcagtgaccaaataatccactcttccgttcatgttttacagctcgtctggcttcctacttgggtcagctggagtgcagcacaggtgaaggtgaatcaatctcggcgctgcgcccacagcacagcggtttcggtttcagcagcccggacgcgggggtcgacn

SEQ ID NO: 21438 - DNA, 361 bp, Homo sapiens
  misc_feature 361: n = A,T,C or G
actatggggaatgtggaagtggaaagtagtgtggagttttggaaagatatttctgcctaggagagtagttgggcatgaggacaggactaagaaagagtgagtgaaggaaaaggtgtgaagggagcagaaaagtggaggggggactcgaggtttggagacttgtccattaattcctacaacagacacctgggaggactgggtggttcctgaaaaattaggtaaagcagagtaggttgcctggtattaatttaaaaatatactggcctacctgccaccatcagggttacccttggcttggatgaggcaaaggttagttgccagggtgttctgttccagggcaccatcattcttcaatggcaan

SEQ ID NO: 21439 - DNA, 2304 bp, Homo sapiens
ggaaggaggaggaaggaggcagagataagcgatgggggatactgagccctatttagactttggtcccccagcttttggatgaacttagcacattactggctatgcaggactaacctctatgggatgcaaaatgactccaagtatggaacaacattgcaaaaatggacttcaatattacatgaaggatttggctgctttatataaatatagaaacaagcccagtggattactccactaaaggtgactaagcaaatgttacagttcagaagttccgcaaagagacaaatcattgagaataatttagcgcagccctggacgaacccccaatctgtcgctttgccagaactccttgggctctctcaagacccagcaattcaggtgttaacataaccctgtccagtggtatggccagtgtcttagtccaatcttttgccataccagtcattacatattttgaataccaacttggtggaggaatttcagctccctttcagcagtagcctagtgggcaccacatctctattcttcattccccattccagcttgatgctgaagggatgaggcttccagactccaaacccctctcagagtcttcatctgcttgttgcattttttcattcagctcctgaaggaatgccaagacatgcaaagcctcagaatctgctccatttttagaaagtcgcattttggcaattttttgcagtttgtctttcatcttttctttctcccttgatttctggtttatttttacaccctctataaagtggtggatggccttgtcttcacacttcatttggtacagctgaaagttgccataccgcagatggagcagttgtttcgctacaggagtaagctctttactgaattccttttggaagtaatactctgcgtcttcatactgatctgctagagcatggaggctggcaagaatggaacagacacggaagagattatcattggcctcatcagctttcttcagatgagccacagcgtgtcctattagttccagtaactttcttttcccatacattccattctctcttagattcattacttggaagacttttgccctatagcagcacccaatttggcaatgcaggtaggcattgtttggtatgtattctaaagcctttttaagcagttcaatcgctttgtctggctcatcttttcttcgataaaacttggctgcactgcgaagaacatctgttacacctggggctttctccaaggcttcttcaactaacttctctccttcaccttcctcttcaccttcttcacgcatcttatgaagcttcagagccaggaggactttaaggtacctcggccgcccgccgaggtaccaaatgaagtgtgaagacaaggccatccaccactttatagagggtgtaaaaataaaccagaaatcaagggagaaagaaaagatgaaagacaaactgcaaaaaattgccaaaatgcgactttctaaaaatggagcagattctgaggctttgcatgtcttggcattccttcaggagctgaatgaaaaaatgcaacaagcagatgaagactctgagaggggtttggagtctggaagcctcatcccttcagcatcaagctggaatggggaatgaagaatagagatgtggtgcccactaggctactgctgaaagggagctgaaattcctccaccaagttggtattcaaaatatgtaatgactggtatggcaaaagattggactaagacactggccataccactggacagggttatgttaacacctgaattgctgggtcttgagagagcccaaggagttctgggagagggaccagattggggggtaggtccacgggcttggtgatagaattatttctcgattgacttcttgagtgcaatttgaactgtaacatttgcttagtcacctttagtggagtaatctactgggcttgtttctatatttatataaagcagccaaatccttcatgtaatattgaagtccatttttgcaatgttgttccatacttggagtcattttgcatcccatagaggttagtcctgcatagccagtaatgtgctaagttcatccaaaagctggcggaccaaagtctaaatagggctcagtatcccccatcgcttatctctgcctccttcctcctccttcccagtctatcatcaaccttgagtattctacacaatgtgaattcaagtgcctgattaattgaggtggcaacatagtttgagacgagggcagagaacaggaagatacatagctagaagcgacgggtacctcgcccgcgcggccgcaatgtgtacaagaagactttcag

SEQ ID NO: 21440 - DNA, 2163 bp, Homo sapiens
  misc_feature 1, 2, 2159, 2160, 2161, 2162, 2163: n = A,T,C or G
nnaatcttccagttgccccctattgactttaaaccaaagctttgattcatgaccactgggatccagccagcgggggatttcttttcctgatggactgtacccaggatctcacatttgcttaagcagctcccacaattgggttcttataaaaggacacagaagagacaagctcagttttctctgaaggagaaggactgcacttagaactgcattttggtgacctctgaaattcagtacggcagtgaatgagcttctgaccttgaggtgaacttaacaaaattatttttggaaaaatcgttgtgggaaccattaaaagaactccaggaaacatgaattctggaatcttacaggtctttcagggggaactcatctgccccctgtgcatgaactacttcatagacccggtcaccatagactgtgggcacagcttttgcaggccttgtttctacctcaactggcaagacatcccatttcttgtccagtgctctgaatgcacaaagtcaaccgagcagataaacctcaaaaccaacattcatttgaagaagatggcttctcttgccagaaaagtcagtctctggctattcctgagctctgaggagcaaatgtgtggcactcacagggagacaaagaagatattctgtgaagtggacaggagcctgctctgtttgctgtgctccagctctcaggagcaccggtatcacagacaccgtcccattgagtgggctgctgaggaacaccgggagaagcttttacagaaaatgcagtctttgtgggaaaaagcttgtgaaaatcacagaaacctgaatgtggaaaccaccagaaccagatgctggaaggattatgtgaatttaaggctagaagcaattagagctgagtatcagaagatgcctgcatttcatcatgaagaagaaaaacataatttggagatgctgaaaaagaaggggaaagaaatttttcatcgacttcatttaagtaaagccaaaatggctcataggatggagattttaagaggaatgtatgaggagctgaacgaaatgtgccataaaccagatgtggagctacttcaggcttttggagacatattacacaggagtgagtccgtgctgctgcacatgccccagcctctgaatccagagctcagtgcagggcccatcactggactgagggacaggctcaaccaattccgagtgcatattactctgcatcatgaagaagccaacaatgatatctttctgtatgaaattttgagaagcatgtgtattggatgtgaccatcaagatgtaccctatttcactgcaacacctagaagttttcttgcatggggtgttcagactttcacctcgggcaaatattactgggaggtccatgtaggggactcctggaattgggcttttggtgtctgtaatatgtatcggaaagagaagaatcagaatgagaagatagatggagaggagggactctttagtcttgggtgtgttaagaatgacattcagtgcagtctctttaccacctccccacttacactgcagtatgtcccaagacctaccaaccatgtaggattattcctggattgtgaagctagaactgtgagcttcgttgatgttaatcaaagctcccctatatacaccatccctaattgctccttctcacctcctctcaggcctatcttttgctgtattcacctctgaccagagacaaatcagaaatgtgttcatctgctgtgggaacccctttatcccagaaagccctcttccttgtgccttatcaaacaggacaaataggttctgttttatgtcttgaattgcattctaatgttattaaaactcatttattgtgttactattaaatatgctgaaaacgctaaaagtatacgtattggttctttattaaataatttttgaaaaatcattattcatgatcatggcatacagtatattctcttttttttctttatttatgactgtcactgagtgaaataatagatgacagacatgtctgaatgaagtaaaaatcaatggaagacagtcgggatcttttgcttcatgcaaaaaacttggagtgaagtctcaatgataactgggaaatgtttttcttcctctttatctaactatattacacttatccatcaggtttcattgtattaatctatcctttgaggnnnnn

SEQ ID NO: 21441 - DNA, 365 bp, Homo sapiens
  misc_feature 363, 364, 365: n = A,T,C or G
ttacatgctccttgctagtagtcctagtctttgaaccctcagagcccaggttccaaacatgattgaagccatcttgaatccatcaaaccaacccatctgccagatgagtacgcgggtcctatattccgttcaatgtaagctctatgagaccaagaacctgggcagttttattcaccataagtattccaagccctagtggttcctggcacattttgtattcacaataaatatttgttaagtcaatgaccagatgaatggcttttaaactcaagatagtttttttttggtttggtatttatttatttatttactttgacagacttttgctcttgttgcccggctggagtgcaattggggcgatcnnn

SEQ ID NO: 21442 - DNA, 418 bp, Homo sapiens
  misc_feature 1, 2, 3, 4, 5, 6, 7: n = A,T,C or G
nnnnnnnagccagtcatggtggcacgttcctttagtcccagctactcgggaggtgaggcagaagaattactttcaacatgggattggaggttgcagtgagccgagatcggcgcccactgcaactccagcctggtgacagagcgagaccccatctcaaaaaaaaaaagttgtatgtgacagctaaccataataaaaaaaaagaaaggaaaaagagagagaaagtagggacaacactaaatcattagtaatttgagcacatttcctccaaggcatatgctatttttcaacttggtttcaatcatgtatctttattgtttttcttaatgttataagcatgtttggttttattgtagtctttaaatcatgtaatacttcattagtatgtattattccacataatagtcctttaggtagatgt

SEQ ID NO: 21443 - DNA, 1284 bp, Homo sapiens
  misc_feature 1254, 1270, 1271, 1272, 1273, 1274, 1275, 1276, 1277, 1278,1279, 1280, 1281, 1282, 1283, 1284: n = A,T,C or G
acttcccctttatactcttctgtatatttgattttttttttttttaagacagagtcctggctctgtcgcccaggctggagtgcagcgacatagtctcagctcactgcagcatccgtggaggctgaaacaggagaatccatgaattttaaaaaatctaaacatgtaattttaaaacgggcttaagaagaatgataacagttttggtcttcttttttatcaaccatgcttttattttacttgaatctcgtgccaattgctttgtaatattaaagtaggatttacacaagtggaatttagaaaagatgataatctatcaaatctgtcaataccaattagaatgtaataaagaaattaggatagtggaggtttgagcaagtaaaggctcacccaaattcaaagccaatacttgatgctgagaggggatattttctggaaggtaatttttaaaaattaaagtcacaattataaattgtatatttcctaataaaagaaatctcaactcatgggacaatttgaatttaaaacactattgttcctcattcagtgatgaacaagtcaaaacgtttcagaaaagaaagcctttaaagaagaatcctggcacagaaaaggtccatttagacattgccttcttcccccatctctaatgcctcttttcaaatctctgacttgcacatgaagtaacagtgaggtgtcctgtgcagcagtcgcaattttttgacttgtcaaattgaagaaattcaattatgtagccagagcttagatcactgacatgtatactggcataagcttttttttgtttgtttttaattttattagaagtgggatctcattttgttgcccatgctggtctcaaacacctgtcttcaagtgatcctcctgcctcagcagcatcagtttaatatctagataaaatctgatgtatgtaattttacttttaagggtttttttccaaacagacgtcctgacaatgttgtttcctattccttgaacattcacctgacgcttatatactgtcattacttttatctgtcaactgatgtcagctactcaatttacacattacttttgtgcatttcatcctgtttctcagtttgacattgtcattcaaattcagagtttgacactgaaaccctgggcatggtggtgtatatcttctaaagttgcaatttttgttcactccagaatcacttttcaaaaagcatgcagatttaatgccaccagtttgtgttatgtatctacccgcgttaattaatnctagaagtattccgannnnnnnnnnnnnnn

SEQ ID NO: 21444 - DNA, 549 bp, Homo sapiens; identical to SEQ ID NO: 21395
  misc_feature 1, 549: n = A,T,C or G

SEQ ID NO: 21445 - DNA, 5252 bp, Homo sapiens
  misc_feature 1, 2, 3, 4, 5, 6, 7, 8, 9, 10, 11, 12, 13, 5239, 5240, 5241,5242, 5243, 5244, 5245, 5246, 5247, 5248, 5249, 5250, 5251,5252: n = A,T,C or G
nnnnnnnnnnnnncggaagtcttctagaattaattaacgcgggggaggggagagcccgagcgctggagttggtgctgggaaacccggggctaatgttgacaacaggctcgagattgtcctgggtcacataatgccagctgagcgtaaaaagccagcaagtatggaagaaaaagactctttaccaaacaacaaggaaaaagactgcagtgaaaggcggacagtgagcagcaaggagaggccaaaagacgatatcaagctcactgccaagaaggaggtcagcaaggcccctgaagacaagaagaagagactggaagatgataagagaaaaaaggaagacaaggaacgcaagaaaaaagacgaagaaaaggtgaaggcagaggaagaatcaaagaaaaaagaagaggaagaaaaaaagaaacatcaagaggaagagagaaagaagcaagaagagcaggccaaacgtcagcaagaagaagaagcagctgctcagatgaaagaaaaagaagaatccattcagcttcatcaggaagcttgggaacgacatcatttaagaaaggaacttcgtagcaaaaaccaaaatgctccggacagccgaccagaggaaaacttcttcagccgcctcgactcaagtttgaagaaaaatactgcttttgtcaagaaactaaaaactattacagaacaacagagagactccttgtcccatgattttaatggcctaaatttaagcaaatacattgcagaagctgtagcttccatcgtggaagcaaaactaaaaatctctgatgtgaactgtgctgtgcacctctgctctctctttcaccagcgttatgctgactttgccccatcacttcttcaggtctggaaaaaacattttgaagcaaggaaagaggagaaaacacctaacatcaccaagttaagaactgatttgcgttttattgcagaattgacaatagttgggattttcactgacaaggaaggtctttccttaatctatgaacagctaaaaaatattattaatgctgatcgggagtcccacactcatgtctctgtagtgattagtttctgtcgacattgtggagatgatattgctggacttgtaccaaggaaagtaaagagtgctgcagagaagtttaatttgagttttcctcctagtgagataattagtccagagaaacaacagcccttccagaatcttttaaaagagtactttacgtctttgaccaaacacctgaaaagggaccacagggagctccagaatactgagagacaaaacaggcgcattctacattctaaaggggagctcagtgaagatagacataaacagtatgaggaatttgctatgtcttaccagaagctgctggcaaattctcaatccttagcagaccttttggatgaaaatatgccagatcttcctcaagacaaaccaacaccagaagaacatgggcctggaattgatatattcacacctggtaaacctggagaatatgacttggaaggtggtatatgggaagatgaagatgctcggaatttttatgagaacctcattgatttgaaggcttttgtcccagccatcttgtttaaagacaatgaaaaaagttgtcagaataaagagtccaacaaagatgataccaaagaggcaaaagaatctaaggagaataaggaggtatcaagtcccgatgatttggaacttgagttggagaatctagaaattaatgatgacaccttagaattagagggtggagatgaagctgaagatcttacaaagaaacttcttgatgaacaagaacaagaagatgaggaagccagcactggatctcatctcaagctcatagtagatgctttcctacagcagttacccaactgtgtcaaccgagatctgatagacaaggcagcaatggatttttgcatgaacatgaacacaaaagcaaacaggaagaagttggtacgggcactcttcatagttcctagacaaaggttggatttgctaccattttatgcaagattggttgctacattgcatccctgcatgtctgatgtagcagaggatctttgttccatgctgaggggggatttcagatttcatgtacggaaaaaggaccagatcaatattgaaacaaagaataaaactgttcgttttataggagaactaactaagtttaagatgttcaccaaaaatgacacactgcattgtttaaagatgcttctgtcagacttctctcatcaccatattgaaatggcatgcaccctgctggagacatgtggacggtttcttttcagatctccagaatctcacctgaggaccagtgtacttttggagcaaatgatgagaaagaagcaagcaatgcatcttgatgcgagatacgtcacaatggtagagaatgcatattactactgcaacccacctccagctgaaaaaaccgtgaaaaagaaacgtcctcctctccaggaatatgtccggaaacttttgtacaaggatctctctaaggttaccaccgagaaggttttgagacagatgcgaaagctgccctggcaggaccaagaagtgaaagactatgttatttgttgtatgataaacatctggaatgtgaaatataatagtattcattgtgtagccaacctcttagcaggactagtgctctaccaagaggatgttgggatccacgttgtggatggagtgttagaagatattcgattaggaatggaggttaatcaacctaaatttaatcagaggcgcatcagcagtgccaagttcttaggagaactttacaattaccgaatggtggaatcagctgttattttcagaactctgtattcttttacctcatttggtgttaatcctgatggctctccaagttccctggacccacctgagcatcttttcagaattagactcgtatgcactattctggacacatgtggccagtactttgacagaggttccagtaaacgaaaacttgattgtttccttgtatattttcagcgttatgtttggtggaagaaaagtttggaggtttggacaaaagaccatccatttcctattgatatagattacatgatcagtgatacactagaactgctaagaccaaagatcaaactctgtaattctctggaagaatccatcaggcaggtacaagacttggaacgagaattcttaataaaactaggcctagtaaatgacaaagactcaaaagattctatgacagaaggagaaaatcttgaagaggatgaagaagaagaagaaggtggggctgaaacagaagaacaatctggaaatgaaagtgaagtaaatgagccagaagaagaggagggttctgataatgatgatgatgagggagaagaagaggaggaagagaatacagattaccttacagattccaataaggaaaatgaaaccgatgaagagaatactgaggtaatgattaaaggcggtggacttaagcatgtaccttgtgtagaagatgaggacttcattcaagctctggataaaatgatgctagaaaatctacagcaacgaagtggtgaatctgttaaagtgcaccaactagatgttgccattcctttgcatctcaaaagccagctgaggaaagggcccccactgggaggtggggaaggagaggctgagtctgcagacacaatgccgtttgtcatgttaacaagaaaaggcaataaacagcagtttaagatccttaatgtacccatgtcctctcaacttgctgcaaatcactggaaccagcaacaggcagaacaagaagagaggatgagaatgaaaaagctcacactagatatcaatgaacggcaagaacaagaagattatcaagaaatgttgcagtctcttgcacagcgcccagctccagcaaacaccaatcgtgagaggcggcctcgctaccaacatccgaagggagcacctaatgcagatctaatctttaagactggtgggaggagacgttgatccagcagcacgtgtcatttcattaggtcctgtatctgatgttgtggttagtggagtcctccagcaattgaatgagagcagtggacacatctcagcaggtcggtctagagagttgcgaatctaaacctgggacaggctggggccaggaggcagaaacaccagcctctgccaacaccggaacaagccgacgcttccagacaaggcggaaaaggccttttgtaatggaaatctcgcgagggttaatcttctcttgagaatggcagtcaagaaatgagatggttcacttgactactgagcagttacaccaaggagagcgtgaaggagatgattgagccagagaagaaacgggttgtgatggtaatggtgtgggggaaatgaacttgagctttaaacttgatttgagtttcagtgtctctgaattgaacatcccacgttggaagaagatacatttgggggctccaggactacagtagaaaagtatagagcaagcaggaaaatcttctagtaaaacttacatgcaggacaacaaaatgatgaaagatatccaaataccagataatccaccaggaaggcttttgtttaggaatttgtttcaagaggaacaagggatgagggagaaaaatccgttttatccatcagagtcagtgctataaaattgcctattaaggtaaaagaaaaatgtggagactattttactatacagagagcattaattcagatggcttagaaaagtgataccagcccaagaacagggatctaggtgagcccattgtaagtatcattgaaaacaaaacatgcccgtcaacatgtcacagaaaacgaacgaaggacaacaagaagtggatgagaatattttgttgaccttcatgggtttacagcctctgtctctaaacaaagtatggaaacaagtagagcttttattttgcttttgtttttgttttgttttttttttgttttcccccactaaatagaaatgagggtccttagtctgtttctgacaatctgttaatttcttaggacagctgtctttggtttgctttccagcaggcgtagtatatttagtcggagagcacatctgtatgcgacaacttgattacatctttttttctagctattttgcattttttcttttaccatgtttcagtttctgcatgtagatttaaataaaaaacaaaacttgtaaagttgtaacatttcacatggaaatgctgcccaatcttcaccagcttcagaaatctgacctttgccgatgctgcaataaagtgttgtaatttaaaaaaaaaacggacnnnnnnnnnnnnnn

SEQ ID NO: 21446 - DNA, 956 bp, Homo sapiens
  misc_feature 1, 2, 3, 4, 5, 6, 7, 8, 9, 10, 11, 12, 956: n = A,T,C or G
nnnnnnnnnnnnagttgaacctgtgaatacattttagacctcatcaatctatacagattgtcgaccaggctacaatttccactggtctgccaggaagaggacgtcacagcaggcctgcttaatattaactttggttccagcaattccttaaggttctcttcattctctttatcgcctgaattttcacaggcagacaccgaaagtggatgacatgttagcgcatttcctaagggtccagcttggcttcgctttactctgatacagttgcagatctggctgatttgcgagacaacaaaaacaaaatgttttttaaaaacgttccaaatctgcatctggaactcatggagtcaatattccgaaatcacacgaattatgtacatacatttgcatgcataccccttccccaaataatcctcagaaaaccggtaagcgtccaaactactctccggaggcttaggtaatcaacaatttaataaatacaattgctaatgtatggtgtacagatcctgtattgcccacccttctctattgctttgtccccgcgcgccctctgttttgcctaaatgggttccaggccatagccaccgactctcgctttgccttctggcctctcggcagtgcgcttcagcaccattgcgccaggtgacgctgctgagaacagctgagtggccggcactagtgcagctggaagccaaggcccagaattctcaggaatctgcactttacccaggcgaaaagcccaagggctctccccacagcttcccaacatccctctacagagtttttaaatattagacttattaacctgtagagatggagagaatcaaagaaatcacaaggtatctctgagggaaaaagaagagcaccagcagtaaatcgcttaagagtattgaaccagcaagccagggataggagaatggaatggaaactgacaggatgactgcagacgcgatggn

SEQ ID NO: 21447 - DNA, 5301 bp, Homo sapiens
  misc_feature 1, 2, 3, 4, 5, 5179, 5180, 5181, 5182, 5183, 5184, 5185,5186, 5187, 5188, 5189, 5190, 5191, 5192, 5193, 5194, 5195,5196, 5197, 5198, 5199, 5200, 5201, 5202, 5203, 5204, 5205,5206, 5207, 5208, 5209, 5210, 5211, 5212, 5213, 5214: n = A,T,C or G
  misc_feature 5295, 5296, 5297, 5298, 5299, 5300, 5301: n = A,T,C or G
nnnnnagacctggaagtcaagcgacccacgcgtccggtttagtctgcagccgagcagctaaagggagaaagaatcgctcaggaaagacacactgcagactccaccggcaccctgcaatagatgggttccgactacacaagggagaaaacgcggaggtgacactctcctgcctggaaagaggacgaacgaccaaacaaacgcaaggactggactccatgccgaaggtatctggaagtcgtgacacggtgtgtataaaacaaaagtttgcgagctgttaattgctgtgctgtgttattaagagacgctttcaagtttcaagtaccaaatgtagctttacgttgccaaaggaagttgaggcaattgctttgctgttttaacttgctctgtgagggaaatctcataaactgaccaatgcaccaaatgaatgctaaaatgcactttaggtttgtttttgcacttctgatagtatctttcaaccacgatgtactgggcaagaatttgaaatacaggatttatgaggaacagagggttggatcagtaattgcaagactatcagaggatgtggctgatgttttattgaagcttcctaatccttctactgttcgatttcgagccatgcagaggggaaattctcctctacttgtagtaaacgaggataatggggaaatcagcataggggctacaattgaccgtgaacaactgtgccagaaaaacttgaactgttccatagagtttgatgtgatcactctacccacagagcatctgcagcttttccatattgaagttgaagtgctggatattaatgacaattctccccagttttcaagatctctcatacctattgagatatctgagagtgcagcagttgggactcgcattcccctggacagtgcatttgatccagatgttggggaaaattccctccacacatactcgctctctgccaatgatttttttaatatcgaggttcggaccaggactgatggagccaagtatgcagaactcatagtggtcagagagttagatcgggagctgaagtcaagctacgagcttcagctcactgcctcagacatgggagtacctcagaggtctggctcatccatactaaaaataagcatttcagactccaatgacaacagccctgcttttgagcagcaatcttatataatacaactcttagaaaactccccggttggcactttgctcttagatctgaatgccacggatccagatgagggcgctaatgggaaaattgtatattccttcagcagtcatgtgtctcccaaaattatggagacttttaaaattgattctgaaagaggacatttgactcttttcaagcaagtggattatgaaatcaccaaatcctatgagattgatgttcaggctcaagatttgggtccaaattcaatcccagcccattgcaaaattataattaaggttgtggatgttaatgacaataaacctgaaattaacatcaacctcatgtcccctggaaaagaagaaatatcttatatttttgaaggggatcctattgatacatttgttgctttggtcagagttcaggacaaggattctgggctgaatggagaaatagtttgtaagcttcatggacatggtcactttaaacttcagaagacatatgaaaacaattatttaatcttaactaatgccacactggatagagaaaagagatctgagtatagtttgactgtaatcgctgaggacagggggacacccagtctctctacagtgaaacattttacagttcaaatcaatgatatcaatgacaatccaccccacttccagagaagccgatatgaatttgtaatttcagaaaataactcaccaggggcatatatcaccactgttacagccacagatcctgatcttggagaaaatgggcaagtgacatacaccatcttggagagttttattctaggaagttccataactacatatgtaaccattgacccatctaatggagccatctatgccctcagaatctttgatcatgaagaagtgagtcagatcacttttgtggtagaagcaagagatggaggaagcccgaagcaactggtaagcaataccacagttgtgctcaccatcattgacgaaaatgacaacgttcctgtggttatagggcctgcattgcgtaataatacggcagaaatcaccattcccaaaggggctgaaagtggctttcatgtcacaagaataagggcaattgacagagactctggtgtgaatgctgaactcagctgcgccatagtagcaggtaatgaggagaatatcttcataattgatccacgatcatgtgacatccataccaacgttagcatggattctgttccctacacagaatgggagctgtcagttatcattcaggacaaaggcaatcctcagctacataccaaagtccttctgaagtgcatgatctttgaatatgcagagtcggtgacaagtacagcaatgacttcagtaagccaggcatccttggatgtctccatgataataattatttccttaggagcaatttgtgcagtgttgctggttattatggtgctatttgcaactaggtgtaaccgcgagaagaaagacactagatcctataactgcagggtggccgaatcaacttaccagcaccacccaaaaaggccatcccggcagattcacaaaggggacatcacattggtgcctaccataaatggcactctgcccatcagatctcatcacagatcgtctccatcttcatctcctaccttagaaagagggcagatgggcagccggcagagtcacaacagtcaccagtcactcaacagtttggtgacaatctcatcaaaccacgtgccagagaatttctcattagaactcacccacgccactcctgctgttgagggtctctcagcttctttcaatgcttcaccaggggcaatatcagccaagaccaagttttcgaggaaacaaatattccaggagctacagatatgcccttcaagacatggacaaatttagcttgaaagacagtggccgtggtgacagtgaggcaggagacagtgattatgatttggggcgagattctccaatagataggctgctgggtgaaggattcagcgacctgtttctcacagatggaagaattccagcagctatgagactctgcacggaggagtgcagggtcctgggacactctgaccagtgctggatgccaccactgccctcaccgtcttctgattataggagtaacatgttcattccaggggaagaattcccaacgcaaccccagcagcagcatccacatcagagtcttgaggatgacgctcagcctgcagattccggtgaaaagaagaagagtttttccacctttggaaaggactccccaaacgatgaggacactggggataccagcacatcatctctgctctcggaaatgagcagtgtgttccagcgtctcttaccgccttccctggacacctattctgaatgcagtgaggtggatcggtccaactccctggagcgcaggaagggacccttgccagccaaaactgtgggttacccacagggggtagcggcatgggcagccagtacgcattttcaaaatcccaccaccaactgtgggccgccacttggaactcactccagtgtgcagccttcttcaaaatggctgccagccatggaggagatccctgaaaattatgaggaagatgattttgacaatgtgctcaaccacctcaatgatgggaaacacgaactcatggatgccagtgaactggtggcagagattaacaaactgcttcaagatgtccgccagagctaggagattttagcgaagcatttttgtttccatgtatatggaaatagggaacaacaacaacaacaaaaaaccctgaaagaactggcattgccaaatagttgcatttatcataaatgtgtctgtgtatattgaatattaaatactgtattttcgtatgtacacaatgcaagtgtgattattttaatctgtattttaaaaatacatttgtaccttatatttatgtgtaatttaacaaacaaattttatttttttactcccatgacagacatgtttttcctagtcgtgtagaaactagccactgttcaaatctgatacactattcaaccacaaagtgtaaaggcactgcttagattagttttgttggggaagaattattatgttgtatgaacaaccccactgaagcattatacaattcttaattccattaagtgatcccactttttttcaataactttttagaaattaagaatcattaaaattgttaagctattttattgttattttctctactttctactagccccaatagttgaactcttataggaaaatcgaaagataaagtgaaagtttatttcaggactgagaaatatcttgaaggttatttattagatgactatctcaaatgaactttttatagacaatgatgaaaacagaactaaagtcaatgtttcctgactcccaggcccctactattccaggccatcacactggcctgttccggagaatatttctctcacaatattattatctacttataattatggtaaacaataaattttattccatccttgtagtatgaaacatgctccaaggaaatggaatctgtcctttaaatggataacagtatgtgttctaatggcataaaatattactggataaaaacagttgtgtcagtgtctctcctaaggtagtaaatataattgacttattctgaacccattctattttgaatctcccctttcctctcacaatacttgaacattttaatcttttggaatattgtctttctttgttataactattcatttttagcttttgtctccagtgcatgatctcatatttttgcttttatttttagtataagaacatttataaaatcatatttttgttactgcaattgttttatttgttgtgtggcaaatgagaaatcctttatttattgtgctgtgatctctctgtgtggaatgccttggtgagagagatgcttattatgactattatcatttctgaccaagcttctattaatgttatttctaataatacactatcttgattgtactctccagaaaatttttctgtcagtgaaaataaaagaaaaattaaagtaaaaaaaaaaaaaaaaatataaagatatgcggccgcaannnnnnnnnnnnnnnnnnnnnnnnnnnnnnnnnnnngggggggggggcccttttttttttaaaaaaaaaaccccccccccccccccccgagaggggaaaaaaaaaaaaaaacccccnnnnnnn

SEQ ID NO: 21448 - DNA, 3552 bp, Homo sapiens
  misc_feature 3552: n = A,T,C or G
cgcgtccgcccacgccgacccacgcgtccggcagctctgggggagctcggagctcccgatcacggcttcttgggggtagctacggctgggtgtgtagaacggggccggggctggggctgggtcccctagtggagacccaagtgcgagaggcaagaactctgcagcttcctgccttctgggtcagttccttattcaagtctgcagccggctcccagggagatctcggtggaacttcagaaacgctgggcagtctgcctttcaaccatgcccctgtccctgggagccgagatgtgggggcctgaggcctggctgctgctgctgctactgctggcatcatttacaggccggtgccccgcgggtgagctggagacctcagacgtggtaactgtggtgctgggccaggacgcaaaactgccctgcttctaccgaggggactccggcgagcaagtggggcaagtggcatgggctcgggtggacgcgggcgaaggcgcccaggaactagcgctactgcactccaaatacgggcttcatgtgagcccggcttacgagggccgcgtggagcagccgccgcccccacgcaaccccctggacggctcagtgctcctgcgcaacgcagtgcaggcggatgagggcgagtacgagtgccgggtcagcaccttccccgccggcagcttccaggcgcggctgcggctccgagtgctggtgcctcccctgccctcactgaatcctggtccagcactagaagagggccagggcctgaccctggcagcctcctgcacagctgagggcagcccagcccccagcgtgacctgggacacggaggtcaaaggcacaacgtccagccgttccttcaagcactcccgctctgctgccgtcacctcagagttccacttggtgcctagccgcagcatgaatgggcagccactgacttgtgtggtgtcccatcctggcctgctccaggaccaaaggatcacccacatcctccacgtgtccttccttgctgaggcctctgtgaggggccttgaagaccaaaatctgtggcacattggcagagaaggagctatgctcaagtgcctgagtgaagggcagccccctccctcatacaactggacacggctggatgggcctctgcccagtggggtacgagtggatggggacactttgggctttcccccactgaccactgagcacagcggcatctacgtctgccatgtcagcaatgagttctcctcaagggattctcaggtcactgtggatgttcttgacccccaggaagactctgggaagcaggtggacctagtgtcagcctcggtggtggtggtgggtgtgatcgccgcactcttgttctgccttctggtggtggtggtggtgctcatgtcccgataccatcggcgcaaggcccagcagatgacccagaaatatgaggaggagctgaccctgaccagggagaactccatccggaggctgcattcccatcacacggaccccaggagccagccggaggagagtgtagggctgagagccgagggccaccctgatagtctcaaggacaacagtagctgctctgtgatgagtgaagagcccgagggccgcagttactccacgctgaccacggtgagggagatagaaacacagactgaactgctgtctccaggctctgggcgggccgaggaggaggaagatcaggatgaaggcatcaaacaggccatgaaccattttgttcaggagaatgggaccctacgggccaagcccacgggcaatggcatctacatcaatgggcggggacacctggtctgacccaggcctgcctcccttccctaggcctggctccttctgttgacatgggagattttagctcatcttgggggcctccttaaacacccccatttcttgcggaagatgctccccatcccactgactgcttgacctttacctccaacccttctgttcatcgggagggctccaccaattgagtctctcccaccatgcatgcaggtcactgtgtgtgtgcatgtgtgcctgtgtgagtgttgactgactgtgtgtgtgtggaggggtgactgtccgtggaggggtgactgtgtccgtggtgtgtattatgctgtcatatcagagtcaagtgaactgtggtgtatgtgccacgggatttgagtggttgcgtgggcaacactgtcagggtttggcgtgtgtgtcatgtggctgtgtgtgacctctgcctgaaaaagcaggtattttctcagaccccagagcagtattaatgatgcagaggttggaggagagaggtggagactgtggctcagacccaggtgtgcgggcatagctggagctggaatctgcctccggtgtgagggaacctgtctcctaccacttcggagccatgggggcaagtgtgaagcagccagtccctgggtcagccagaggcttgaactgttacagaagccctctgccctctggtggcctctgggcctgctgcatgtacatattttctgtaaatatacatgcgccgggagcttcttgcaggaatactgctccgaatcacttttaatttttttcttttttttttcttgccctttccattagttgtattttttatttatttttatttttatttttttttagagatggagtctcactatgttgctcaggctggccttgaactcctgggctcaagcaatcctcctgcctcagcctccctagtagctgggactttaagtgtacaccactgtgcctgctttgaatcctttacgaagagaaaaaaaaaattaaagaaagcctttagatttatccaatgtttactactgggattgcttaaagtgaggcccctccaacaccagggggttaattcctgtgattgtgaaaggggctacttccaaggcatcttcatgcaggcagccccttgggagggcacctgagagctggtagagtctgaaattagggatgtgagcctcgtggttactgagtaaggtaaaattgcatccaccattgtttgtgataccttagggaattgcttggacctggtgacaagggctcctgttcaatagtggtgttggggagagagagagcagtgattatagaccgagagagtaggagttgaggtgaggtgaaggaggtgctgggggtgagaatgtcgcctttccccctgggttttggatcactaattcaaggctcttctggatgtttctctgggttggggctggagttcaatgaggtttatttttagctggcccacccagatacactcagccagaatacctagatttagtacccaaactcttcttagtctgaaatctgctggatttctggcctaagggagaggctcccatccttcgttccccagccagcctaggacttcgaatgtggagcctgaagatctaagatcctaacatgtacattttatgtaaatatgtgcatatttgtacataaaatgatattctgtttttaaataaacagacaaaacttgaaaaaaaaaaaaaaaaaaaaaaaaaaaaaaaaaaaaaaaaaaaaaaaaaaaaaaaaaaaaaaaaaaaaaaaaaaaaaaaagggcgggccgcn

SEQ ID NO: 21449 - DNA, 2538 bp, Homo sapiens; identical to SEQ ID NO: 20316
  misc_feature 2538: n = A,T,C or G

SEQ ID NO: 21450 - DNA, 508 bp, Homo sapiens; identical to SEQ ID NO: 21293
  misc_feature 502, 503, 504, 505, 506, 507, 508: n = A,T,C or G

SEQ ID NO: 21451 - DNA, 341 bp, Homo sapiens
gaataactccctgactccgcaatcaaccaaggttcccagcctttttgaatttcacggcccctcatggtgtctcactccagcagacagaggattgtgtcgtgccaatgagaacagattctactacaattcagtcattgggaaatgccgcccatttaagtacaggttcaaatattatcttttttttcccaccaacctcttttccaggaaaatgcaaagctactctttagccaaattttaaaacaggggatatttattttgggaatcattaatacccatctgccccttttttggtccattggacatattgaaatgaatgattaatacttatcacttcatggtgt

SEQ ID NO: 21452 - DNA, 689 bp, Homo sapiens; identical to SEQ ID NO: 21367
  misc_feature 1, 2: n = A,T,C or G

SEQ ID NO: 21453 - DNA, 657 bp, Homo sapiens
  misc_feature 655, 656, 657: n = A,T,C or G
acattttaacagagggatataacaccattaaggctcatggacttaattcctgtctccagggctatgtatctttcaactgccatactgaggacttttcagccgtggtcccggatgtctggccatacccatcacttgaaacaactgtgtgatagtgagagcactgactcctaattttcagagactgaccaaatcaacctcacgtctttgccccataatactcctttttcttaagtcctacaccactggtttccctttctttgaagggcgtctgtattttgccaaggttaactctaagcttgtgctcttaattccatcctcttgtgctttctttgagaatttcaccttcccatttctttcttaccagcttctagctcctctgcctacaaatgtgatttcttcctatcctaaaaacaacaaaacccaaataaccctcctctgactttgcactagctgagctgttctccatcttctttctttttcttcaccatctgatcttaagatatgtctgcattcatgaactgccactactctctcactctcaaatccagtgcctctactctcacaaatccttgattctttaatcctgcatctgccctgaccactttatatcaatagatctgtcaaagatttaactacaacttttcaagtgccacannn

SEQ ID NO: 21454 - DNA, 392 bp, Homo sapiens
accccctgaccccttcctccgaatatacttttgtctcttgtcttttattcctgtgttcaccccactgtgttcagtccccctaggtctgtgcgggttacaagtggcgcccaaacagggacagaattgggtgctctacaccctctccttgagcagggactggcctagtgacttacctctattcagaatacggcaaaggcgttggagtctcacctccttaattaagctatacatgtttaaaaaaattattcaatgagaattgttaaagcacagtaaggaagactttattcagggccattatgacaggtatatagacaaatgtaatgggattttgcagtggtagagggtgaatggacttaactccaaatatcagcataagtaagtgggaatttata

SEQ ID NO: 21455 - DNA, 1060 bp, Homo sapiens; identical to SEQ ID NO: 20584
  misc_feature 1, 2: n = A,T,C or G

SEQ ID NO: 21456 - DNA, 440 bp, Homo sapiens; identical to SEQ ID NO: 20336
  misc_feature 440: n = A,T,C or G

SEQ ID NO: 21457 - DNA, 929 bp, Homo sapiens; identical to SEQ ID NO: 20094
  misc_feature 1, 2, 3, 4, 5, 6, 7, 8, 9, 10, 11, 12, 13, 14, 15, 16, 17,18, 19, 20, 926, 927, 928, 929: n = A,T,C or G

SEQ ID NO: 21458 - DNA, 734 bp, Homo sapiens
  misc_feature 734: n = A,T,C or G
acctccaggcacagctaattttactttttattttcttgagacaggtctcactctgttgcccaggctggtcttgtactcttggcctcaagtgatcctccagccatgagccactgtaaatgtctgggaatgccaacttgaagcccagctggtcagaagttctagaggcccagacttgcaactggtgtctgaagggatggcagtcttggggactgagccctcaacctgagggatctgatgctatttccaggcagatagtgtcagaattaaattggaggatacgcagttagtgtctgctgcagaactgattgcttgcttgctggtagggggaaatccccacatatctgggggtcattgaagtctttggtgttgactcttactgtgtttgttgttttcatgtgagagcagaggaaaagcaaggaaatgttttcctctggtcagttttccagaccagtctttacagaaacacacacagagcttcaaacaacactacacttacacagccctaaaagttagtaagtacctctttcagttctgcactccaagcacttcaatgatttcagccttactgtagtcctggtgttgatttttaacatccatctctcagcaacacatggaaaacgaacaccaggtcaacggaaaagggagccggggtcctggcagaagcgtagtgccagccgcaatagggcggcgtgggtgcaacggaggggagcgccggcagcagcaccggacgcggn

SEQ ID NO: 21459 - DNA, 1145 bp, Homo sapiens
  misc_feature 1145: n = A,T,C or G
ggcacgagtcgagaccagcctggccaacatagtggtctctactatagtatagtagaatatatactactacaccctgtctctactaaaaatacaaaaattagctgggtattgtggcaggtgcctgtaatcccagctactcgggaggctgaggcaggagaatcgcttgaacccaggaggcagaggttgcagtgagccaagatcacgccactgcactccaccctgggcaacagagcgagactccgtctcaaaaaaaaaaaaagtctgtattgccattaataagaaaaccttagaaaaatttgtacttcatagttctttctgctcaattagctgttagcattagtgtaaaatatagtttttaataatttctgtacaaagcctttgtacagaaaggcttcatccttaaagtgatgagaatggagtcaaaaaggattcaggtgtttagaggagctgcttttcattaggaccttggagagtcccctcagttttgacacccttgtttcaccacaagaaagcacccgacaccctgggttgcatacttactactcaggggctttccccccagctttcagagcactgaattattgtgagctggtgactctgcaggcctgagtggtattagggttgtggaatgttgttgcatacacgtttatgagttaaccactatttaaatgatgctgctttttaaagttttttcaaagtacaatagatttttgaagtttcaggtaactggaaaaatctttaacttttgctttaagtgtttggggcaggataaaacaacatagaaaatataaaacaatttttgctttgaaaaatacagtgcaggtgaccatttactgcttattctgtaatccttactgtctataattaacttcagtaacactgaaacttgatgaaaagttttaaaaaattatttactgggtgggacaagctattggacaggtgttatttctatactatctgaatgcctgcagtagatggtaagacagaacacaattgggggggatcactgttacatttactcttggggtgtaaaagtggttgttttaaaatccttggaaatgcaaaaaaaaaaatgaaaaaaaaaagtgggggccgaataagtgggcagaaagaagaagagaagaggaaggggaaaggtttagaan

SEQ ID NO: 21460 - DNA, 2538 bp, Homo sapiens; identical to SEQ ID NO: 20316
  misc_feature 2538: n = A,T,C or G

SEQ ID NO: 21461 - DNA, 2315 bp, Homo sapiens; identical to SEQ ID NO: 20885
  misc_feature 1, 2, 2313, 2314, 2315: n = A,T,C or G

SEQ ID NO: 21462 - DNA, 1949 bp, Homo sapiens
  misc_feature 1, 2, 1944, 1945, 1946, 1947, 1948, 1949: n = A,T,C or G
nnctcttaaaccttcccggtcttcccccttcaattctacttccaggttatgcctacttcccctaagctaaacctcatccaagctgttctgagattccctccaggcagggaaatgactatctggatctgagattatgtcatcttcatcaagtcttctttaccagagagcttcgggtttcagacacacagaagcataattctggccatacaaaaacctcaatgtttcttctgtcttccactcaatcaaagtctccttcaaaactttaagtaagtttctctttccaacttcaggacacacctgcactgaactagacactgacctagacacttggtttgatttggcaaattttctcttaaaatgctctgcacttttcttacttatgcctactagagttatttctgacctactgtattcactttcagaattttctgacgcttttaatctttcaggcaaagtgctatttgaagaactctgagtatttactttctgtaaaggaagttcacatgtagcatctttctcctgactatctaatttgcaatcgcctaactgctcagtgacatctactactgtctgttctttgtctttgtgtttggagttagctttgtgaccagctttctttttcattatgcttttttggtgcagctgtggtctaatatttgttgaatttggtctgtttcctggtagaatggaggaaacaaagtcttgctcattgtcactgctactatcactgtgagtgctagaagaactagattcatattgcttttcaaagtggctaggattgtcgatatctgatgttttaatggctttactgcataactgtacttcttctccagaatggccactttgttcttcctttagcagttgaaaatcaggatgcctctcttcttctcgaacccatactggagttttgggaatttgtgcttcaaaaaacttagatgcttgataacaaaaattgctgcaaaaagactttctttcagtaatatcatagactttattggttttggtagaaattttatatttctgttttggtacaattcccagcttcttctgacataaaggataaccacagagtttgacaatagaacgttcatccacgacatcactgtagtgagcaggtgtaatgaacctcccacactccattaggaactcttctgtaatattctcctctaaaagctgttcaacaatatgtagagcttttctctcaaattcaatcttctttctcacagctgcttctagttcagctttccttttagaagcatcttcttgtttcaaagtacttgtctgtttagtacctgcggcttttcgagagcagcggggagccccggccttgcggccggcagaagacggcccagcgaagtccgccatgggggagagtagtctgccggacggggacacgctccggcgtctcgccccgaggccccgcctccctacgcgtagcgcggggcggggccagaagagcgggctaagacgccggaggaggtggcggcggctgggagaggcgagggttctggccggtaagtggagttgtggagaggttcagggtggccagggctcgcggttggccgtgagccgcggcggacttggtgctgcgggccgactaggccacgcgaggtggtggagcctgcccacctaggcgagcaggaatcggaagacatggcttcctctgatgcagcccgcacgcgcgctggggtgttcactcgccttccagcgcgctgccctgaggaccgggctgactcgcgcccctactgagggcttggggccgagccttgccgccaggagaagcgatggtctcctcctgaaggccgccgttgtcttgtctccgtgtgatacagtgatttcactagctggattgatcactttggggactgcaactcctaaagagaaatggaatggagggcatctgaatcttcaccccctatagataagcttgtgttgcaccccaannnnnn

SEQ ID NO: 21463 - DNA, 5381 bp, Homo sapiens
agaagcctggcaaccaagaactgtttttttggtggtttacgagaacttaactgaattggaaaatatttgctttaatgaaacaatttactcttgtgcaacactaaatgtgtcaatcaagcaaataaggaagaaagtcttatttataaaattgcctgctcctgattttacttcatttcttctcaggctccaagaaggggaaaaaaatgaagattttgatacttggtatttttctgtttttatgtagtaccccagcctgggcgaaagaaaagcattattacattggaattattgaaacgacttgggattatgcctctgaccatggggaaaagaaacttatttctgttgacacggaacattccaatatctatcttcaaaatggcccagatagaattgggagactatataagaaggccctttatcttcagtacacagatgaaacctttaggacaactatagaaaaaccggtctggcttgggtttttaggccctattatcaaagctgaaactggagataaagtttatgtacacttaaaaaaccttgcctctaggccctacacctttcattcacatggaataacttactataaggaacatgagggggccatctaccctgataacaccacagattttcaaagagcagatgacaaagtatatccaggagagcagtatacatacatgttgcttgccactgaagaacaaagtcctggggaaggagatggcaattgtgtgactaggatttaccattcccacattgatgctccaaaagatattgcctcaggactcatcggacctttaataatctgtaaaaaagattctctagataaagaaaaaaaaaaacatattgaccgagaatttgtggtgatgttttctgtggtggatgaaaatttcagctggtacctagaagacaacattaaaacctactgctcagaaccagagaaagttgacaaagacaacgaagacttccaggagagtaacagaatgtattctgtgaatggatacacttttggaagtctcccaggactctccatgttgtgctgaagacagagtaaaatggtacctttttggtatgggtaatgaagttgatgtgcacgcagctttctttcacgggcaagcactgactaacaagaactaccgtattgacacaatcaacctctttcctgctaccctgtttgatgcttatatggtggcccagaaccctggagaatggatgctcagctgtcagaatctaaaccatctgaaagccggtttgcaagcctttttccaggtccaggagtgtaacaagtcttcatcaaaggataatatccgtgggaagcatgttagacactactacattgccgctgaggaaatcatctggaactatgctccctctggtatagacatcttcactaaagaaaacttaacagcacctggaagtgactcagcggtgttttttgaacaaggtaccacaagaattggaggctcttataaaaagctggtttatcgtgagtacacagatgcctccttcacaaatcgaaaggagagaggccctgaagaagagcatcttggcatcctgggtcctgtcatttgggcagaggtgggagacaccatcagagtaaccttccataacaaaggagcatatcccctcagtattgagccgattggggtgagattcaataagaacaacgagggcacatactattccccaaattacaacccccagagcagaagtgtgcctccttcagcctcccatgtggcacccacagaaacattcacctatgaatggactgtccccaaagaagtaggacccactaatgcagatcctgtgtgtctagctaagatgtattattctgctgtggatcccactaaagatatattcactgggcttattgggccaatgaaaatatgcaagaaaggaagtttacatgcaaatgggagacagaaagatgtagacaaggaattctatttgtttcctacagtatttgatgagaatgagagtttactcctggaagataatattagaatgtttacaactgcacctgatcaggtggataaggaagatgaagactttcaggaatctaataaaatgcactccatgaatggattcatgtatgggaatcagccgggtctcactatgtgcaaaggagattcggtcgtgtggtacttattcagcgccggaaatgaggccgatgtacatggaatatacttttcaggaaacacatatctgtggagaggagaacggagagacacagcaaacctcttccctcaaacaagtcttacgctccacatgtggcctgacacagaggggacttttaatgttgaatgccttacaactgatcattacacaggcggcatgaagcaaaaatatactgtgaaccaatgcaggcggcagtctgaggattccaccttctacctgggagagaggacatactatatcgcagcagtggaggtggaatgggattattccccacaaagggagtgggaaaaggagctgcatcatttacaagagcagaatgtttcaaatgcatttttagataagggagagttttacataggctcaaagtacaagaaagttgtgtatcggcagtatactgatagcacattccgtgttccagtggagagaaaagctgaagaagaacatctgggaattctaggtccacaacttcatgcagatgttggagacaaagtcaaaattatctttaaaaacatggccacaaggccctactcaatacatgcccatggggtacaaacagagagttctacagttactccaacattaccaggtgaaactctcacttacgtatggaaaatcccagaaagatctggagctggaacagaggattctgcttgtattccatgggcttattattcaactgtggatcaagttaaggacctctacagtggattaattggccccctgattgtttgtcgaagaccttacttgaaagtattcaatcccagaaggaaactggaatttgcccttctgtttctagtttttgatgagaatgaatcttggtacttagatgacaacatcaaaacatactctgatcaccccgagaaagtaaacaaagatgatgaggaattcatagaaagcaataaaatgcatgctattaatggaagaatgtttggaaacctacaaggcctcacaatgcacgtgggagatgaagtcaactggtatctgatgggaatgggcaatgaaatagacttacacactgtacattttcacggccatagcttccaatacaagcacaggggagtttatagttctgatgtctttgacattttccctggaacataccaaaccctagaaatgtttccaagaacacctggaatttggttactccactgccatgtgaccgaccacattcatgctggaatggaaaccacttacaccgttctacaaaatgaagacaccaaatctggctgaatgaaataaattggtgataagtggaaaaaagagaaaaaccaatgattcataacaatgtatgtgaaagtgtaaaatagaatgttactttggaatgactataaacattaaaagaagactggaagcatacaactttgtacatttgtgggggaaaactattaattttttgcaaatggaaagatcaacagactatataatgatacatgactgacacttgtacactaggtaataaaactgattcatacagtctaatgatatcaccgctgttagggttttataaaactgcatttaaaaaaagatctatgaccagatattctcctgggtgctcctcaaaggaacactattaaggttcattgaaatgttttcaatcattgccttcccattgatccttctaacatgctgttgacatcacacctaatattcagagggaatgggcaaggtatgagggaaggaaataaaaaataaaataaataaaatagaatgacacaaatttgagttttgtgaacccctgaacagatggtcttaaggacgttatctggaactggagaaaagcagagttgagagacaattctatagattaaatcctggtaaggacaaacattgccattagaagaaaagcttcaaaatagacctgtggcagatgtcacatgagtagaatttctgcccagccttaactgcattcagaggataatatcaatgaactaaacttgaactaaaaattttttaaacaaaaagttataaatgaagacacatggttgtgaatacaatgatatatttctttattttcacatacactctagctaaaagagcaagagtacacatcaacaaaaatggaaacaaggctttggctgaaaaaaacatgcatttgacaaatcatgttaatagctagacaagaagaaagttagctttgtaaacttctacttcatttgattcagagaaacagagcatgagttttcttaaaagtaacaagaaaaggaacaaaaaaaatgaggtttgaaatcttttaccatggcaaaacattaacatctttctcaaaaacatagagaaatctggaaaaatcaagaagataaaattctggaccagttagtgacattctttcaagcatacttgtaaaatgtttccttaaagtgttcttgggatgaaaatgattgtcatgtctccaacaacagtgaactgatgttgttccttggaataaaagtcaatccccaccttaaaaaatgtatggcttctttgaggaattcttatgtcttaaagactttttacattctagacaattaaattgattgaggtcataaattaagaagtgaatagttaccactacacggtaaggtaagcagcctgaaagcatttgtatcatatatgtgtgtgtgtgtgtgtgtgtgtgtgtgtgtgtgtgtagatatataaaataaaaaactcctctacttgtactttggcattcaatttttagaaattcagtctcaaatgccattatggtatttttcaaatgatacctttaagtcaatggtttctttcgactgcaatagagaagatatggcaagaaaaatgttgcagtaccatcttctgggagaacattcatgaaatccttcagttctagttccacagcaacaattgacaatgtttcttttaatgatgacaggtagagttgatacttctctccaccacattttattctctgacaaagttcaggcaacagttttttccaccacagagtccggttctcttctttcagttcatgattagcatatggaatgactgcctccgggcatctctctaacagtatgtctatgcactgttcatactctttcaagcgtgtacgacacagaacatggacactgaggccggcaatagtgtcttctgaaagtggctccaagaacggaataatggaagctatgtcaaatgaaggaccacatataagagactgtaattttgaaagatcttctgtataatttttatcagctaaagaatcagatgatctttca

SEQ ID NO: 21464 - DNA, 802 bp, Homo sapiens
gcatttctcccagggatctctgtgcttccttttgtgcttcctgtgtgtgtggatatttaaaggggctggaaatgtgcaaaaacatgtcactacttagacattatattgtcatcttgctgtttctagtgatgttaattatctccatttcagcagatgtgtggcctcagatggtaaagtcagcagcctttcttatttctcacctctgtatcatcaggtccttcccaccatgcagatcttcctggtctccctcggctgcagccacacaaatctcccctctgtttttctgatgccagcttctcggcacttgctatttcttctccccgcgtacctcggccgaggtacgcgggggaactcttttaaactataacatggacactttattggaaccaaactttagttttctacattaatgagaaacactggtaactttgcttcattgaaaaaataattgcttgttctctgtcagatgcacttcgtcttagtaacatggccatggggaagacaaccacaggccagatagtcaatctgctgtccaatgatgtgaacaagtttgatcaggtgacagtgttcttacacttcctgtgggcaggaccactgcaggcgatcgcagtgactgccctactctggatggagataggaatatcgtgccttgctgggatggcagttctaatcattctcctgcccttgcaaagctgttttgggaagttgttctcatcactgaggagtaaaactgcaactttcacggatgccaggatcaggaccatgaatgaagttataactggtataaggataataaaaatgt

SEQ ID NO: 21465 - DNA, 508 bp, Homo sapiens
  misc_feature 485, 506, 507, 508: n = A,T,C or G
acttgggatatattggtgaacaaaacagaaatgtctgtgccttcttggatcatgtgttttagaattatgagaattaaatgaaaataaatattcaatatggtgccagacacatagaggtgcccacagtgtcttatctcactttcttcctgcttgccatatcttttccatcagggccaaagagaatgggaagtgggaagaaataaacttcatatttcatttgtatagctgtggagagtagcaggccctgggtccctttggggaggtcatgcgaactgggcatggccttctgtcaagaattattagaccaggcatggtggctcatgcctgtaatcctagcactttgggaggctgaggcaggaggattgcttgaggccaggagtttgagaccagcatagccaacatggcgaaaccctgtctctaataaaattaaaaattagccggcatggtggcacatgcctgaaatctcaggtctccaggaggctgangcatgagaattgcttgaaccnnn

SEQ ID NO: 21466 - DNA, 1859 bp, Homo sapiens
  misc_feature 1859: n = A,T,C or G
accaacaacgcacttacccactgttttaatctaggttattcttgaaagcagagcctgagacaaaggtagacacattctatttatgagtctaacacccaggagcaggaatgagagataggggagtgaactggggaaaggggaaactaagtccgagcaaaaccagatactgctcttatcaagtggtccacccctattaatggctacataatgcagaactttctcaggattcttcttaaactttatctcagaactgtctgcctcagggagaaaggagaagtatttctccatcagcagccacctcctgtgtgttgagggctgctcctttggggcattaacccactgcctccaccaccccaaccctctgggctgcaaagagctagctgacagtccagctggtaccttagcatcacacattgctgcatcagagaggtcttaagacaggaagctagagtcttggtgcatgctcgaagtgagacggtgtcagcacagagcaggataaaatcttcccgttaactcttcaccagagctatgactggaatcagaggttgaaaagatgtgagactgtacccaagaagcatcttataagcctacgtaatatactgttagactcatcgaaatctatttcctcccttctttataatcaaaacttcagtgtccagaataaagttggcagaagggttacattggaaagttaaatgtactagaaggtgtacatttataagttttgaccttgagtcgtgttcaaggagaaagtgacattggaacttggaaaatttaaaaatgattctacttgaaaaatttgaccattgcatagaaatattagctatcgtctaatcttttgtaatcttagaaacaatcgtgaattgtttggtgaaaaatgaaaaaataaccatttcttatgtctccgtgacctttatagaccaatgtcaccaacttttcctaaggtaattgtttcctactgtcaaatagctctagtgatataaatcttaacaatcaatgaagggaaaactggtggaaacataggaggaaaaatactgggataattttcatcacaaagtattggcattaacattggttagaataggggagaaactgcatgacttgacaactggacattcctgtatgttgtatgaggccctgtcttaacagaaatagtgatgtcatcatcatcctctcttatttggtcttgaattgccaccaatcggataaaacctttgaattatttaactcaatatatgttaagtttctactatgaaaaaaaaaaaaaaaaaaaaaaaaaaagtgtgtggtgggggcgccgcggggccccgggaaaagatttctctaagaacacaaacgagaggggggccgcgggccccacataaggtaaagtggaacaaggtggcacaaagcggtgagtcccaagagggaacaccgggggacatggacaaaggggcggggagaatctcctaacgaacaatataaaaaaaagcgcgcgcggggggggcgaaacaaggggaggcgtgctctcggagagaacacaaatccacacagaagagggagagagacacaagagcgcgagcacataacagcggggggagccactatatatacacaaaagcgggagagtactccacaagggaggagaaaaccctgcgcacagaattcatcaacaaaaattatcgacagcccacggcacgggatggaggggggggggtgatgaaacaagaacgcagacgacgccagaacgactacgacacacagagactgcaaaagcaacatccaagaccaacacaaaccaaaccgcgaacagacaatccacagcacaaaatacacaaccacaacacaacaacagcgacacccacgcgaaagaatacaan

SEQ ID NO: 21467 - DNA, 406 bp, Homo sapiens
  misc_feature 1, 2, 3, 4, 5: n = A,T,C or G
nnnnnattgggcagttggcgatattctgcttccaagaactcctaagacttttcagcgatggccaaggcgtgcatttcttcatctcgaaggactttcaaccattctttctcaatttccttattgagtggcagacctttttctatcctggaattgcaagtgaagatgaagtcttctttctccctgacttccttttggagttcaatggttagggcttgtttcatggacagctcagcaacaagagccatcattttctcagttgcatttttgatccttctttgatagccattcatcttgtctatttttggatcatttctttttcggtcagatctttccctggaaggaagcgagctctattctcaccatcaggctttacgaactgtttctccaggtctttaattctgtctgt

SEQ ID NO: 21468 - DNA, 713 bp, Homo sapiens
  misc_feature 1, 2, 3, 4, 5, 24, 713: n = A,T,C or G
nnnnnaggctggagtgcagtgaantgatcaaagctaactgcagccttgaacccctgagctcaggcaagcctctgacctcagcctaccaagtagctggaactacaggcatccaccaccatgcaccaccatgtgcacctaattttttaaattttttaaatttttttagaggcagggtcttgccatcttgcccagactggtctcgaactcctgggctcaagcgattctcctgctttggcttcccaatttgctgggattacaggtgtgagtcaccgcacccagcctcttttatatttttcttggggacacaggtcctcaacgtggagttatcccaaaacaagtagattttgagaacttgtactaagaactactttgtgatcaatataaatctcttcatctcactgtatcattatgtctatatggtttccatttgttctaacagaagctgttgggatggaagccaaaaacaccctttgagacttgtattgaacagttttcatatgcaataaagataactttatgcacatgcagggaaataagagagttgaaaatggaaggaaaatatttgccaaattgtttaagtgttttaaggtgattactggtaacacagtaaagtttccaggggaaaattccatctctcaccctccacataaaaactcacagtcactgatcactgcttgccaagtttgagttcagctctattttctggctttaan

SEQ ID NO: 21469 - DNA, 1532 bp, Homo sapiens
atgacgtcaccaatcaactgaacaaactagaatatgaacgataaacatttgatttaaaaaactgcatccatgtttactacctaaagttgacaactgtaccgtggcacactaaataattgaggaacaagggggcctgaagtaagcaacatactttcaaatggttcaggagaaaaacatgtatatagaagtccaaatgacaaagcaaatggcacaaaatgttaacaaatgattctgcataaagtgtatacatattgcagagtattacatgtactgtcgttgcaaccattctgtaagtttgaaattactttcaagtaacaattttgtaaaaatacttgtcacgaaggtttttctaaactagatgctaaaatcctgttatagttccagatttaaatattccagttaaggggtacacatggagtataataagtagcagagtccagtagctatttcagaaatttagttcctaagacaaagtaggaaatatttgaagctcagctccttagctttaaaattaggactccctcatcagttttagtttactacactcacctaaagaatatgtgattgatttacaagtttcaagcagaatttcagccaaagcctcaggatcggcatgttcttcttccaaaagcattaacccctgaaaaaaggcattcattgattgcaggactcctagctgcactttccacgtgctgagttttagccgttcacacatcagtttgcacagctcctgacgataacaacgttgggtctccgcgtttcgcggccaggctttgcccaggctttcaaaggcacccagcagatattccagctggagctccttttccttttcattctcctcttcatttttggttgtccggaccccactgctttcaagtgagttcttcttgatgagaggtatgacaatgttagagaactcctggaatctgtcctctttggtggccttcaagatatcagctgcacagctgattgctacaatcttgtatttgacattctctttgctacattccttcagaacagcttgaagaatttcatttgtgctgggttgattgggcacagacttttccagctctgcactgcaagctgtcaccacacaggcaatggctttcaatagctcctcctttcctgcccacgttcttccagccaggccttgcagcaatgcggtcagtatcattccgagatatggaggtactagagagctagtctgttttgcaattgatgccacggcaattgcaccctgggctttcattttccaggactgagactgcaaagccttctgggtaatagtaattaactcctgcaggtataatcgaatgccaccaaaggatccaggtacgttttcctgccacacttcggtccataaattacattcttctttttcggatttctcctcatcagcaatttcatgcatgcctaaaaatgccagaggcaggacttcttttgcatgattctttaatacatcagggctgtatcgtccatagcatgaatagtcaagcacagaggtcttgtagataggttcttctttctccata

SEQ ID NO: 21470 - DNA, 4607 bp, Homo sapiens
  misc_feature 1, 4604, 4605, 4606, 4607: n = A,T,C or G
ngcgtccgctgcagtctggagccccatagtgcggggccgcggccaggccacaggaagagctcgaggcccgggccgcaccggctgagtgtgcgggcccgcgcggctcggagccgccgccgcccatcgagcccctccgggcgtcgggtcggcccgccatggggtccctgttccggagcgagaccatgtgcctggcgcagctcttcctgcagtcgggcacggcctacgagtgcctcagcgccctgggcgagaaaggcctggtccagttccgagacctcaaccagaacgtaagttctttccaaagaaaatttgttggtgaggtgaagaggtgtgaagagctagagcgaatattggtgtatttggtacaggaaattaatagagctgatattccccttcctgaaggagaggccagccctcctgcgccacccctgaaacaggttctagaaatgcaggagcagttgcagaagctcgaggttgaactgagagaagtcactaagaacaaggagaaactgaggaaaaacttgctggaactgatagagtacactcacatgctgagagtgacaaagacctttgtgaaacgcaacgttgagtttgaacccacttatgaagaattcccttccttagagagcgattctttgttggattacagctgtatgcagaggctgggagcaaaactgggatttgtgtctggcctaattaaccaaggaaaagtggaagcatttgaaaaaatgttgtggagagtctgcaaagggtacaccatcgtgtcctatgcagaactggatgaatcccttgaagaccctgaaacaggggaagtcataaaatggtatgtctttttaatatccttttggggagagcagattggccacaaggttaagaagatatgtgattgctaccactgccacgtgtacccctatccaaacacagccgaggagcggagggagatccaggaggggctgaacacccgcatccaggatctctacactgtactgcacaaaaccgaggactatttgaggcaagtgctatgtaaagccgccgagtctgtctacagccgtgtgatccaggtgaagaaaatgaaggccatctatcacatgctgaacatgtgcagctttgacgtgaccaacaagtgcctcattgctgaagtctggtgtcccgaggcggatctgcaggacctgcgccgggcactggaggagggctcgagagagagtggtgctacaatcccctcattcatgaatataatccccacaaaagaaacaccccccactcggatccgcaccaacaaattcaccgagggatttcagaacatcgtggatgcttatggagtcggaagctacagagaagtcaatccagctctctttaccatcatcaccttcccgtttttatttgctgtgatgtttggagacttcggacatggctttgtgatgtttttatttgccctcttgttggtgttaaatgaaaatcatcccagactaaatcagtcacaagagatcatgaggatgttttttaatggccggtacatcctcctgctgatggggctgttctcagtgtacactggcctcatctacaacgactgcttttcaaagtcagtcaacctgttcggctctgggtggaacgtgtcggccatgtacagctccagccacccacccgcagagcataagaagatggtgctttggaacgacagcgtcgttagacacaacagcattttgcagctggatccaagcattcctggagtgttccgaggcccttatccccttggcattgatcctatttggaacttggccacaaatcgcctcacttttctaaactctttcaaaatgaaaatgtccgtgattttaggaatcattcatatgacttttggagtcattctgggaatatttaaccacttgcacttcaggaagaagttcaacatttacctggtttccatcccggaacttctcttcatgctctgtatctttggataccttatatttatgattttctacaagtggctggttttttcagcagaaacctccagagttgctcccagcattctgattgaatttattaacatgtttttattcccagccagtaaaacaagtggcctttacacagggcaggagtatgtccagagagtgctgctggttgtcacagcattgtctgtccctgtcctcttcttgggaaagccactgtttttgttgtggcttcacaatgggcgtagttgcttcggggtgaaccggagtggctacacacttataaggaaagatagtgaggaagaagtttcattgctgggaagccaagatatagaagagggaaatcaccaggtggaagatggatgtagagaaatggcgtgtgaagagtttaattttggagaaatattaatgacccaagtaatccattccatcgagtactgtctgggatgcatctccaacaccgcctcctacctgaggctctgggcgcttagcctggctcacgcacagttgtctgatgtcctgtgggccatgctgatgcgcgtgggcctccgcgttgacaccacctatggcgtcttgctactgctcccggttatcgcgctctttgcagttttgaccattttcatccttctgatcatggaagggctttctgcgtttcttcacgccatacgcctccactgggtagaatttcagaacaaattctacgttggtgcaggcaccaaatttgttcctttctcattcagtctactttcatcaaagttcaataacgacgacagtgtggcatgatcatattgctgtaaccaacaagctttcagatttatggagaatgaccatgttatagactttcacttatgtcagatttatgataggaaaaattccatcttcattactgccttatgacatagccaaataattctgtaagatatacctcttcctcatatgttaaatattttgtaaagtttaccaatttgagatataaaaatttcttttggttttttatgatgagcaaatataagttaatgccaaacgttatgttaaagttattttttcaaatacaggatttggggagagaagccaattttgcatggctagttgaaaatggtattagatacttatttcctttaaactttatttaaaacaaacaacagagttaatctgtcacctgaagttgccagataatattttccaacagctgaagtagggatagttttttaaaaaatttaatgatgggtaatcaaaacattcacatttattctgctggatttaaaaatatgtacttttttttttttttttgagatgaagtcttgctgtgtcacgtaggctggagtgcaatggcacgatcgtgtctcattgcaacttccgcctcctggattcaggtgattctcctgtctcagcctcccgagtaactgggattacaggcatgcgccaccgtgaccagctaatttttttgtatttttgtagagatggggtttcaccatgttggccaggctggtctcgaacttctgacctcaagtgatccacctgcctcggcctccctaagtgctgggattacaggcgtgagccaccatgcctggccaaaatatgcaaatattttttatcctgtgctacctagaattacaagtagaggatggtttttacaattttgtcttgttttagtaattggggacaatgggataaaatgacatacaacaaatggttatcccacttgtatatttttttaaagactcttatcctgttacccttacataaaaccagttatgataattgtatgtttggaagataaattgtatgctgagccttaaaacccagtgtgactgtagaagatataatgcggacatgatttgaatttagtgacagcttggctgatgtcactgaaccagaagggtttatactgagtgaaggaaaggtaaaaagcagtattttgtatatttttgtaacaaaatataaatgaagatattttaccatgaagagattgcacttatccttgagaacagtctaaatataaatgaagatattttaccatgaagagattgcacttatccttgagaacagtctaatgatactttttttactttcagactgtttctagctaaagttctgataaaagtattgagttaatttaaactttcaaacactgtttagatcagttgaaaactaattcttaatagccattgttttataatctttagtttaaattcatctgtttgacatttggttttttgtgaacttgagtcagtcctattgaacattttgacctatattctgccaaatcatgttaatcctcatatctcagctccgatcccagaccattatttccaaaaagaaacctgactttcttatcaccttcttgacatgcgagtgatacacgttcacacggctattcgccgcatcctcctctatccggtccgaggtcaaacagctggccctctgtacaagccgaagccggacgagctggttacgtggctgccacgtcccccacgcaatgaccgaccgcgctaacagccgcgagtcaataaccccaatacgacgatccggcaccgccgcgcccccgccacgaccacgcccgccactaacaaacacccaaaaaaacgcgcgcacaatcgcgcccccaccctaagacaggaaaaccacgacccacgacaccggccacaaacggctctgcannnn

SEQ ID NO: 21471 - DNA, 2538 bp, Homo sapiens; identical to SEQ ID NO: 20316
  misc_feature 2538: n = A,T,C or G

SEQ ID NO: 21472 - DNA, 816 bp, Homo sapiens; identical to SEQ ID NO: 21390

SEQ ID NO: 21473 - DNA, 666 bp, Homo sapiens
ttcagtatcaaagcccctttaagggcttccattttgaaaaagtaggattttctcttccttctcttttagaacatatgataaaatattgcccttttatcctttaaccatgtatccatttttttttttgatggggagtaaggggtacacactccctactacaatgtcacaaactttttctttttgttgttcctattggttgtaactgtactattttctaacaagaagccttcaggggaaataatggatcctagttatgtcaaagaaaacaatgagacaaaatggcaacttcacagtcttcaagtaaatagaatccctgatataaatggaaattaacatgtaattttgggggcaataaaaacaacaacaaaaacctgtgacaactctgtcctactcctttaaaaatgagctttgactctgtagtctcttaaggcacaaaacctgatagacggcatttaactggtggcctgcacctctgatttggattttaaaaaacaactattgacatttaaataaaaataaaccattttgttagagctggagatccttggataagttgggagaaatattcaaatgaactagcatcttgtatgtataaatatttgttgccaaagtaaaaaaaagtacaatgtggtttacatagtccaggacgcgtggtcgatcctatat

SEQ ID NO: 21474 - DNA, 460 bp, Homo sapiens; identical to SEQ ID NO: 21412
  misc_feature 460: n = A,T,C or G

SEQ ID NO: 21475 - DNA, 2538 bp, Homo sapiens; identical to SEQ ID NO: 20316
  misc_feature 2538: n = A,T,C or G

SEQ ID NO: 21476 - DNA, 1481 bp, Homo sapiens
  misc_feature 1, 2, 3, 4: n = A,T,C or G
nnnnccctatccttcggtgtcaaacccgtgcccccccgttttttgcgagaccacccctgttcttcccggttccttggcacccgtgccacttttctgactctggtgccgccccccaacgcggtttttaatctttcttagggcctagccgtcgaccatgttttttttttcatgcgtgttgtttgtttctattagaagttaccagggggtgcaggattctttatctcaggacttttaagacctttatccatagagatcccaacattgttcatttgatccaagtgtagcacctatgcatgggataaaaaatagtatcacatctttgatttttctgattagttatttgggtcttgaaatgtccagtttatcagaaagtcttgtactgtcttctggggactatgtcctagatactccttgaatttttcaggaaccaaaggggttcactaaatccaaggaagacggtcccttttatcaagtcagaaggaggagaaaaaaaaggacattgcaatcattctgttgtttccattgattctgctgctgcattgttgccactcaaactggtcctgctgccttaagatgaatcggtagattcaggtccctcaagtcttcatggcaattgatacagtgactttgatgttttttgttcccatacctatggttatatgctcagccattgttcccaaagcagcagccccctgctctggcccctgggcatcctgactttatccacacacaaaatgagcaaattgacccttccccccatattcagaacctaatgtggaacccacatcttagccaagaattagctgagaccttcatggtaagagatcctttgaggccgttgttggtcttttctctagcagatattaggtaggcttgtcctaaagggtcagaggagttccaaagggtcagaggggtggcagaaagagatcagtgtttgtttcttcttctttgctaccagatctatactgtgaggcacctttatatcctgtatagaaccttgggcagtagaaagtcccatatgaaccttcccctgagcagtggctcccagctgtggttggccccttgagtgacccgatttacatgataatgaaaatcgtccaagctacttccatctctagctcaagattttaagatattttcaaactctagctcacaggaagccattgaagagaaatctcagaatctcaggtaggttagttggactcaacagagccaagccttgtccatgaagcatcactaggcatgtgtaaaagtagggctttgtgcttgcttcggcggcacatatccataatgtagaatcagtggaagctctgagcttatttttctgcaactagatggtcttatctgggggcaaagtgagacaatgatagatcatctggcattagattctcatacgaagcacacaacctagatccttcggataggcagttcacaacagggttcgtgctccaatgagtttctaatgttatcactccccgcgt

SEQ ID NO: 21477 - DNA, 689 bp, Homo sapiens; identical to SEQ ID NO: 21367
  misc_feature 1, 2: n = A,T,C or G

SEQ ID NO: 21478 - DNA, 670 bp, Homo sapiens
  misc_feature 623, 625, 670: n = A,T,C or G
cacagtggtgcgatctcagctcactgcaagctccgcctcctgggttcacgccattctcctgcctcagcctcccgagtagctgggactacaggcatctgccaccacgcctggctaattttttttgtatttttagtagagacgggatttcactgtattagccaggatggtctcaatctcctgacctcatgatccacctgccttggcctcccaaagtgctgggattacaggcatgagccactgcgcccagccgagtcattttttaatactactgcatgtgagttaacacaatcattcccaaattgaagttttagatgggccctcaaaatttttaggatatggttttcctacaggtttatattgaaagtatggggtatctcctattactcctctttttatttgtcttaaaggagaaagggagaggccagagaccaaatgtccccatttccctatagctaatctctctggaagacaagcagcccagacctgagcttctagatggatacaaccaggtgcatgtccgaggcacagaggagggtatttataacccatagtaacattaaatgcagtgccttcttctcctggttgagcagggcaatggtcatctatagctccaggcatctacnanactatcgttagtgtagatttccgcaggagcattcatccaggtgan

SEQ ID NO: 21479 - DNA, 879 bp, Homo sapiens; identical to SEQ ID NO: 21368
  misc_feature 1, 2, 3, 4, 5, 6, 750, 846, 852, 872, 879: n = A,T,C or G

SEQ ID NO: 21480 - DNA, 2538 bp, Homo sapiens; identical to SEQ ID NO: 20316
  misc_feature 2538: n = A,T,C or G

SEQ ID NO: 21481 - DNA, 420 bp, Homo sapiens
cgcggtggcggccgaggtaccgcacacaattgtatgcgctgcactttcatctgactggaagcacagtgggcttacaccagcatcaacacaaacacgtgagcagtgccttgcactacaacagacacgatatccctaggggacagcactgttttcagccccattataatctcatgggactactgttacagatgaggtccaccattgaccaaaacatgtggagcacggcaattaattctggatttggatggggacacaaaataagcacagctctggcaggtctaatcaagattaagagagaaaagcaactaaaacatctgagaaaacagatacagagggcataacaccacacagaaaatactacatacaactgagctataatttttaattgacttgctggaaattactaaattactaaaattg

SEQ ID NO: 21482 - DNA, 1498 bp, Homo sapiens; identical to SEQ ID NO: 20817
  misc_feature 1, 2, 1498: n = A,T,C or G

SEQ ID NO: 21483 - DNA, 508 bp, Homo sapiens; identical to SEQ ID NO: 21293
  misc_feature 502, 503, 504, 505, 506, 507, 508: n = A,T,C or G

SEQ ID NO: 21484 - DNA, 516 bp, Homo sapiens; identical to SEQ ID NO: 21320

SEQ ID NO: 21485 - DNA, 1380 bp, Homo sapiens; identical to SEQ ID NO: 20118
  misc_feature 1380: n = A,T,C or G

SEQ ID NO: 21486 - DNA, 1498 bp, Homo sapiens; identical to SEQ ID NO: 20817
  misc_feature 1, 2, 1498: n = A,T,C or G

SEQ ID NO: 21487 - DNA, 1001 bp, Homo sapiens; identical to SEQ ID NO: 21314
  misc_feature 681, 682, 683, 684, 685, 686, 687, 688, 689, 690, 691, 692,693, 694, 695, 696, 697, 698, 699, 700, 701, 702, 703, 704,705, 706, 707, 708, 709, 710, 711, 712, 713, 714, 715, 716,717, 718: n = A,T,C or G

SEQ ID NO: 21488 - DNA, 516 bp, Homo sapiens; identical to SEQ ID NO: 21320

SEQ ID NO: 21489 - DNA, 516 bp, Homo sapiens; identical to SEQ ID NO: 21320

SEQ ID NO: 21490 - DNA, 549 bp, Homo sapiens; identical to SEQ ID NO: 21395
  misc_feature 1, 549: n = A,T,C or G

SEQ ID NO: 21491 - DNA, 1380 bp, Homo sapiens; identical to SEQ ID NO: 20118
  misc_feature 1380: n = A,T,C or G

SEQ ID NO: 21492 - DNA, 1380 bp, Homo sapiens; identical to SEQ ID NO: 20118
  misc_feature 1380: n = A,T,C or G

SEQ ID NO: 21493 - DNA, 236 bp, Homo sapiens
  misc_feature 1, 230, 231, 232, 233, 234, 235, 236: n = A,T,C or G
ncactatcagggcgaattgtagctccaccgcggcgaggtacgcggggggtcttgttaagtggaaactgctgctttagagtttgtttggaaggtccgggtgactcatcccaacatttacatccttaattgttaaagcgctgcctccgagcgcacgcatcctgagaacccgagcctttggttaagaccgagcttctattaagcttgaaaagaataaaaactcctccagatgnnnnnnn

SEQ ID NO: 21494 - DNA, 921 bp, Homo sapiens
  misc_feature 1: n = A,T,C or G
nagggagtcacccacgcgtccggtgaaatcctgtctctaaaagaaaaacaaaacaaaacaaaacttagccaagcttggtggtgcacgcctgtaaccccagcgactccggagattgaggtgggaggattgcttgagtctaggagacaggttggagtgagccaagatcgtgccactccagcctgggtgacagggtgggaccctgtctcaaagagataaacgtggctatgttcagacaatatttatttgcaaaaataggcgttgtgccagatttggcccaaaggccagtttgtcttacccctgttgtatagttgattgaattactgagggtacttttagcgtgtgctcatggttctttaagggccacgatgctggctctttaaactttttcacaactttcaccaccctccctttattaataaagtcttcaattttttccttctgattataaaaatataactaccgtttggggagaattaaactgtcactgaaatatttaaagaaaaatgtttcttaatgagtcatattttagcatatttcctttcagtcctttttttcagggactactcttaagggaagccattgagaaatggaagaggccatattttgtttaagaaataaaatgtggccggacacagtggctcacgcctgtaatcccagcactttgggaggatgaggtggtcggatcacctgaggttgggagttcgagaccagcctgaccaacatggagaaaccccgtctctactacccatacaaaattagccgggcatggtggcatatgcctgtaatcccagctatttgggagactgaggcaggagaatcgcttgaacccggaaggtggaggttgcggtgagctgagattgcgccaatgcactccagcctcggcaataagagcgaaactccatctcaaaaaaaaaaaaaagt

SEQ ID NO: 21495 - DNA, 862 bp, Homo sapiens; identical to SEQ ID NO: 21330

SEQ ID NO: 21496 - DNA, 2538 bp, Homo sapiens; identical to SEQ ID NO: 20316
  misc_feature 2538: n = A,T,C or G

SEQ ID NO: 21497 - DNA, 381 bp, Homo sapiens
accaatgtgattgaagcaagggaaattgctatgggatatctgaccaactggatattctgctggaagagcagaatgcacttcaaagactagccaataaaactctcatgtaagatatgtttttctttttgtttctatttaactaatgaatagaacctcagtgatttaaggaaaggcaggcccatgatatggaaagagaaggggatgatgatgatattctggaatggtcgtgcaaggcttcaggaggaagtgagagtggtgattgaatcatataactcctgaataaatatctggaataaacatctccagaataaaacatctggaggattctcagtatacttagaataaaattgagcctcctcatgaaagcctactagcaccttc

SEQ ID NO: 21498 - DNA, 1498 bp, Homo sapiens; identical to SEQ ID NO: 20817
  misc_feature 1, 2, 1498: n = A,T,C or G

SEQ ID NO: 21499 - DNA, 508 bp, Homo sapiens; identical to SEQ ID NO: 21293
  misc_feature 502, 503, 504, 505, 506, 507, 508: n = A,T,C or G

SEQ ID NO: 21500 - DNA, 570 bp, Homo sapiens
acatggtttgccaaccctgtattatgtttatagcatttgttttacaaaatatacctgattctgaaaaaatgaaaaatggttactataggctagatagtaggtagttaagtcctataactactagtaggtagttataggacttaattaacagatagatatgatgtgacaattcagtttaagtgcaactttcagtttctatcttaactataacttgagagattaatttagaattacaaatgtgtgtatatatatatatgagcatatgtatacataacatatttacacacaaggcacacatactatgagcaccctgcagtttgtaggcatttttacatgcgaatgttattggaacagataggcatcacgggaagaaattttgcctctacctgctctcaccatgtcagttgacaggactcaggacatgggagaagagtgagcttcctttctgaagttgatggtagctgtcaagatttttgaaaagttagtgccaggaattaggtgattggtaagcagcggcccattccttgccttcagtgaaatgacatcccgaaaaaaataaaaaaaaaaaaa

SEQ ID NO: 21501 - DNA, 1250 bp, Homo sapiens
  misc_feature 1, 1250: n = A,T,C or G
nacccggagccagcgcggagcacctgcgcccgcggtgacaccttcgctcgcagttgttcgcagtttactcgcacaccagtttcccccaccgcgcttggattagtgtgatctcagctcaaggcaaaggtgggatatcatggcatctatctgggaactgatgagaaaatgctcatcagcattctgactgagaggtcaaatgcacagcggcagctgattgttaaggaatatcaagcagcatatggaaaggagctgaaagatgacttgaagggtgatctctctggccactttgagcatctcatggtggccctagtgactccaccagcagtctttgatgcaaagcagctaaagaaatccatgaagggcgcgggaacaaacgaagatgccttgattgaaatcttaactaccaggacaagcaggcaaatgaaggatatctctcaagcctattatacagtatacaagaagagtcttggagatgacattagttccgaaacatctggtgacttccggaaagctctgttgactttggcagatggcagaagagatgaaagtctgaaagtggatgagcatctggccaaacaagatgcccaggtcagtaacaaagcgggaaaacatttcctttacctattctcctatgtggctgcctttgcaatttaatgtgaaaaagggagaaaaatatgcagccaaccagggacttttccttttttttttttcctgtttgaaagagaagcctgaagcttggggatcggaaccctaactttttgcctgccccagtggtagttatcattctccttggctcctgacagcccaatttttgatttctagtcttctgaaagtgagagatttagataatagatgatggcactgacctctgaaatacaactccgattcttctcatgtcacctctcaaaaagaaaataattgtgtctctaatatcattctcttgtgaatagattctctataaagctggtgagaacagatggggcacggatgaagacaaattcactgagatcctgtgtttaaggagctttcctcaattaaaactaagtacaaactcacattacaatcctttgtgttgtatgttgtttttacaaatgtttttgcatttagtatacaaagatctagaaaaacgaagtttaaaattgcgaagtctgttccagttattcacacttcagcgaaacaaaatgggaaacccgtattgtaactcaaggaagtactgacactacacttttgtttttccatagaggctgagn

SEQ ID NO: 21502 - DNA, 1060 bp, Homo sapiens; identical to SEQ ID NO: 20584
  misc_feature 1, 2: n = A,T,C or G

SEQ ID NO: 21503 - DNA, 425 bp, Homo sapiens
acacaattaccttaacttcaaataaagtgttcttttctccatactcttctattcccttaacaatccctgttctcaaaggcctttgtgttttattttctgctttataacaaaacaaaaaaacaaacacccaccgtcctatgacacaggtgtttttgaatccatgtcaatttttgtagttagtatatgctggttaaaccacatagcatatcccccaaaaagccagaggcaagcaaaaacttaatttgatgcccttcaagtttcggaaggtcccatttctttttattaaccaaaagataagatgaaagctcagcatggctattggctgtgattagataactttttgatattttcattttcccttaccgagctgctgcttctaggctgaactcattttattcacctgcccatttttaaagagagactga

SEQ ID NO: 21504 - DNA, 905 bp, Homo sapiens; identical to SEQ ID NO: 21290
  misc_feature 1, 2, 3, 4, 5, 6, 7, 8, 9, 10, 11, 12, 13, 14, 15, 16, 17,18, 19, 20, 21, 855, 905: n = A,T,C or G

SEQ ID NO: 21505 - DNA, 3807 bp, Homo sapiens
  misc_feature 1, 3805, 3806, 3807: n = A,T,C or G
ngagtttcataatctcatcaatattttaagataggcgagcacacactaataatatctatgcctaccttcttgggtggactcaactgtaaccacagtttattagttgcttagaagtggatttttaaaaaacagttaaatgtgtgtgcataacacacaagtaatgacacactactattattattacctaagtagtgctcatcctctctttctgtgttttcttaggatgtgcactttaatttaggattgtaacgcctaataatatttctgtgagcctttaatgtgatttataagatggccgaattactgaaatcaccattatacctcttccataaaacgactccaaagttagacctgcctgttggggagaattctatagacagaaggtcaatgttgtccccatccataggggttgaattaccttgctgttaagtggtcttcccccattgggatcctacagtcccacagatgaaagcacagtagtagctgacagctggcttatttggtccctcggcatctctcgtatgtggcatattgcttttgccactttcctatccagcagacatcaaagcaaaactaaaaggtagatatctggaatgaatgtatatgttgtaattgaggcagatatttgccttaattggaaggatctaactgctttacaaatattaaacaagtgcttgggcatgattgggagaggaggcagcttagctggaagctgtgcccatcttactgtcactggagaataggatgtcagagctgggcaggactggtacccatcatttgcagtttgcatgtggggaaaccaaagccctaagaaacaacagttcctggcccaaaaaatccatagaaagaggtaactagtggcagatttggggcgccaacctgattttatggattttgagttagattctctaccctctatcaatactaaaaatagattaggagggtttttttttctgtttatcatgttgaatttcattgacttaattagtctttaaatttgaaaacatgttttagggagtttagttctagaaatttctcttagattgaagtgacagaatctgaaagaaaagaatatgattgagctatttgttttcctgaacacctcaccttttatgatgcaataagttactctgagtttcttggcagagtttttgacagctgttgctttcaatggattccattcctgtattccttatgggaggttgtttttaaaatagactactgcgattgaaatgaactcaatatgtagttaagttatagttttcttcaatgtatttttagttacttgggtcacaaatgttcaatttcagcatattttagggtgagtaatcaaaaatgtgaatttgcctttgatttcctaccactgtctgagctatcataaagcattctctttagttgtgatttgattctatagtctgtttctaaatgacatttgtctgtttcttaaatgatctcacagccatggtaataatagatgtgtactcagaagatcaataaggtaatattggaattcatgtgttttttgcaattaaggcaggcatttgccaatgtcttcttttaagcagtagttggaaacatctcaattacagtgtaacaccttagagctaaaaacatttgttcaacacaaactagaatcacaccttctcactagatatcaccaagggaatgtggttttaaaaataaaaagaaaacaatataacgtatcatggcaaccagagcttcccatattattgacaagtagggatcattaggttctggtttgaacattctgaatgtgaacaaaatgaaatagtagttaagaggtgttttcccactgtgtttaaagagaacactagtaattctggtttttctttctaactgctttactgtttcaagggtattcttttaaaactctgatttcaaaggatcagttgaatttatactttagttatgggtgttttgttactttttttttttttgtatcatgactcagtatggttcaatttcctagtaagaagtggggatttgtgtttttggagtcctcagctcacatgtcttgttcctccttcagcacaagctaggggagatcctaccaacactgataggtcagtcattgatggcaatttgaatgtgggtattactctgtgagccaccctgcttcgcttgtttgtaaggagaaatgcatctggttatgtgaatttcccgagagcagcagacatggagggccagactttaaaagcaacgcaagcagattcgaagagctgttgccctcttctaaaaaaggcttttggaggctgtgttacatgcatgccctaaagcagtcagtctgttagtatgagcaagacatctgaagtacacagttgcttttaggcttgtatagttattttctacacatgccaacacacatgatgataaaggaaccttttctaggaggcattgcagggtttcaatacacaggacatgttctagttacagaagccttgctctgctgtcaacaattgggaaatgctcattttttcatgttttgtgaatactctggtcttgctgtaagctaatgtcatggctgtgggatattagagaagtgggtttatgactctgaagaccagcagacaccagactttaaaagtgcttaaattggaatttggaaactacagtaaagaaaccttcagataccagttccatcctgaagccctctgttgaacaacagggccagatcctaaagctctttcagggagctcttctctggggctggaacagttgattatgcaaccccattgtgtggagattggatcaactgagttgtgttatttttgttttaagtcaccttgtgcgagaacctcaaccgcacctatcttgggaaccgggtatacccttttctttagcactgctatcctttttgtcttcagcacaaataagatgttcaagtgagccagaagcaagaagagccattttagtcttcatagctattggctaagagagataatgagctgatggtctattttaaccttgaaagtaaaaatgtatattttttcactacaagtacattgaacagtaaaaagtgtaacagcaaagtatatatttgatgccttctgtcttttcatgataatgtgctaacaagttgtgttaatattttactcagccagagtctcattcatttgctaagcattgggaacattatgtatattgaccttaaacataggtgtcctatatttggattgtgacttgtagactcaagctaaccttactgcctctttttcacacttgttgaaaggtctgtgaagaacatagttaaagatctccaactttggaaaatatacatgatgtgaaactggggtgctatgttaaaaataaatgtatgataactaaaaaaaaaaaaaaaaaaaaaaaaaaaaaaaaaaaaagaaaaaaaaaaaaaagaaaaaagaaagagagaaggaaagaaaaaaaaggaaaaagaaaaaaaagggggggggggggaaacaaaacacagagacgaacaacagaagacaccacaacacgataatgacaagtcgcgcactacgagtgtgaataatagcaacgcagccggcgcgcagacataagagaagcagagaaaacacgctcaggcctgatagggcgagacccaattgggcgggtatcaagcaaacaccacacgcagaatcgtgcgcagcgaaaaaaaatcgggaggctgttcacacccccagtcgcggcggcagtgggatgttatataatcgcgaggttcaatgaaagatgaggtcgcggacatgccggagcagcagcagccactagtacgacgaacgaaccatgagcagatccgatacacgannn

SEQ ID NO: 21506 - DNA, 420 bp, Homo sapiens
attgctgtttcccacgcgggccaactgctcagatgttcaatgaaagtttcacatacggatcactggctccaaagatgtcctttttggcgagatcaattccagaaacaacttttactctgagaatacgggactctcccgagtgttacttgctcaaatgcgagacgtctcatttaggagaatacaatattaaaggtttagtgcattaaaggaaagctggaaaactcaagggcagagcaagttctgaagagtatgcggaagtcgtggctgcagccaagggtaactttccactgccgggtgacaaggtcacaggagagaagttttaacttgactcccaggaaagcagtctacacggttgttcctctctggaaatggcttcctctgtgactggctcacatcaaatcacaggtgtcttccccgcgt

SEQ ID NO: 21507 - DNA, 1380 bp, Homo sapiens; identical to SEQ ID NO: 20118
  misc_feature 1380: n = A,T,C or G

SEQ ID NO: 21508 - DNA, 432 bp, Homo sapiens
  misc_feature 431, 432: n = A,T,C or G
accgcctgcagagccataatccaaatatatcttttttctttgtaaattactgtctcaggtattcctttatataatgcacaaatagcctaacataacacgcatctcaataattgccccattgtcacattgcaaaaataccttgtgaaggttgttatagagatattggctttctgggttgttttgttttgagaggacagtaacatttgattattaaaaaaaaaaatcctagcacaatgtggcttggcattgtttattgttttctatacaagtcataaaccattattatatgtgctcatgttcctttatatagaaatcatataaaaaaaggatttttgttttactctttaaaaagttttcatggctgggcgtgattggctcacttttgtaattccagcacattgggaggccgaggtgggcagaacatctgaggnn

SEQ ID NO: 21509 - DNA, 2538 bp, Homo sapiens; identical to SEQ ID NO: 20316
  misc_feature 2538: n = A,T,C or G

SEQ ID NO: 21510 - DNA, 550 bp, Homo sapiens
  misc_feature 539, 540, 541, 542, 543, 544, 545, 546, 547, 548, 549, 550: n = A,T,C or G
acgcgggggaaataaggaatgaacgttatgtaaagaccataatgctagtcagagaatgttccaatggaaaactgatgtttccttctgccaccaggacaaaacttttgtgatctaaaggcaaaacaataacaaaaacagcaacagcaacaaaaaccagcctaacagtcccaagtggtcttcactgtcatgattattaagcattttctccaaagtctgaactacagtttgttgaggtttcattgaaaatgatactaaaacaaatttgcttaaaagtaaaatggagttattggcatcacaaagatcatagtcaccttcttaagaattgcataacctttaatgactgtaaaggatttttaaagacgatccttgcgactagttattaatacatttttttgaggctgtggaaatcagataatttgggccgggcacattggctcacgcctgtaatcccagcattttgggaggctgaggcgggcggagcacctgaagttgggagttcaagaccagcctgaccaacatggagaaaccttgtctctacnnnnnnnnnnnn

SEQ ID NO: 21511 - DNA, 862 bp, Homo sapiens; identical to SEQ ID NO: 21330

SEQ ID NO: 21512 - DNA, 1380 bp, Homo sapiens; identical to SEQ ID NO: 20118
  misc_feature 1380: n = A,T,C or G

SEQ ID NO: 21513 - DNA, 1117 bp, Homo sapiens
  misc_feature 1: n = A,T,C or G
naacacctgttgtcgaaggtcggcggggtcccccgcggggcccccgcgccgggaccatccaaggcgcccccatgtacacggccagccgccctgtgtggagcttcacccttgtttctcaaatggcaggggtacatggtcccccctggccccggcgcataggccaaaccacattgggcaaagtgtctgcataggccaacttcattacatcctggtggacacaataggagtgcgagaggacattggagtggcagaaggccagccgcttgatcagcagaggcagtgggaaaaaaaagagggatccgcggaccacagccacgatgccaatctgggctgttactgtattgttgagcactgcagcatggcgcagtgggtggcagatggccacataacggtcaaaggccatggccagcaggatggtggattcaatggctgagagggcatgaataaagaacatctgggtaagacaggcctcaaagctaatctctcgggaatcaaaccagaaaagggcaaggatcttaggcatggtggatgtggataaggccaggtcaatggctgcaagcatgcagagaaagaggtacatcggagcgtgcaggctgcgttccgtccttacgatgaagaccacgatgcagtttccaaacattgccactacatacatggaaaggagggggaagccaacccagaaatgggctttctctaatcctgggataccaataagcacaaaggtggcatgtgtgaagttgcaggaactcatagctggaactgaggaggggtgactggagagggtgaggtcacactggcagtagagcccatacagcagttcggcctgttcctttcaggctgactcagaaggctgaggaggctttagattccaggggagggccgagcttgcaaatatgaggagacttattccagcctgactggagacaggcacagagctgaaaggccaattcctggtggtggtgctaactcactgtgtcttcagggtgtggagattcccagaagacttcttttgcctcatacagtccttttatatctgttccattatccaattacttacggtggctatgtgctttatgggctgatgtaacctttttttcatgtgtcatttcccccgcgt

SEQ ID NO: 21514 - DNA, 3054 bp, Homo sapiens
  misc_feature 1, 2, 3, 4, 5, 3054: n = A,T,C or G
nnnnnagacagtcaatctgtcagctctaacactgatgcagatacctccccggggaaaaaccatgcaacttctaaccgaaaatcttcagttggcgtaaaaaagaatagcaagagcagaacgttaacgaggcaatctatgtcaagaattccagcttcttccaactctacctcatctaagctaactcatataaataattccagggtaccaaagaaactgaagaagcctgcaaagcctttactttcaaagataaaattgagaaatcattgcaagcggctggagcaaaagaatgcttcaagaaaactcgaaatgggaaacttagtactgaaagagcctaaagtagttctgtataaaaatttgcccattaaaaaagataaggagccagagggaccagcccaagccgcagttgccagcgggtgcttgactagacacgcggcgagagaacacagacagaatcctgtgagaggtgctcattcgcagggggagagctcgccctgcacctacataactcggcggtcagtgaggacaagaacaaatctgaaggaggcctctgacatcaagcttgaaccaaatacgttgaatggctataaaagcagtgtgacggaaccttgccccgacagtggtgaacagctgcagccagctcctgtgctgcaggaggaagaactggctcatgagactgcacaaaaaggggaggcaaagtgtcataagagtgacacaggcatgtccaaaaagaagtcacgacaaggaaaacttgtgaaacagtttgcaaaaatagaggaatctactccagtgcacgattctcctggaaaagacgacgcggtaccagatttgatgggtccccattctgaccagggtgagcacagtggcactgtgggcgtgcctgtgagctacacagactgtgctccttcacccgtcggttgttcagttgtgacatcagatagcttcaaaacaaaagacagctttagaactgcaaaaagtaaaaagaagaggcgaatcacaaggtatgatgcacagttaatcctagaaaataactctgggattcccaaattgactcttcgtaggcgtcatgatagcagcagcaaaacaaatgaccaagagaatgatggaatgaactcttccaaaataagcatcaagttaagcaaagaccatgacaacgataacaatctctatgtagcaaagcttaataatggatttaactcaggatcaggcagtagttctacaaaattaaaaatccagctaaaacgagatgaggaaaatagggggtcttatacagaggggcttcatgaaaatggggtgtgctgcagtgatcctctttctctcttggagtctcgaatggaggtggatgactatagtcagtatgaggaagaaagtacagatgattcctcctcttctgagggcgatgaagaggaggatgactatgatgatgactttgaagacgattttattcctcttcctccagctaagcgcttgaggttaatagttggaaaagactctatagatattgacatttcttcaaggagaagagaagatcagtctttaaggcttaatgcctaagctcttggtcttaacttgacctgggataactactttaaagaaataaaaaattccagtcaattattcctcaactgaaagtttagtggcagcacttctattgtcccttcacttatcagcatactattgtagaaagtgtacagcatactgactcaattcttaagtctgatttgtgcaaatttttatcgtactttttaaatagccttcttacgtgcaattctgagttagaggtaaagccctgttgtaaaataaaggctcaagcaaaattgtacagtgatagcaactttccacacaggacgttgaaaacagtaatgtggctacacagtttttttaactgtaagagcatcagctggctctttaatatatgactaaacaataatttaaaacaaatcatagtagcagcatattaagggtttctagtatgctaatatcaccagcaatgatctttggctttttgatttatttgctagatgtttcccccttggagttttgtcagtttcacactgtttgctggcccaggtgtactgtttgtggcctttgttaatatcgcaaaccattggttgggagtcagattggtttcttaaaaaaaaaaaaaaaaacgacatacgtgacagctcacttttcagttcattatatgtacgagggtagcagtgtgtgggatgaggttcgatacagcgtatttattgcttgtcatgtaaattaaaaaccttgtatttaactcttttcaatccttttagataaaattgttctttgcaagaatgattggtgcttattttttcaaaaatttgctgtgaacaacgtgatgacaacaagcaacatttatctaatgaactacagctatcttaatttggttcttcaagttttctgttgcacttgtaaaatgctacaaggaatattaaaaaaatctattcactttaacttataatagtttatgaaataaaaacatgagtcacagcttttgttctgtggtaacctataaaaaaagtttgtctttgagattcaatgtaaagaactgaaaacaatgtatatgttgtaaatatttgtgtgttgtgagaaatttttgtcataagaaattaaaagaacttaccaggaaggtttttaagtttagaaatattcatgccaataaaataggaaattataaatatatagttttaagcactgcatcagtgggagttcttggcttatgttagtttatgttagtttattatgaaaccaccaaagatttttttggctatattaccagttaaccaaaaaggaggcagatttaattgttttattgaagcacttggagaaattaattttaattacttaagtgagcaaatttttattactactttatgttcactaccaggtctttcatttctctggattattggcaatcatcggacagagatctgggaatataactctgtaacagggggttgaacaccagaaggtctcttatttctggaaatgggtccgtaccttctgattcaggttccaagaaaacacaccggggataggaan

SEQ ID NO: 21515 - DNA, 862 bp, Homo sapiens; identical to SEQ ID NO: 21330

SEQ ID NO: 21516 - DNA, 2187 bp, Homo sapiens
ggcgggtgcctatagtcccagctactcgggaggctgaggcaggagaatggcatgaacccaggaggcagagcttgcagtgagccgagatcgcaccactgcactccagcctgggcaacagagccagactccgtctcaaaaaaaaataaaaatataaatataaataaatcaagctattaacggcaaaaaataaagagccacctggcctgtgtccaaaatgtggaaaagcaaaacattgggccaatcaatgtcattctaaatttgataaagatgggcaaccattgtctggaaacaggaagaggggccagcctcaggccccccaacaaactggggcattcccagttaaactgtttgttcctcagggttttcaaggacaacaacccctacagaaaataccaccacttcagggagtcagccaattacaacaatccaacagctgtcccgcgccacagcaggcagcaccgcagtagatttatgttccacccaaatggtctttttactccctggaaagcccccacaaaagattcctagaggggtatatggcccgctgccagaagggagggtaggcctttgagggagatcaagtctaaatttgaagggagtccaaattcatactggggtaatttattcagattataaagggggaattcagttagtgatcagctccactgttccccggagtgccaatccaggtgatagaattgctcaattactgcttttgccttatgttaaaattggggaaaacaaaaaggaaagaacaggagggtttggaagtaccaaccctgcaggaaaagctgcttattgggctaatcaggtctcagaggatagacccgtgtgtacagtcactattcagggaaagagtttgaaggattagtggatacccaggctgatgtttctgtcatcggcataggtactgcctcagaagtgtatcaaagtgccatgattttacattgtccaggatctgataatcaagaaagtacggttcagcctgtgatcacttcattccaatcaatttatggggccgagacttgttacaacaatggcatgcagagattactatcccagcctccctatacagccccaggaataaaaaaatcatgactaaaatgggatagctccctaaaaagggactaggaaagaagtcccaattgaggctgaaaaaaatcaaaaaagaaaaggaatagggcatcctttttaggagcggtcactgtagagcctccaaaacccattccattaacttgggggaaaaaaaaacaactgtatggtaaatcagcagcgcttccaaaacaaaaactggaggctttacatttattagcaaagaaacaattagaaaaaggacattgagccttcattttcgccttggaattctgtttgtaattcagaaaaaatccggcagatggcgtataatgccgtaattcaacccatgggggctctcccaccccggttgccctctccagccatggtcccctttaattataattgatctgaaggattgcttttttaccattcctctggcaaaacaggattttgaaaaatttgcttttaccacaccagcctaaataataaagaaccagccaccaggtttcagtggaaagtattgcctcagggaatgcttaatagttcaactatttgtcagctcaagctctgcaaccagttagagacaagttttcagactgttacatcgttcactatgttgatattttgtgtgctgcagaaacgagagacaaattaattgaccgttacacatttctgcagacagaggttgccaacgcgggactgacaataacatctgataagattcaaacctctactcctttccgttacttgggaatgcaggtagaggaaaggaaaattaaaccacaaaaaatagaaataagaaaagacacattaaaagcattaaatgagtttcaaaagttggtaggagatactaattggattcggagatattaattggatttggccaactctaggcattcctacttatgccatgtcaattttgttctctttcttaagaggggacttggaattaaatagtgaaagaacgttacctccagaggcaactaaagaaattaaattaattgaagaaaaaattcggtcagcacaagtaaatagaatagatcacttggccccactccaaattttgatttttgctactgcacattccctaacaggcatcattgttcaaaacac

SEQ ID NO: 21517 - DNA, 1162 bp, Homo sapiens
acttcaaaatatgtttttgtgtccatcagtattaactattggtatactactggttttatatttttttttctttgagacaacagtacgcgtcacagtagatagtgtcctatagccactggaatgtcctaaaccgaatgaatctgactctggtgacctttcaaacagaagtcacatgagctccttcatttggttgtagttcttcttagaaggtgtgataaccacgatctcagggaaagaattagaaatggggtgttggaccattcttacaaccaatacagaattccacagcccaattgccatgctgtttcttaccttggatgttcaatttgatgtcatccaattaaaataccatgggcaaaagtcaacttttcatttttttaaatttattttgcttattacggaaaaacacaccacataattcaactagcaaagaagactgcttcagggcgtgtaaaatgaaaggcttccaggcagttatctgattaaagaacactaagagagggacaaggctagaagccgcaggatgtctacactatagcaggcgctatttgggttggctggaggagctgtggaaaacatggagagattggtgctggagatcgccgtggctattcctcattgttattacagagtgaggttctctgtgtgcccactggtttgaaaaccgttatacaataatgatagaatagtacacacatgagaactgaaatggcccaaacccagaaagaaagcccaactagatcctcagaagacgcttctagggacaataaccgatgaggaaaagatggcctccttgtgccaccgtctgttatgatttctctccattgcagcagaaagccgttcttctaagcagacagcaggtgatgatggcaaaatagaccacactcttgaggagcaggaggaggtacatgtaatatgcagaggtgtttgtgagctgcagcagtagtgtatcatttgcatcttttgaacaattgtctttgggatccattgtgatgacatctgtctttattggaggaaagataatttcttgatcaactccgtttttattattctcatgtctgacgatacatctgtgttctttgtccagtgactcttctggcaccgttaaccagctaaatttcatgtatgtgtcgttagtcttcatggtgttcccctcctggga

SEQ ID NO: 21518 - DNA, 2538 bp, Homo sapiens; identical to SEQ ID NO: 20316
  misc_feature 2538: n = A,T,C or G

SEQ ID NO: 21519 - DNA, 816 bp, Homo sapiens; identical to SEQ ID NO: 21390

SEQ ID NO: 21520 - DNA, 1380 bp, Homo sapiens; identical to SEQ ID NO: 20118
  misc_feature 1380: n = A,T,C or G

SEQ ID NO: 21521 - DNA, 238 bp, Homo sapiens
  misc_feature 1, 36, 47, 236, 237, 238: n = A,T,C or G
nctaaggagcggcccgcttaactaactacctaaaanttcgggccgcntcgacgtactttcttcacaaaatggtggaaaactcctgagaagacatggcttcttccatggatatcaatgactgccattcaggccagccaggcagactcagtcatcaattgggccccaccattaaaatcagcctttcctggttgaggagaccgctaattctttctttggaaaggacacaagcaagcagnnn

SEQ ID NO: 21522 - DNA, 379 bp, Homo sapiens
  misc_feature 1, 2: n = A,T,C or G
nnatacattctatgacagactctaaaagttctctgctagacatgcatgatttataacacttaactgatctatgatcgcgaatatctgaaatgctgactgctactctctgagagactgaatgacagaaagatgtgtgtgaacccaaggctgcgcataatagctaactctataaaatagatggataattctaagggtctcctgcaaaagatggccttctgaaggctaactgctgaatgaaagtttctattccaactaaagccttagaatagatggacatgcaaactttcaaaggcagagcctcccgagaagccatctgccttcgagcctgccattgaaatgcaaaagtctgttccaaataaagccttggaattgaagaatg

SEQ ID NO: 21523 - DNA, 3855 bp, Homo sapiens; identical to SEQ ID NO: 20695
  misc_feature 1, 2, 3854, 3855: n = A,T,C or G

SEQ ID NO: 21524 - DNA, 879 bp, Homo sapiens; identical to SEQ ID NO: 21368
  misc_feature 1, 2, 3, 4, 5, 6, 750, 846, 852, 872, 879: n = A,T,C or G

SEQ ID NO: 21525 - DNA, 862 bp, Homo sapiens; identical to SEQ ID NO: 21330

SEQ ID NO: 21526 - DNA, 4038 bp, Homo sapiens
  misc_feature 4023, 4024, 4025, 4026, 4027, 4028, 4029, 4030, 4031, 4032,4033, 4034, 4035, 4036, 4037, 4038: n = A,T,C or G
gaacattgggtttagtgcctggcaacttgatgcatatggaagagcaatgccaagtgatctgacataatacaaattcacgaagtgacattcaatcacaagcaaagttggaaattccaaagagaagtggtgagatctttactagtcacagtgaagatgggagaaaatgacatacctgcagcagatgtgggctgaaaatatcctcttctctgcccaatcaggaatgctacctgtttttgggaataaactttagagaaaggaagggccaaaactacgacttggctttctgaaacggaagcataaatgttcttttcctccatttgtctggatctgagaacctgcatttggtattagctagtggaagcagtatgtatggttgaagtgcattgctgcagctggtagcatgagtggtggccaccagctgcagctggctgccctctggccctggctgctgatggctaccctgcaggcaggctttggacgcacaggactggtactggcagcagcggtggagtctgaaagatcagcagaacagaaagctgttatcagagtgatccccttgaaaatggaccccacaggaaaactgaatctcactttggaaggtgtgtttgctggtgttgctgaaataactccagcagaaggaaaattaatgcagtcccacccactgtacctgtgcaatgccagtgatgacgacaatctggagcctggattcatcagcatcgtcaagctggagagtcctcgacgggccccccgcccctgcctgtcactggctagcaaggctcggatggcgggtgagcgaggagccagtgctgtcctctttgacatcactgaggatcgagctgctgctgagcagctgcagcagccgctggggctgacctggccagtggtgttgatctggggtaatgacgctgagaagctgatggagtttgtgtacaagaaccaaaaggcccatgtgaggattgagctgaaggagcccccggcctggccagattatgatgtgtggatcctaatgacagtggtgggcaccatctttgtgatcatcctggcttcggtgctgcgcatccggtgccgcccccgccacagcaggccggatccgcttcagcagagaacagcctgggccatcagccagctggccaccaggaggtaccaggccagctgcaggcaggcccggggtgagtggccagactcagggagcagctgcagctcagcccctgtgtgtgccatctgtctggaggagttctctgaggggcaggagctacgggtcatttcctgcctccatgagttccatcgtaactgtgtggacccctggttacatcagcatcggacttgccccctctgcgtgttcaacatcacagagggagattcattttcccagtccctgggaccctctcgatcttaccaagaaccaggtcgaagactccacctcattcgccagcatcccggccatgcccactaccacctccctgctgcctacctgttgggcccttcccggagtgcagtggctcggcccccacgacctggtcccttcctgccatcccaggagccaggcatgggccctcggcatcaccgcttccccagagctgcacatccccgggctccaggagagcagcagcgcctggcaggagcccagcacccctatgcacaaggctggggaatgagccacctccaatccacctcacagcaccctgctgcttgcccagtgcccctacgccgggccaggccccctgacagcagtggatctggagaaagctattgcacagaacgcagtgggtacctggcagatgggccagccagtgactccagctcagggccctgtcatggctcttccagtgactctgtggtcaactgcacggacatcagcctacagggggtccatggcagcagttctactttctgcagctccctaagcagtgactttgaccccctagtgtactgcagccctaaaggggatccccagcgagtggacatgcagcctagtgtgacctctcggcctcgttccttggactcggtggtgcccacaggggaaacccaggtttccagccatgtccactaccaccgccaccggcaccaccactacaaaaagcggttccagtggcatggcaggaagcctggcccagaaaccggagtcccccagtccaggcctcctattcctcggacacagccccagccagagccaccttctcctgatcagcaagtcaccagatccaactcagcagccccttcggggcggctctctaacccacagtgccccagggccctccctgagccagcccctggcccagttgacgcctccagcatctgccccagtaccagcagtctgttcaacttgcaaaaatccagcctctctgcccgacacccacagaggaaaaggcgggggggtccctccgagcccacccctggctctcggccccaggatgcaactgtgcacccagcttgccagatttttccccattacacccccagtgtggcatatccttggtccccagaggcacaccccttgatctgtggacctccaggcctggacaagaggctgctaccagaaaccccaggcccctgttactcaaattcacagccagtgtggttgtgcctgactcctcgccagcccctggaaccacatccacctggggaggggccttctgaatggagttctgacaccgcagagggcaggccatgcccttatccgcactgccaggtgctgtcggcccagcctggctcagaggaggaactcgaggagctgtgtgaacaggctgtgtgagatgttcaggcctagctccaaccaagagtgtgctccagatgtgtttgggccctacctggcacagagtcctgctcctgggaaaggaaaggaccacagcaaacaccattctttttgccgtacttcctagaagcactggaagaggactggtgatggtggagggtgagagggtgccgtttcctgctccagctccagaccttgtctgcagaaaacatctgcagtgcagcaaatccatgtccagccaggcaaccagctgctgcctgtggcgtgtgtgggctggatcccttgaaggctgagtttttgagggcagaaagctagctatgggtagccaggtgttacaaaggtgctgctccttctccaacccctacttggtttccctcaccccaagcctcatgttcataccagccagtgggttcagcagaacgcatgacaccttatcacctccctccttgggtgagctctgaacaccagctttggcccctccacagtaaggctgctacatcaggggcaaccctggctctatcattttccttttttgccaaaaggaccagtagcataggtgagccctgagcactaaaaggaggggtccctgaagctttcccactatagtgtggagttctgtccctgaggtgggtacagcagccttggttcctctgggggttgagaataagaatagtggggagggaaaaactcctccttgaagatttcctgtctcagagtcccagagaggtagaaaggaggaatttctgctggactttatctgggcagaggaaggatggaatgaaggtagaaaaggcagaattacagctgagcggggacaacaaagagttcttctctgggaaaagttttgtcttagagcaaggatggaaaatggggacaacaaaggaaaagcaaagtgtgacccttgggtttggacagcccagaggcccagctccccagtataagccatacaggccagggacccacaggagagtggattagagcacaagtctggcctcactgagtggacaagagctgatgggcctcatcagggtgacattcaccccagggcagcctgaccactcttggcccctcaggcattatcccatttggaatgtgaatgtggtggcaaagtgggcagaggaccccacctgggaacctttttccctcagttagtggggagactagcacctaggtacccacatgggtatttatatctgaaccagacagacgcttgaatcaggcactatgttaagaaatatatttatttgctaatatatttatccacaaatgannnnnnnnnnnnnnnn

SEQ ID NO: 21527 - DNA, 2538 bp, Homo sapiens; identical to SEQ ID NO: 20316
  misc_feature 2538: n = A,T,C or G

SEQ ID NO: 21528 - DNA, 981 bp, Homo sapiens
  misc_feature 1, 2, 36, 45: n = A,T,C or G
nncagtatagtgtagatctactgtgtaattaatttnctgtttctncgaggagctgtgaaaccaaaggacatataaaactgctcttttctccctgtttctgcctgcagcttggtcctaaatgtgagacaattgtgaaaagtggaggacagagccacctggttaaatacagccccagctttctggtgagaggactgaaaccaagatgtgtcaagctaactagaatgtgcctggacagatactgtagaaagcaaaaccataaagttgttcatgagcttgtggacgcacctgccagctgtgaataagtggctctaatcccgaacaacttacctaaaaagagcctgagagctgaactgtgcaatggcccactttccagtcctcactgaccactgggttgcacacactttggagatctctgaacagcagtgtcaaggctttcaaatagagttatctttgaaacgacaacacatgaaagtctggttggtacttggagcttaaatacaaggcaattgtgtgcctgcaaaaacaaaaagagcaatattatccttaagatttcaacaagacacagtgtctcatcacataatccaaagaagtccaggttacaagccccaaaatattcagcattatgaaaaaccagggagatcttaattcacatggcaaagagaatccttgcataacaatattgagaggacacatatgtcaaaatcatctgacacatacattaaagcagttattataacaatgctcctagaattacgggatagcattcatgaagtgaatggaaagttggaaagtctcaccaaatatttggaatatgtaaacaccaatttaaacttaagaattaaaaaaagtattaaccaaaactattaggggaaataaaaagcttaattggatgatctcaatagcagtatgcagaagactaaggaaaaagtcaatgaacttgaaaacggaacaagaatacctacagaatctgacctatagaaa

SEQ ID NO: 21529 - DNA, 892 bp, Homo sapiens
  misc_feature 892: n = A,T,C or G
acgcgggataggaacttggcttgaaatgttaaaaaggcaggaaaaaacagcagaatctatttttcattgtgggagagcccaggttgtcctgcttatctgaaattaagcccaaatcctaaaatttctgaatacctgctgtcagcttcctgcaaacgggccaggttgcctaaggaatgtcatgagagagctggcagaggcaggggacaggacaggcaccagcaaacaccacttcaccatgcagctattttcatgtcctcccagcccactgaagtgctgataatggcttggatcaattcaacaaacacatttcgtatacctcctttgcaccagacagtgttcaccgaggcacgcagggtggccgcaggtttaaacttacacgaatcgctttctggaggaggaggggacccgctgcgcgattgacacgcatattcctataggcatcctccctcagcccccacccccacggccggattcgggtggctctctccgaggtgaaatctgagaagaaatccttggatctcttttccaaaaaaaaaaaaaaaacaaaaaaaaatttggggggcccggggcaaaaaattttaaaccatttgttggggggggggcccctatgctcagtacaactgggcaaagcggtgccaaggaaacccggcacatgaacatgtgtgggatcccccaaaataaaaccccgggggcccaggctgttcgaccacctcaaaggggtggccgccagcggcctaacaaacagccaaggagcagtatgccgccccgggtggggtaaacaggagaagtactacgaaagaaaaaaacagagcgaagagagcaggagatacagggacagcatcgacgagagagaaaagagagagacaacaaaacagcgaaacgagtgaaagcn

SEQ ID NO: 21530 - DNA, 2133 bp, Homo sapiens
  misc_feature 1, 2, 3, 4, 5, 6, 7, 8, 2133: n = A,T,C or G
nnnnnnnngagtaatttaatcagataacattcaagtttatccccagctcatttgccttttattcttcatttcagttagttacatttccactggttatcatcaaggttgtgcatgcgccttgaaatgttcacaaaaggtccacgatacagggatttataataggctatatgttatattcagaatcccaggggaactaatagactctgaaaatattgattaagcaagatgtaaaaatcttatacagtttcatctacaacagttttaaagacacgtacaagcttcatttgccacaaaactcacaaaaaagtaattgattaaagaatatctcttttatgcaaaatatacattttaggatataatttaattgatattctactatatactgacattgctccttgatcattgaataaaaaaaatactctcattgccagaattatgtttttgtaatatttataattgaggtaataatgataaaagacttaaactatgaataatgttggtgagttccatttaagctataacaatttcccagaactaaacaaatatgtgactaaacataggtcatttttgataaatgaatactaacaatttcacaacataattgacaagctgattacatcagtaatttataagaaaattatacaatcaagttcatagattcaaccaaagaagtagaaataagggaaattaagacaaaactatactacatcagtatcactgccttaagtaattcacagcacaacctaatgtgggcccatgaagagtaattcaaagaagtgtgggccttacttgaaacttcagagatgttgatcatgaatttggcttcttttgatgagaaatggccaagactgttgacccatgcacacatgttggtatttacagttgtttcatggacactggccagtctacaagcagagcactctcatggggagcaccagatgagttccagccgcagttcttttataagctttaagtgcctcatgaagacgcgaggatctcttccaagtgcaacctggtcacatcagggcacattcagcagcagaagtctgtttccagtatagtccttggtatggctaaattccactgtccctttctcagcagtcaataatccatgataaattctgtacaacactgtagtcaataacagcagcaccagacagcatattaattcttttaccataaatttgtgtgtaattataatgttctatgtgtggtgttatcaaaagaatcactgtgtctctaaatatcatatatgtatgtctggataaatacattgctgtacaacatctccaacatgcaggtcatgctctaggacttggggatatagagtaatacatgtttcgtggccaataataaaagtgacaattgtcttcctaacaaaaaataaacatgagaaataggaattaatcagcagtctcaaggctcccaaatgccttagtgatattatttatccctctatttatattacggtctttttcttccctcacatgctcaatacatgagacacgctattgctgttgaattcataggaatgcataaatagactttcttccactcagactgaatatgactccctaaggattttgttggagtgtagtaatgaatgctggttgctaggtagtagaaactgacactgcagcaggcaaccaagtgcaatggtgaaattgctgcttaaaccctgcttatcaaaaagattcacagtgccgattaacttaggtagtctacagagcatcattaatttatacacaaagcagagaggctgctccaaatagcaaaaaatggtatggagtcgggtttggagggagtaaatattaaaatcataaacatcttacagaggcatttctgtgcttcatggagacagatcgcatatacaggaaagacagggagctaagacagacaagaacaacatacaggacaaagcacctgattaaacactgcctgaaaatctgattaatcttttgactcaggaatttcaggctagtcaaaaaagccttctgtgaacaccagtgacatttgatgtttgcacaaaaaattcataaataaaaatcaaataagggggtaaaaaaaagacacaagagctttgggtgatatttggcactctgcctctgaaaatgatgacaaaccctgcgtacn

SEQ ID NO: 21531 - DNA, 862 bp, Homo sapiens; identical to SEQ ID NO: 21330

SEQ ID NO: 21532 - DNA, 1185 bp, Homo sapiens
  misc_feature 1, 2, 3, 4, 5, 6, 7, 8, 9, 10, 11, 12, 13, 14, 15, 16, 17,18, 19, 20, 21, 22: n = A,T,C or G
nnnnnnnnnnnnnnnnnnnnnnacttctagcattaattacgccagccaccatgctaggtaacaagcgactggggctgtccggactgaccctcgccctgtccctgctcgtgtgcctgggtgcgctggccgaggcgtacccctccaagccggacaacccgggcgaggacgcaccagcggaggacatggccagatactactcagcgctgcgacactacatcaacctcatcaccaggcagagatatggaaaacgatctagcccagagacactgatttcagacctcttgatgagagaaagcacagaaaatgttcccagaactcggcttgaagaccctgcaatgtggtgatgggaaatgagacttgctctctggccttttcctattttcagcccatatttcatcgtgtaaaacgagaatccacccatcctaccaatgcatgcagccactgtgctgaattctgcaatgttttcctttgtcatcattgtatatatgtgtgtttaaataaagtatcatgcattcaaaaaaaaaaaaaaaaaaaaaaaaaaaaaaaaatagtcaggattattttcgttaaacttattattaacaattagtcattatagtctccctcaactagcagattcagggttcgtttcgctaatattaaaacagcggctatgaaagatatgaagatatgattattcatgataaccaagatcagctgtgtggtgtgtgtgtatgtgtgtaaaacatatagatgcatttgaagatattgatcaaaggaatgctaatttgggaaatttttctgagctttccccccattaacattggaacccttttgctaaccttgttaaccagtgctgtcagcagaagaacttcctgactaactagagctttctgtggaatgtcctttatccctctgtctaatacggcagccactagccacatgtggtttttgagcccctgaatgtagtaagtgcaaataaagagatgagttttaaattttatttaattttaatgaattttaacttaaatggccattaagtctctagtggctaccatatcagaccgttgaggtctatacatctattttggtcactactgttagaatttgagtgagaaatacaatgagtgggatgattatcttttcatacaacatggggcatgttaattaatttagctgaaatttattaaacttcctccttcatgt

SEQ ID NO: 21533 - DNA, 2538 bp, Homo sapiens; identical to SEQ ID NO: 20316
  misc_feature 2538: n = A,T,C or G

SEQ ID NO: 21534 - DNA, 390 bp, Homo sapiens
tatccaagaaaacaacctgtcaatataaaccaagttagataattatttttctataaaaccacttcaaatgcatttaaaattttttaacctaacaatttttaaactttgtatgtcaatgattttcaactgtggtctctcaaaccaaatccaatacttttagtaggaaaaattacgttaattcctacactaccgttggggctacccaagagttgaccaaaggtgatattaatacatatgcttatttattaccctgttctcacagttctagtgtaagtcttgaaaatcaagtaaatttggaaacatagttgcacaaatctctctcatgagtcacacagttaatccagaatattatttctaggttatcataaagccaacaagcaaatatgatgt

SEQ ID NO: 21535 - DNA, 890 bp, Homo sapiens
  misc_feature 1, 2: n = A,T,C or G
nnagagaagcagccactgctcaatccaaacaggtgtttcagatttccctcgtagaggaacagcattgtagggaggcatagcagtggctgtcattgaaaaggatgacctaaaccagccctcttctacagtaacttgaagaggtttagtaattccttcatgtcttggaccgagaccgagtccgggaacaaaccccatgttttccattatattttgactgggagcactgtaagagttatgtggaatattaatttcagccccccactgtgtcagcaaatctctaccccaaatattagtggagattggcatgatataaggctgaattttacccttttgaccctcagggccagtgcaaggcaagataaatgtgctctggtgaacttcatcagcttttccaacacctgctagtttcatgttagtgggatgtttaagccaggaggaaggccataaattagaggaaataatagaaacatcagccccagtatctactaggccctcaaccttttttccttgaatgtgtatggtgcaggtaggccattgtttagaaattacattaatccaataagcggctttttcaccgctggagcccatcccagggccccatgtcttatctcctttgtttaaaacaatgttaggtagtaaaagtaattgagcaattgactcactggccggaatggaaacaggaactttggcagacaccataagtttacataagtttaatctcatcagaggaatcagaattaatgagactagtatgaactatgatacctttagtatcatgaggtggatgccctgcctaacaccaggcccaccgaaccttgaggtaaagggccagtgacccccatggggacaattaaaggcaaagaattaggtagtaaatttagaggaatggt

SEQ ID NO: 21536 - DNA, 1481 bp, Homo sapiens; identical to SEQ ID NO: 21476
  misc_feature 1, 2, 3, 4: n = A,T,C or G

SEQ ID NO: 21537 - DNA, 396 bp, Homo sapiens; identical to SEQ ID NO: 20585

SEQ ID NO: 21538 - DNA, 2538 bp, Homo sapiens; identical to SEQ ID NO: 20316
  misc_feature 2538: n = A,T,C or G

SEQ ID NO: 21539 - DNA, 1380 bp, Homo sapiens; identical to SEQ ID NO: 20118
  misc_feature 1380: n = A,T,C or G

SEQ ID NO: 21540 - DNA, 1892 bp, Homo sapiens
  misc_feature 1, 1891, 1892: n = A,T,C or G
ngagtcgacccacgcgtccggaaaaggaatgaaatacctctaaaacaatatggacatttataaatatgagaatatatagatatacagaccttaataaatgaagtgttcttgagaaaaggaatgaaatacctctaaaatgtgggcctcttatttttagaaaagtgcttgaaatcttttataagacttcatattttagtttggctcctttatatttctgtattacattaaatatgctcaaaaaagcagtggtaaacagctatttaggaattgaggctgttactcctgacttccatgtgagactgccacagaactcatattgaaaatatgtcattttatccactaggttttgtttcctactttttaaattggtgttaagaaagggaaaaaaatcacaagtttgtctaactcagtagaaaaatcgacaaagcatttgcagacaacttggcaagggtacagagaaacggatgtactgtttttcagtatttggggagggtggtttgagcagcatttattgacaatttcattagtggggatgtttctattgaaaacagagttaggaagtcataaaatgttcctgcaatataaggtaataataccaccagcgtttatcttactgttttcatgttctaagtgcatgcatctgagtaaaaggatctgggctgcagtccagtctgagagatgccagcaaaggcttcctaggccagttcagtccagtaaatccctcttcgatcttctcttccacacagacagcagtgatgagcatgcccatgaactcacatgattattttggggaaaatgaaagagttgtattctttttgaggtagtaattccactttcaggggcaaatacattttgattattttatcacccttcagtgagttgtttttgttctttaatcaaggatgtatgtttgaagtaagaagtaaagcataaagtatatgattttgtgtgtgtgtgtgtgtttatcttgctatacctgtagggaatgtttaattctgccttggaagtggccaaatttgaagatgctgtgattcgaactgtcagtgggataagggggcagatcaagagagcactctgagctccagaaggagctttccaggctagctttgaggataagctgtggatgagcggtgagtgtcttaagtagtgttcagggcagggcgttaccattcatgcttgacttctagccagtgtgatgagaggctggagtcaggtctccagagagttgagcagctccagccttagatctcccagtcttatgcggtgtgcccattcgcctggtgtctgcagccccctggccacacccagtaacagttctgtgatctatgagaatagtttccttagcgagctttcccttcaaatactttgcagccaggtagagaagtttggagtgaaggttttgttcttcgtttcttcacaatatggatatgcatcttcttttgaaaatgttaaagtaaattacctctcttttcagatactgtcttcatgcgaacttggtatcctgtttccatcccagccttctataacccagtaacatcttttttgaaaccagtgggtgagaaagacacctggtcaggaacgcggaccacgggccaactcaggctcgcccacggcgtcagactaaaggcgaacaaggactctctgtataagccaatcctgaggcgaaacattttaattcactgcacattccggcaggcaaggtgccaaaggacaggcggagaccggccgtcatacgcgagcctcatgaaagaaagatccttgcactgctggatgctctgagtacggtgcatagtcagaagatgaagaaggccaaggagcagcggcacctgcacaatgagcacttcagagccaagcagaaggaggaggaggagaagctgaagcggcagggccnn

SEQ ID NO: 21541 - DNA, 387 bp, Homo sapiens
  misc_feature 1: n = A,T,C or G
nctaccaaggaagatgttgtgcctctccagcttcctggactttttttctgtaattcttggttctgtgcaagaacaggctgccaccctgctctccagcccatcaatgtacctgcccggacctgcccgggcggccgaggtacatgggactacaggcacgccccaccatgcccagctcatttttgtatttttagtagagacagggtttcaccacgttggccaggatgatcttgatctcttgacctcatgatccgcccctcttggcctcccaaagtgctgggatcacaggcgtgagccaccacacctggccctctatttattctctttaaagagagagaaaactatgagaggccaaaattatttaattaaatctttaccttagccccgcgt

SEQ ID NO: 21542 - DNA, 1214 bp, Homo sapiens; identical to SEQ ID NO: 20119

SEQ ID NO: 21543 - DNA, 2187 bp, Homo sapiens; identical to SEQ ID NO: 21516

SEQ ID NO: 21544 - DNA, 2538 bp, Homo sapiens; identical to SEQ ID NO: 20316
  misc_feature 2538: n = A,T,C or G

SEQ ID NO: 21545 - DNA, 666 bp, Homo sapiens; identical to SEQ ID NO: 21473

SEQ ID NO: 21546 - DNA, 802 bp, Homo sapiens; identical to SEQ ID NO: 21464

SEQ ID NO: 21547 - DNA, 935 bp, Homo sapiens
  misc_feature 906, 935: n = A,T,C or G
cggtttttaaaatataaaaacattcttagctaggccctgtgctagttattcaaatctggtaggcccatttggccattcagcttatcttcctattgcagtgagtccccgcaactctataggaggaaaaacaaagccacaagggtgtgtttttgtgtggcttgcattttgaataggtttctgtcatgtcttttcctattgtgtggaggctgttcacttgaaaacagtatgcacttagagtttttaggaacaagtttgtttattcagcagttcttaaaagccgtttcagcagtcttattcagcctagggttccaccaaggctgtagcagcggaaatctaccttcaggtaaattatacatggaaaaaccactcagagccgagtggtgtctccgtatagcagcttagtcctgagcagattgagcgatggtttttgccagctgcttcaaaaacctgacaggcaggatctgtttagactaaaatcgattcctaaaataatagacctggactgaccgtaattatgtaactgcagatctaaaaatgatgaaggatttccttataaattactatggaatcatgactggtcctatactatctgggagatgaaagtaaaaagaaagcgtggggctcccatttccctggtccctgaagagttcttggggtgctgcagcacacacattcccctgcaagctgagcctgctgtgttgctcttcccaatacccctttcctcagggggcaaaatgcagaaaccctgtcccaaagaagtctccctatgggattctccttagctgtagtgatcatgattactgtcatctttgtcccccctggtgttcaaggtaagtttgaacctccgcagccttgccagctttttggggtcgccaaagcacatgcctgcccacttcacctgccctntgttgtctttctcccaccccgtgcagagn

SEQ ID NO: 21548 - DNA, 2538 bp, Homo sapiens; identical to SEQ ID NO: 20316
  misc_feature 2538: n = A,T,C or G

SEQ ID NO: 21549 - DNA, 981 bp, Homo sapiens
  misc_feature 1, 906, 981: n = A,T,C or G
nacccacgcgtccgggccggagcggcaactccgcagcggagctctgcctgcccgctgcgttcccccaagagactagaccccacaaactcctcctccaccgcggtcccaactcgagtccccccgccgtctccgagcactcggagggcgcccctctgggacgggaccgacgcctcggaccgggctgcgccgcgggagttcgagatctgagtgggacatacttttgaaggatgtgcaatgttcaatcataagtgtgacaaaaactgacaagcaggaagcttatgtactcagtgagagtagcatgtttgtctccaagagacgtttcattttgaagacatgtggtaccaccctcttgctgaaagcactggttcccctgttgaagcttgctagggattacagtgggtttgactcaattcaagtaagtaagcaaacatttaaatatttttcaggcataaatgttagcgttcttatcctgtaatatgcgaagtaaataaatttatatacttactgcctttgttacaatgcatgcaaacacgtggtaaggtgttcataccttaggaagagatctgattctcaagaacagcagaaaataggaagcagagaatgagttaggatgaaattcaaatgggagaaagaaatgaagaagccagatacttccagtagttaatttcttaacatggctacttataataatagagaaatggttagaaaagaaggaaaagcaagaaaaatgtcgttactgaaattgtccagtctttataatgaagagttaggatgaagagcaacagtcagtattgagttaaattcttatacttttcaagaactaaggtgtttttacctagggtataattttctgattagcagttgttacattttatttattttctattttttgaggatgggagttcnctgtcctgggtcaaagcccctcctggtctgggacattcgctgtctggggttggagccacacctggtctggggcan

SEQ ID NO: 21550 - DNA, 860 bp, Homo sapiens
  misc_feature 1, 2: n = A,T,C or G
nncacaaagaatactatatccccagcttaaatgtactggaacgtttgtcagtgagtttcatttccaaagtttaccctacatagggaattgtagaagtgagttagtagaagtgagttcgtgtgaaaccctggaaagaaaacaaaagccccatgcaacacgttccgggctgttgtgtagatgtttattctagtcactaggggaagcacataaaaacacctgaggtgtgtgtgctgaagggcgaattttgtccttttggggagttcatgatataaacatctagaaccaaaaagtcaaatcagaaggtcagtttaggctttagttctctttgaggaaagatttaaagcaatagactataatagttacccggtagactaaaaaatttgcctttaattcttttgattggaatttttttttacaaagtttggagcatggaaacaaatgaaaattgaacctgcttattttttaggatggtgtattgatggccccaacagaactttctaaaatcatgcgataaacatatatgatagtagttgtaaaatgcttcttgttttgaaaatgttgagtaattatcgatagaaattttgctgtccattcatacattccttcaattaactttcattgttaaaaaattgggggattgatgtttggtttggtttgtggggagtgaagaggactactggagggaccttgtttgcttgctttttttctttttttaatttatcatcaagtctaggaaaggagtaagttgccgacaattgtcacttttccctcctaagaaagtaacatgttaagattcccacctaccagcctgggtgacagtgagactcccgtctcaaaaaaaaaaaaaaaaaaaagtgcgg

SEQ ID NO: 21551 - DNA, 420 bp, Homo sapiens; identical to SEQ ID NO: 21506

SEQ ID NO: 21552 - DNA, 362 bp, Homo sapiens
  misc_feature 312, 349, 350, 351, 352, 353, 354, 355, 356, 357, 358, 359,360, 361, 362: n = A,T,C or G
acgcggggatgtctcttgtcagctgtctttcagaagacctggtggggcaagtccgtgggcatcatgttgaccgagctggagaaagccttgaactctatcatcgacgtctaccacaagtacacctttcacagcagtcttaaagttgcagcagaagaatttaaagttcctgctgcaacaagtgcaattattaccaatgatggaataggaataaatcctgcacagactgctggaaatgtttttctaaaacatggttcagaactgcggattattcctagagatcgtgttggaaggttgttaatatctgctacttgngaacatacgattgcctttcagggataaatattggtannnnnnnnnnnnnn

SEQ ID NO: 21553 - DNA, 1020 bp, Homo sapiens; identical to SEQ ID NO: 20647
  misc_feature 1, 2, 3, 14, 20, 35, 42, 48, 81, 1019, 1020: n = A,T,C or G

SEQ ID NO: 21554 - DNA, 492 bp, Homo sapiens
  misc_feature 1, 2: n = A,T,C or G
nncctcaaattatattctcgcatgtatcagagattaaaataaatgtataatgtttattataaatatagactaaaagaattacagtattttaactttgaagtactattgcattcatgaatgattacgcacttagtttataggctcttagcctgaatagatgttcagtaaacaaggaacttttgaaaaattacatcatattatcagttacatttaataattaatttctgacattaatttgattcctcaaaagtgttgatggatccctctctttattgagtatgtagttgatgcccatcattttcaatatcagttcattgtaaaagttaaaatagcatgagtctttagtgctatctttaccagttgtgaaattagtagtatttaataacactaaaaattctccatcttcattgtcttcagtgatttttagatttttggttattgactgataattcaatgagatcttttgttaaaaactaaattgttactttctgt

SEQ ID NO: 21555 - DNA, 568 bp, Homo sapiens
  misc_feature 1, 2, 3, 4, 5, 568: n = A,T,C or G
nnnnngtgtagtggttttgtgtcagtatttcctgatgatgttgaacagggacagcgtaaaaagtgatatacattccaaaaaatcagttgataaagtagttttattttcaccttttatcagaaactttgcagatctgccaataagagatgtaatagatttgagttttacctaatcttgtttgtacaaggataagaattattgaaatatgttactagttagctttttcctttgtatttcaattctttttgaaatcttggaagtttggcttagtctttgattacaccaaggatacagggcttttgaagacctgggaggaaactagtgagtattccattccaaaagcaagtcttaagactggttcagaaccacaagcatgtttttttgggaaaagtgggaggattattgaacccaattgaatcacctttttaactgaagcaaactgaaatgaatatagcaaacccatcagttatatcactatattctttttaaactaatctaccatttccttgctcacctatcagttcatccatgttgtatgtatgagacagtatgacgtggtgattaaaan

SEQ ID NO: 21556 - DNA, 1498 bp, Homo sapiens; identical to SEQ ID NO: 20817
  misc_feature 1, 2, 1498: n = A,T,C or G

SEQ ID NO: 21557 - DNA, 498 bp, Homo sapiens; identical to SEQ ID NO: 21110

SEQ ID NO: 21558 - DNA, 689 bp, Homo sapiens; identical to SEQ ID NO: 21367
  misc_feature 1, 2: n = A,T,C or G

SEQ ID NO: 21559 - DNA, 4399 bp, Homo sapiens; identical to SEQ ID NO: 20975

SEQ ID NO: 21560 - DNA, 2187 bp, Homo sapiens; identical to SEQ ID NO: 21516

SEQ ID NO: 21561 - DNA, 516 bp, Homo sapiens; identical to SEQ ID NO: 21320

SEQ ID NO: 21562 - DNA, 1481 bp, Homo sapiens; identical to SEQ ID NO: 21476
  misc_feature 1, 2, 3, 4: n = A,T,C or G

SEQ ID NO: 21563 - DNA, 378 bp, Homo sapiens
  misc_feature 1: n = A,T,C or G
ngacggtgctggagtttaatgtcaaaactgatgctccagatcttccagaagaaaatcaggccagggaaggttaccgagcaatagcatactcatctctcagccaaagttacctttatattgattggactgataaccataaggctttgctagtgggagaacatctgaatattattgttactcccaaaagcccatatattgacaaaataactcactataattacttgctcagcaacatccctattgcatcatttatattaaacagaggtggatcgatgaagcctgttggtgaaaccaagaaaaaaacttacagaaaatattaagagcttcctgacaatcaccaaagaaatggaatgaattatttcgacagccaggccaagt

SEQ ID NO: 21564 - DNA, 996 bp, Homo sapiens
  misc_feature 427, 572, 597, 601, 649, 670, 695, 717, 755, 759, 775, 782,803, 805, 815, 816, 817, 821, 825, 836, 843, 845, 846, 847,848, 849, 850, 851, 852, 853, 854, 855, 856, 857, 858, 859,860, 861, 862, 863, 864, 865, 866, 867, 868, 869, 870: n = A,T,C or G
  misc_feature 871, 872, 873, 874, 875, 876, 877, 878, 879, 880, 881, 882,883, 884, 885, 886, 887, 888, 889, 890, 891, 892, 893, 894,895, 896, 897, 898, 899, 900, 901, 902, 903, 904, 905, 906,907, 908, 909, 910, 911, 912, 913, 914, 915, 916, 917: n = A,T,C or G
  misc_feature 918, 919, 920, 921, 922, 923, 924, 925, 926, 927, 928, 929,930, 931, 932, 933, 934, 935, 936, 937, 938, 939, 940, 941,942, 943, 944, 945, 946, 947, 948, 949, 950, 951, 952, 953,954, 955, 956, 957, 958, 959, 960, 961, 962, 963, 964: n = A,T,C or G
  misc_feature 965, 966, 967, 968, 969, 970, 971, 972, 973, 974, 975, 976,977, 978, 979, 980, 981, 982, 983, 984, 985, 986, 987, 988,989, 990, 991, 992, 993, 994, 995, 996: n = A,T,C or G
acccatctacttggttacagtgactacaccgtaagtggacacttcaatcaagaaaggcctatcagagtcttcctctagactaacctatggtctgagggaaaaaaaaattctttctttccattaaaagctatggctgctggcagccattttgcttgtcccttaagaagaggccatctgttgaacagagaccactggattcaaagatggagagacattatctgagctcccagatccagctcagcctaagccctaaccagacttgccaattattacacacattaacttggtttttttggcttaaggttactgaaatcatatttccaacacctgcatccaagagtcctatataccacaaggggggtaaacacacaaataattattttagtaacactcaccaataattatttgagttgaaaaaaatgctgtnctataatgtagacccacataattcatacaaatgttaacccacatgattcaagttacatttgtcattctccaactgcccaccatttcctttcataatgcccacactataactacactgaattgcttgttctttcctacacactctncacatttgtctatttatgtgatttnaganctaccgttctcttacattaataccctcccctctcaatctctaattgtntttcctctgaaacactacagnatttttattttggatgtcccttagnagttctgaccttgcattacagntatgcatgtccatgtcttatctacctaattgaactganatgnaggtcagactacttanggtagantcagtttggacttaaccagtntnactggcaaannngggntttncccaggttganctggtancnnnnnnnnnnnnnnnnnnnnnnnnnnnnnnnnnnnnnnnnnnnnnnnnnnnnnnnnnnnnnnnnnnnnnnnnnnnnnnnnnnnnnnnnnnnnnnnnnnnnnnnnnnnnnnnnnnnnnnnnnnnnnnnnnnnnnnnnnnnnnnnnnnnnnnnn

SEQ ID NO: 21565 - DNA, 561 bp, Homo sapiens; identical to SEQ ID NO: 20209
  misc_feature 1, 2, 3, 4, 5, 6, 7, 8, 9, 147, 148, 149, 150, 151, 152,153, 154, 155, 156, 157, 158, 159, 160, 161, 162, 163, 164,165, 166, 167, 168, 169, 170: n = A,T,C or G

SEQ ID NO: 21566 - DNA, 543 bp, Homo sapiens
  misc_feature 1, 2: n = A,T,C or G
nntctttttaatcataaaatatgtttaataactgaattttgatgacactaatattttatgatttttatttaagaggttgttttgcttttataataataattgctaccacttgttgagttctatgtgccaagcactatcgtaagcatttttcataaactgatttaaatccctcccaccacacaccttgtgaattaagtactattaggtacatttacacatgaatgggtgcttggcaaggttaagaaacttgcacaaggtcacacagccaataaatgggggatccagaattccagcccaggtctgttgggctctaaagcctttgcacagtcttagctgttatgttgtattatattgcctcctaggttatgtatgtagaatttttggtcacatttaaatattccccttcgattcatagtgttaagaaatatacttaagcagctacgtatttactagggatgaaaatgtttccaattcataagccagaacacttttttcttcagatatttaacacaaagaagggatgaagaccattttttattccca

SEQ ID NO: 21567 - DNA, 816 bp, Homo sapiens; identical to SEQ ID NO: 21390

SEQ ID NO: 21568 - DNA, 349 bp, Homo sapiens; identical to SEQ ID NO: 20627
  misc_feature 342, 343, 344, 345, 346, 347, 348, 349: n = A,T,C or G

SEQ ID NO: 21569 - DNA, 2538 bp, Homo sapiens; identical to SEQ ID NO: 20316
  misc_feature 2538: n = A,T,C or G

SEQ ID NO: 21570 - DNA, 408 bp, Homo sapiens
  misc_feature 1: n = A,T,C or G
ncatggtacgcggggtaaccacctgggaaaacttcacagaaaatgagagtttcagatactgagaatagaaccactaagaagcagaaaagagaagatattctcgtgggggagaacaacggctgggaggggaggaagcatggccaaggcaaagaggtgggcattaataagaactgcttcttgctgccgccatatgaagaaggacgtgttcgcttccccttcctccatgattgtaagtttcctgagacctcgccagccatgctgaactgaatacaacatgtttaagaccacagaacatctgcataggctgtaaatttcgttgaatgatggatgcaaagatggaagacagatggatagaggaaaagacagaatcagatactggatgagttagtacctgcccgggcggccgct

SEQ ID NO: 21571 - DNA, 596 bp, Homo sapiens
  misc_feature 560, 589, 590, 591, 592, 593, 594, 595, 596: n = A,T,C or G
acgcgggtaatctcttgggttatgattactgcaaaatacccatatattcataatattgtctctgttataaacttgtaatttctattggcagaacatatactcaaattatttttctaagtatgggtgatatatttgttttaattcattttacttttgtccctaagatccaacaatctataatgtgaagagagttaactgggtttaaaagtataatctgttcaacagggtggagtcttagtccacagaaaagtaaattatataaactcaattccttcatctttaagttgggtataacaccaactactcgacacctcatagcattaatatgaggacacaacgacgtaataaagacattagtgttactgaagattggcagccaatgctgatgtagtagtatataccatctgatggtcaagagagcaccataggctacaaaagtgtatgtattaagtaagcagagtctatacccttcaagatttttattttgggtatttttcatgggaacgttttaaaaatatggatttattttaaaacatactgtgggtcttccctgtgttccnggaaaaccaaaacatgtttaaccaaatannnnnnnn

SEQ ID NO: 21572 - DNA, 2242 bp, Homo sapiens; identical to SEQ ID NO: 21153
  misc_feature 2084, 2085, 2086, 2087, 2088, 2089, 2090, 2091, 2092, 2093,2094, 2095, 2096, 2097, 2098, 2099, 2100, 2101, 2102, 2103,2104, 2105, 2106, 2107, 2108, 2109, 2110, 2111, 2112, 2113,2114, 2115, 2116, 2117, 2118, 2119, 2120, 2121, 2122: n = A,T,C or G
  misc_feature 2123, 2124, 2125, 2126, 2127, 2128, 2129, 2130, 2131, 2132,2133, 2134, 2135, 2136, 2137, 2138, 2139, 2140, 2141, 2142,2143, 2144, 2145, 2146, 2147, 2148, 2149, 2150, 2151, 2152,2153, 2154, 2155, 2156, 2157, 2158, 2159, 2160, 2161: n = A,T,C or G
  misc_feature 2162, 2163, 2164, 2165, 2166, 2167, 2168, 2169, 2170, 2171,2172, 2173, 2227, 2228, 2229, 2230, 2231, 2232, 2233, 2234,2235, 2236, 2237, 2238, 2239, 2240, 2241, 2242: n = A,T,C or G

SEQ ID NO: 21573 - DNA, 2538 bp, Homo sapiens; identical to SEQ ID NO: 20316
  misc_feature 2538: n = A,T,C or G

SEQ ID NO: 21574 - DNA, 1380 bp, Homo sapiens; identical to SEQ ID NO: 20118
  misc_feature 1380: n = A,T,C or G

SEQ ID NO: 21575 - DNA, 639 bp, Homo sapiens
  misc_feature 613, 638, 639: n = A,T,C or G
ttccaggcttcatttctgatagagacacacaaccaaccctccaggccctagaagccaaagatctggcagccccccagactctccaactcgtcactgtggaccatgagaacagaagcacctctctcaagtaccggagttggagccacctgggtctgactcttacctcagtcatggcccagctcttgaagtcacagtctcctcagtgcaaacagggatgaatccctgagcctcacagatctttgtgagatgattttcagccctatatgaacaggcctaacatgtttctaactctgtaagtgcttactatactgctatacttctgctatgactagacaagaccattgcagaacacaggaaccgatcattctatagaaaccaagcatctagtgtgctatgctgtgtctgggccacctcaagaaagctctaagcataggcagcatgaggcattccagagatgacatgtgagcagcagtgaaggagagaggcttccgtgtgaaggtggcctgagccaacctagattcttcagtctggaaagacacatagagaatgtgacagaatctggaaaataataaagaaaatggtggaggtaaacatcactgtcccatttgaaatntgaatatagtaatttccaggcacann

SEQ ID NO: 21576 - DNA, 1211 bp, Homo sapiens; identical to SEQ ID NO: 20419
  misc_feature 1207, 1208, 1209, 1210, 1211: n = A,T,C or G

SEQ ID NO: 21577 - DNA, 2187 bp, Homo sapiens; identical to SEQ ID NO: 21516

SEQ ID NO: 21578 - DNA, 1481 bp, Homo sapiens; identical to SEQ ID NO: 21476
  misc_feature 1, 2, 3, 4: n = A,T,C or G

SEQ ID NO: 21579 - DNA, 1151 bp, Homo sapiens
ctgcattgtgtcaaaagaaatttccttattttctactgccattcccataaaagtaagtagtctcatttttgccatattctgttcatgtaacaggccaagtgaatcaatgaagtctttattattctgataaaacttgacatatgatgccaatttagcactcacaaaaatggttaaaagatcatgaataagctcgccttccaaaaacttgactggttttaaagtaagaaggtggtcaaaaagaaatgcatttggatctttcaatgctcgtacaatacaccttaattagagaacaaaaatgtaagctcagggttttgaaatcctggcttttcattgagtttttgcagatcataaaatatacttaattcggcaaaatatctaacagtccaaaacatataaacaacattaaaaaagctacagggattgggttaagacaggccaacacatttatcaggttcatctgttttaacaaaatgaaatatattaattgtagataaaaacatagctggagagaaagcaccaaggtaatcaaatagtaagcagcagcagaaccacatgccaagacactaagtgcttcacttgccttacatctcatttattcctcacaacaacctaggaggcaaacagtattactctgccccctttatcaactatgaagcagttcagaagtgctcattaagaggtggagtaagaatgtgaatggaggcagcctgacctcaaagtcaaggatctttaccaccaacttccctttttaccaactcctatcatgtagaggtccacacaaagcaatgaccaaaaaaagaagtttcataatccttattacatagatttagaaaactgattctattcttgttaccagttagatctaagactgttaaaagcccttatactcattagcaatgggttaatttttggcaagccatcaactttccacctataaccttaaaattagggtcaattggcccaagattaggttctaattcttgggttgggatcatcatccccataccagcaataccccccccgccaggtaaacgccatgcagctacttcatattcaatccacagttcttccaatatcaaaccttgaattttagtatctacattagaatcaccaggaaatacacactatcaaatcggacgcgtgggtcaact

SEQ ID NO: 21580 - DNA, 1022 bp, Homo sapiens
  misc_feature 1, 2, 3, 4, 5, 6, 7, 24, 26, 37, 1012, 1013, 1017, 1018,1019, 1020, 1021, 1022: n = A,T,C or G
nnnnnnnacccgggccccccctcnangatcttctagnattaattaacgcgggtggttaatagaggatttgaacactttgtttgctgtagacaaaacatctttatcttaaaactgtaatctttctaacttccgttgcatgcattgctgcatttccttttttacatgtgctctcatttattttcacggcaaatgcatttttagacagagtctgtgggataattattgccattaattagttttgatatttcttttttaatgatattttcatttattcccttttgctagctggattgccttttgcaattcttacttcaaggcatacccccttccaacgaggagtattctgtaatggagtccatgcaggtacccttacaaagaagacaccataccttatgcgttattaggtggaataatcattccattcagtattatcgttgtaagttaaatccacttttccaagtttataacttttgggcacttggcttaattttctgttactcttttaatgcttaaatgtgtaatcctccaaaaacaatgtatgctttttaaacctttaattgatgctttatttgatcaagagaatctcagctattttaagtggagtcaaaaaataacaatgtgtaattgtaagagccaggcatggtgacatgcctgtagtcccagctactcgagaggctgaggctagaggattgcttgagtctcggagttggatactataatatgtgatgatcacatctgtgaatagccattatactccagcccagacaacactgcaacatcccatcttaaaaaaaaacagaaaaaaaacacgaaaagaaccttgctggctatgtatagattttatgctaatcttttccatgtcactgtgattgttagagctctaattttattgttttaataatcttgtgatcaatagttgaatgttatagcaatatgattctagcatactttatacataggatatcattttataatttattgtatctgtatgtatgtacctcgcgccgccacnncgcnnnnnn

SEQ ID NO: 21581 - DNA, 460 bp, Homo sapiens; identical to SEQ ID NO: 21412
  misc_feature 460: n = A,T,C or G

SEQ ID NO: 21582 - DNA, 2538 bp, Homo sapiens; identical to SEQ ID NO: 20316
  misc_feature 2538: n = A,T,C or G

SEQ ID NO: 21583 - DNA, 390 bp, Homo sapiens; identical to SEQ ID NO: 21534

SEQ ID NO: 21584 - DNA, 385 bp, Homo sapiens
acgtgcaaagcattctatgtatttttagcagaacaggagacttactttacactagctgaactaggtgtccatcagtgcctctgccaaccattggatgttagaggattctgccacctagcttattttatttgtatttaagtgaatataccaaacatttatatgagcaaaccaagttttacataacatgcttttggtatgtattatgactttttacatttctacttggatttcctcttcagatctcagtttccacaaatctgcatccaggttcaggggcctctgattctgcacacaatcatatgagccaagtggattgattacttgacagatcagatctcttccccagctaataactctgccttctgattccagtcctcaaaataaa

SEQ ID NO: 21585 - DNA, 879 bp, Homo sapiens; identical to SEQ ID NO: 21368
  misc_feature 1, 2, 3, 4, 5, 6, 750, 846, 852, 872, 879: n = A,T,C or G

SEQ ID NO: 21586 - DNA, 1380 bp, Homo sapiens; identical to SEQ ID NO: 20118
  misc_feature 1380: n = A,T,C or G

SEQ ID NO: 21587 - DNA, 624 bp, Homo sapiens
  misc_feature 624: n = A,T,C or G
acgcggggaggtgtgctgaggtccctcggcaagggacgctgctttcccctggcagccacactgctgagcataaatgctttaaagtgtcagcaattgatgtgtggagagaagtatgactgcattacagcttaaagagctttcacattcaggtctctacaggagaagacgagatcgccccgatagtttgagagtaaatgggttaccagaggaagagctaagcaacatggccaacgccctggccagcgccacttgcgagcgctgcaagggcggctttgcgcccgctgagaagatcgtgaacagtaatggggagctgtaccatgagcagtgtttcgtgtgcgctcagtgcttccagcagttcccagaaggactcttctatgagtttgaaggaagaaagtactgtgaacatgactttcagatgctctttgccccttgctgtcatcagtgtggtgaattcatcattgggccgagttatcaaagccatgaataacagctggcatccggagtgcttccgctgtgacctctgccaggaagttctggcagatatcgggttgtcaagaatgctgggagacacctgtgtcgccccctgtcataatcgtgagaaagccagaggcttgggaacatacn

SEQ ID NO: 21588 - DNA, 1097 bp, Homo sapiens
  misc_feature 1, 2, 3, 4, 1097: n = A,T,C or G
nnnngtccaaatctgtgcgggatcctcgccctgtccgtgccaacttgtcatcaggattcaagtctctccatattttggctctgctttcccctgcactggcttcattctctacatggtaggccctgttagtttgaggttttcatcctacaaagctaaagcaccctcagtaaagagagcttctcctccacagttcagatggatttgctgattgatgaggtctgaattacatgttcacccacaaagctcaaggttgggtcagactgtccaaaccacagactgaaaataggaagaggtggttttaagaaacatcagggagttgttacaagatggaacggatgctgggcaattaaaaactactgatgtccaggataagaacagatatgaaaaagcttaatctctgcttaagaagttgaatggtaacagctggcatggtttcttccttggttataaaagtattctaaaaaaacaccatgagagataagtttgtcctgtcctcaagaagtctgtaatccatttgaatggaataataatcatgtccaatagcatatgttggatgaaaccacagtttcaacacaagcaaactcagtggtcatgagtctgagagcccaactgtcctgctgatctgaagtaagacaactagccttctacatcaaataattctgtgaggcaatttgagtcagctgtaaattttaagtacagtggaaacttttcttcttttgctaggttgaactggtacagttctgtgtgtactggtgaatcggactcatttctgcactactgaaggagagaaatggacgcggctttcgaactgctgtattccttccagacccgatagatgaggttccaggtgctgaaaatgaacaattacatacaggaatagaggcctactctgcacttaaaaatatcttcaaaaaagttgctggtcaaggagtatgcagcaatggtccttcctgttgtgaacattgagtcctagtgggtgaggtgtgggttgttactattaaaaatccttgttgtattgggcacaagatagactgaaattgactgtagtcctcacggtgagtctaattgcagcaacatgtgaaaaaggcaggcaagan

SEQ ID NO: 21589 - DNA, 816 bp, Homo sapiens; identical to SEQ ID NO: 21390

SEQ ID NO: 21590 - DNA, 879 bp, Homo sapiens; identical to SEQ ID NO: 21368
  misc_feature 1, 2, 3, 4, 5, 6, 750, 846, 852, 872, 879: n = A,T,C or G

SEQ ID NO: 21591 - DNA, 1020 bp, Homo sapiens; identical to SEQ ID NO: 20647
  misc_feature 1, 2, 3, 14, 20, 35, 42, 48, 81, 1019, 1020: n = A,T,C or G

SEQ ID NO: 21592 - DNA, 2538 bp, Homo sapiens; identical to SEQ ID NO: 20316
  misc_feature 2538: n = A,T,C or G

SEQ ID NO: 21593 - DNA, 2538 bp, Homo sapiens; identical to SEQ ID NO: 20316
  misc_feature 2538: n = A,T,C or G

SEQ ID NO: 21594 - DNA, 508 bp, Homo sapiens; identical to SEQ ID NO: 21293
  misc_feature 502, 503, 504, 505, 506, 507, 508: n = A,T,C or G

SEQ ID NO: 21595 - DNA, 2475 bp, Homo sapiens
cgctcacactcctaaccaaaagtgatccacccacctcggcctctcaaagttctgggattacaggcatgagccaccgcgcctgccctcccctaactctagaaacttctgaactgtatgtatttctacttaaatgtcccattcttttccctacaccttgactttgcatagattgctatttaccaaccaataatttttctagtcaatttcacaatgaaaatctccttaatcttcttaaagttaataacttttttcttatactattcccagattatgttcataactctattgtaaacttcatcagagtgccttattttcatgtctctcacccaccaaactatacctttcttgagggcagaaattgtgccaccaaaaggcagatccaaatacagtctgcaatgaagtgtgaataaaatttaaaaacaaaaattacttttagatcaaaaaatgttttagatgctttctataaatatttttttaaaaatcacctgcagttggttctatagtgagatataaaactgaacaacattccaaaatcttaattttttcttaaaaaaaatttccctggtagttaacaagtattttttatttgtactcactgtaattttctctgattaagtgttatttggtcacacttctcacttggctttcaagcctgctttcaatttataagaacaggagaaaaaagaatgctatagcaagtatttaaatgtagcagttatagtataagagaatttttaaggaaaagggtgatacagtgatatgtttttttctgcttaaaacatcactgtcagtatatttttggatcttgaaagatctcttgtgtttatggcttggggcctgcttgctaggcttgacttcagtactgtttactaaattatagcactgcaataagacatttcaccaatatgatattgaagcataacaagttatttcataaggaatggtaattatctaacattctaagcaaatttggcagtgtgacttggtggggcgcagtgctgtccctgacacaatgacagccttactctctaaattagtaacttccgtaggagaccccagaagcacacctccctcccagcagtgaaagccgaggattcccgttttgattagcaggcgccttctgttcacgataaagggataagaatcaggcagtgatggcagcggagttcatgcttcattaaggcaggcattgcaaactagttcagaggagagaatccacgatgacagcacattctgtgccatggagaacattcttaaatcaagcctccagtggaggaaggactcaagaatgaaatagcaccagataacggggcatcattagacttgtaaagcaaagcttccattttctatttttatataaaccattattaatgcctttaaaacaactgtgatatctggacaaataaaatagaaatgacttcttaagatgattgcaacttttagtcttgatttataaaaattattctacataattttagtagggtaactgataatttttctcactttttttttgttttagggtgaaaatcctatttataagagtgccgtaacaactgtggtcaatccgaagtatgagggaaaatgagtactgcccgtgcaaatcccacaacactgaatgcaaagtagcaatttccatagtcacagttaggtagctttagggcaatattgccatggttttactcatgtgcaggttttgaaaatgtacaatatgtataatttttaaaatgttttattattttgaaaataatgttgtaattcatgccagggactgacaaaagacttgagacaggatggttattcttgtcagctaaggtcacattgtgcctttttgaccttttcttcctggactattgaaatcaagcttattggattaagtgatatttctatagcgattgaaagggcaatagttaaagtaatgagcatgatgagagtttctgttaatcatgtattaaaactgatttttagctttacaaatatgtcagtttgcagttatgcagaatccaaagtaaatgtcctgctagctagttaaggatgtgttttaaatctgttatttgctatttgcctgttagacatgactgatgacatatctgaaagacaagtatgttgagagttgctggtgtaaaatacgtttgaaatagttgatctacaaaggccatggcaaaaattcagagagttcgggaggaaaaccaatagctttaaactgtgtggcatttaagagttacttatggttggtacctttatgcttcactttacaatgcaggcttagataaagaacgagcattttctgctaaagtctgatttggcctattaattagggctacttacaagtttgtgaggggcctggggaatattataaccattggaggcgggggtataccccaacttaggatgtgggagcgagaaacatagagactaagaagaagctaaaaaattgggaaccccctttttaacagtatttagcacttattttgttaa

SEQ ID NO: 21596 - DNA, 469 bp, Homo sapiens; identical to SEQ ID NO: 20836

SEQ ID NO: 21597 - DNA, 385 bp, Homo sapiens; identical to SEQ ID NO: 21584

SEQ ID NO: 21598 - DNA, 2538 bp, Homo sapiens; identical to SEQ ID NO: 20316
  misc_feature 2538: n = A,T,C or G

SEQ ID NO: 21599 - DNA, 809 bp, Homo sapiens; identical to SEQ ID NO: 20847
  misc_feature 809: n = A,T,C or G

SEQ ID NO: 21600 - DNA, 2538 bp, Homo sapiens; identical to SEQ ID NO: 20316
  misc_feature 2538: n = A,T,C or G

SEQ ID NO: 21601 - DNA, 2538 bp, Homo sapiens; identical to SEQ ID NO: 20316
  misc_feature 2538: n = A,T,C or G

SEQ ID NO: 21602 - DNA, 3090 bp, Homo sapiens
  misc_feature 1, 2, 3089, 3090: n = A,T,C or G
nnaggagctggcggtccgagctgtggcttgaaagaccgacgcgatgaagcccagacctgcagggttcgtggataataaactcaagcagcgagtcatccagtatagactatggtcgaagaaaaagaaatgcttttaggattcaggtagaaaaagtatttagcataattagtagtgagaaggaacttaagaatttaacagaattagaagatgaacatttggcaaaaagggcaagacaaggtgaagaggataatgagtatactgaaagctattctgatgatgattcaagtatggaagactacccagatccacagtcagcaaatcacatgaacagttccctgctgtctttatatcggaaaggaaatcctgattctgtttcaaatactcctgagatggagcaaagagaaaccacctcttcaacaccacgaataagttccaaaacaggctccattcccttgaagacccctgccaaagattctgaaggaggatggtttattgacaaaaccccaagtgtaaagaaagacagttttttcttggacctgtcatgtgagaaaagtaatcctaagaagccaataactgagatacaggattcaaaagattcttctcttttggagagtgatatgaaacggaaaggcaagctaaagaataaaggaagcaaaaggaagaaagaagatcttcaggaagtagatggagaaattgaagctgtcctacaaaagaaagctaaagccagggggttagaattccagatctccaacgtgaagtttgaagatgtgggaggcaatgatatgacattaaaagaggtctgcaagatgctcatacacatgcgtcacccggaggtgtaccaccacctgggcgtcgtgccccctcgtggagttctccttcatggaccaccaggctgtgggaagacattacttgcacatgcaattgctggggaacttgacctgccaattttgaaagtggctgctccagagattgtgtctggagtatccggagagtctgagcagaagctgagagaactatttgagcaagctgtgtcaaatgcaccatgtatcattttcattgatgaaattgatgctattacccccaaaagagaagtggcttcaaaagatatggaacgaagaattgtagcccaactcctaacctgcatggatgatctgaataatgtggctgctacagcccgggtcctagttattggagctactaatcgaccagactcgttagaccctgctttgagacgtgcgggaaggttcgaccgagaaatatgcctaggtatcccagatgaagcatccagggaaagaatacttcaaacattgtgcagaaaactgaggcttcctcaagcttttgatttctgtcacttagcacacctaactccaggctttgttggtgctgatctcatggcactgtgccgagaggcagcaatgtgtgcagtcaatagagtcttaatgaagctacaggaacagcagaagaaaaatcctgaaatggaagatttgccatctaaaggagtccaggaggaaaggctgggaactgagcccacttctgaaacacaggatgaattacaaaggctgctggggttgctaagagaccaagatcccctctcagaggagcagatgcaaggactgtgcattgaactgaatgatttcattgttgctctatcctcagtccaaccctctgccaaaagggaaggctttgtcactgtccctaatgtgacatgggcagatattggtgccctggaagacattagagaggagctcaccatggcaatattggcaccagtacgcaacccagaccagttcaaagctcttggattggtgactccagctggggtcctccttgctggtcctcctggctgtgggaagactctgctggcgaaggctgttgcaaatgagtccggactaaattttatatctgtcaagggccccgaattactaaacatgtatgttggtgagagtgaacgtgctgtgcgacaagtttttcaacgagccaagaactcagcaccctgtgtgatattctttgatgaagtggatgctttatgtcctcgaagatcagaccgagagacaggggcaagtgtccgagtggtgaatcagctacttacagagatggatggtctggaagcacgccagcaggtttttattatggcagccactaacaggccagatataattgaccctgcaatcctgcgcccgggccgcctggacaaaacactgtttgtgggtttaccgccccctgcagatcgccttgccatcttaaaaactatcacaaaaaatggtaccaaaccaccactggatgcagatgtaaatttggaagcaattgctggtgaccttcgctgtgattgctatacgggcgcagatctctctgctttggtacgagaagcttctatctgtgccctgagacaggaaatggcaagacagaagagtggaaatgaaaaaggtgaactcaaggttagtcataagcattttgaagaagctttcaagaaagtaagatcatctatatcaaaaaaggatcaaatcatgtatgaacgtttgcaggagtccctcagccggtgatgtctccagcagccggcttagaggagctagcccatcaagccggcagagaatcccccacacgctctgaaggacccactttcagctggacacaggcgcggcctcatgtaaacattttattttcaaatgaatgaggccaagctgaagctgaagctgaagattcttcccatctggccagccttgtgtgaaaatgccttcttcctctttaagaaaaaggacaatttttaaactgctgaaataaaatgactgttacatttttcaaataaaacttttactttgaaaaaaaaaaaaaagaaaaaataattgtgggggcgcgcgaccaaggaaagtttaaaccaatccgtgggcggcgccagtggtgcatgaaattggcaaacgttgcccaggaacggggcatgtcatgggggttccaccataaaacgcgggccgggtcggacaacagagggtcgcgcccgtccacgggcagcgatcccccgcgccgggaaaacaacacagcggagcaatcaaacagcaaacacagccgcgaaacggagcaaacacgagaagcgtgann

SEQ ID NO: 21603 - DNA, 2187 bp, Homo sapiens; identical to SEQ ID NO: 21516

SEQ ID NO: 21604 - DNA, 731 bp, Homo sapiens; identical to SEQ ID NO: 20529
  misc_feature 1, 2, 3, 4: n = A,T,C or G

SEQ ID NO: 21605 - DNA, 1513 bp, Homo sapiens
  misc_feature 1, 2, 3, 4, 5, 6, 7, 8, 9, 10, 11, 12, 13, 27: n = A,T,C or G
nnnnnnnnnnnnncgggagtcttctanaattaattaacgcgggcatagacttagctttctattttaaatgtcacaattgagtcaataaagtaaacagagtttatgagtgtttacagttccaggaacacacaggggaatcctttattctgttttaaattaaagcgtcattcaaaaagaacaaactttcttaaatgttgcttttacatctttggctcagaacacagtatttctaactttgtttttcttattacttaggaaactagagaaatttctccttggaaatgtcagggggaaaatacagtatttcggattaactttagaaaactcaggtttaaggcttattgaccagaagacctctttcttatccaagtgtagggcaattcattgcaccttgaggtaggggaggagcaaaatcaggctggcaggggtccacggcagggcaagctctaggagctggtgagtctagaaggacggactagagagagctggcattggaatggacaatcgctagagggcgccggagcactagcagagtcaaccccccggggacccataagacagggcttctaggataaggattggagtttgacccaaccccaagatatgccctggggatattggttttctcaggtgcatctgactctccggcctggattgcctcgctgcggagaggggacaaaaggttttgccctgagcatctggtgatgtcttccagtgcctggttaggttgctccgcggctggacagtctgactactctcaaaactcctcgtgacaggcctttctggggtctgatcgccctttgtttccttacacttgggcctgttatcagaagaactctgaatccggaaataccttgtttaaatttgggctacagttttcaagatccaggcatttgggtgaatcacttaacccgagtattaggatctggaaaatggggctagtaattgttgtaaatgtgaggtgtttaaaagtgtctggcattttagtgcgtagataaatgctacttcctgtgcccattctcttgggagttctccccaaacttcaccctttaaaaaaaaaaaaaagaaaaattaagaatatattttacttaacacaaaatttaaaaaaatcatgtaatcgatatagagattattgagatattttacattctttttttttctagtactaaatctttgaaatctagcatgtatttttatacttacagcacattttaattcagatctgccacattttaagtgcttaatgctcctatgtgggtagtggctaccctattgaaacagtgcagatctataagaagagaaaataaaattactttcgccatttttcctttttgttaaaggttagcaataatatatacaatgcttggcacacaataggagcttaacacaggttcactgtgattgttatttgctatcaccattttatttttaaatgggcctcttctcccatctcttatcccttcccccatctcttaccccttccccctcagcagaagggtctcattcatctatc

SEQ ID NO: 21606 - DNA, 485 bp, Homo sapiens; identical to SEQ ID NO: 20462
  misc_feature 485: n = A,T,C or G

SEQ ID NO: 21607 - DNA, 1380 bp, Homo sapiens; identical to SEQ ID NO: 20118
  misc_feature 1380: n = A,T,C or G

SEQ ID NO: 21608 - DNA, 2538 bp, Homo sapiens; identical to SEQ ID NO: 20316
  misc_feature 2538: n = A,T,C or G

SEQ ID NO: 21609 - DNA, 2786 bp, Homo sapiens
  misc_feature 1, 2, 2777, 2778, 2779, 2780, 2781, 2782, 2783, 2784, 2785,2786: n = A,T,C or G
nncgacccacgcgtccgccatggatgacaacaaaagtgagttggcttctcaagaacttttaccagtagcctgttttgctacaattctagacccagactggggtcccaaggcatcatagcccacagcttcttagcaagtgcatgttcagttggatcccccagctcagcctgggtcatccccacgttctgcctcttgggccatacatagctcagctctgtactgagccatcatcccatggtgagcaagaccccattcttggtcttcagtctctttccctgcagcatgcaatcaaggtggtggctggaaggggccaaggagccacatgtcacagtgccctgctgcctgaacaaggaccagaggcctgtggaacacatggctctcagatttctcccatttgatgactcatcagctgcccccacatggctttctagctcacagcagatctagccttctctgagcagtgaagatgggatgttttatggtcattttccctggtgtggagagcccaagtggagttcttcagcacaccctacaccatcccctcactaacacccccacctgtccagtcttacctgccttcatatcaaaagcactcagttaacccagagggcttcagccctgccctgcctgactttctaggaaacccctctctccacccaccctaatcagacactgtctgaaggttccccctcatcattttaaaaggaagagaaatttttctgacacagaggttctggtgaagtggccagctcccacatcacagggtgatggtggtttggactggaccaggatcagacagtgctgtcctggggctggccatctgataaggggctccagaaagggcagtgatggacccctgggaggctttctgctctcctgatcacaggtttttggtgagaggacctattggccactagggtgtctgcgggggtgtgtgtgtgtgtgtgtgtgtgtgtgtgtgtgtgtgtgatgtgtgtttacttggaatgacttctttcagcatgaagcccactgttttgctgaacgtatctcactgtttcctgaaactcagtacattcagctggcttaagggtcctggggcctcgctgtgtcatatttgcacaagcctagtgtctgtgcagactgtacactggagttcagttgtaagacccttttgatcccttattctgttcctgtaatagaaaagccatttcactcaatggaatagaaacccagatctaatggagagatgttctaatctgccatacactggggcagtggccagtgatttggactttgtggcacagatggaaatttccaggttctctaggtggtaggcagaggcctcactttttaagaaactcccccactccacccctgccaatgaggacattgcttagaggtatttctatcagtgttgagtagaagagatcatttcttggtgttgaatttcaggtaaggatgccagcttctgcatatcagggtggtgatgtttgggctgcgacaggtctagacagcagtctgaaagggggctcaaggaagtagctgtgaaaggcccctgggatgttttctgctcccctttctgcaaatcccctggagggagatcctgttagtcactacgggatgtgtgtgtgtgtgtgtgtgtgtgtgtgtgtgtgtgtgtgtgtgttcatcacttgttgcttggggtgggaagagacaacaacaacctacagaatccatagttctcagttcatctcccatcctagtccaatcatggcctaacatccttagctaccgatcgcagaggagactgcgcatttgtgttcatgtggccttggatgttggcagattcagattggtgccccaggcatctgtgctgtaactgcagtttcagcgggctcaggaccaggctaaagggcctccaagcttcctccagtttcctggtgcatgcatgtgcaatatgctcccctggcctgggtctttcctgccgcttcttgccagttgggtcagaactagcttattaaccagtttttcttctgagctttaatcgaactggctccaaccagttggaggcttgaaaagggctacgtgctagttatagatttttaaagatatattattattttagagtagttttgagtgtacagcaaaatggagtgcagagtccagagatctcatatgccctcaattcctgtatactctcgggtcactccaccaacaacctcctacaccagagccactttgaaacattagaaaatatatttgagcattcagaaatgtataaactaggcagccccagactgcaagcagctcagaggtcccacagagaggcttagggagggtgggggaagaattttatatggtgaatgtggaagaaaaagaaaatacttgattgggtgaagtggagcagtggcctcatttggaacattacagtggaaggtctctagttagatgttagttggtggtttctgattggttcttacatttccttttattatttacactgagtcaagttttggtttatttaaggaggaattgagtgcacggcagccacctcagcctcatggccacctgtttatttgattatttttaacagagaagatccttttaaaaatatctgttaccgtggctggagtgcagtgacgtgatcacggctcactgcagccacaaccttccagctactcaggaggctgaggcagaagaatggcatgaatccggggggcggagcttgcgctgagccgagatcaagccactgcactccagcctgggcaacagagcgagactctgtctcaaaaaaaaaaaaaaaaaaaaaaaannnnnnnnnn

SEQ ID NO: 21610 - DNA, 879 bp, Homo sapiens; identical to SEQ ID NO: 21368
  misc_feature 1, 2, 3, 4, 5, 6, 750, 846, 852, 872, 879: n = A,T,C or G

SEQ ID NO: 21611 - DNA, 2538 bp, Homo sapiens; identical to SEQ ID NO: 20316
  misc_feature 2538: n = A,T,C or G

SEQ ID NO: 21612 - DNA, 6204 bp, Homo sapiens
tttacttcccactgtgttacctggagtgcctactgcctccttacttggtggccacccgcgactagagagtgctcatgccagcagcttgagccacttagcgctagcacaccagcaacaacaacagttgttacagcaccagtcacctcatcttcttggacaagcccatccttctgcttcatataatcagcttggactttatccaattatttggcagtatccaaatggaacacatgcatactcaggacttggtttgccttcttctaagtgggttcacccagaaaatgcagttaatgctgaagcttcattaaggaggaattctcccagtccttggctacatcagcccacccctgtgacctcagcagatggtattggattacttagtcacattcctgtcagaccttccagtgcagagcctcatcggcctcttaaaattacagcccattccagtccaccattgacaaaaactttagtagatcatcataaggaagaattagaaagaaaagcttttatggaaccattacggtccgttgcatccacatcagccaaaaatgtcctggatctaaataggtcacagactggaaaagattgtcacttacataggcattttgtggatccagtattaaatcagttacagaggccaccccaggagactggagagaggttaaacaaatacaaagaggaacaccgtcgaattcttcaagaaagtattgatgttgctccctttacaactaaaatcaagggacttgagggtgagagagagaattattccagagtggcatcatcatcttccagtcctaaaagccatatcatcaaacaagatatggatgtagaacgctcagtatcagatctttataaaatgaagcactcagtgcctcagagtttaccccaaagtaactatttcactacattgtctaatagtgtggtcaatgaaccaccaagatcatacccatccaaagaagtttcaaatatttacggtgataaacagagtaatgcccttgcagcggcagcagctaatcctcaaactctgacttcatttataacatctctttcaaagcctccacctttgattaaacaccaaccagaaagtgaaggtttagtaggcaagataccagaacatcttccacatcagattgcatctcactcagtaacaaccttcagaaatgattgtaggagtcctacccatttgacagtttcttctacaaatacactccgcagtatgcctgcattacatagagcaccagtatttcacccaccaatccatcacagcctggaaagaaaggaaggcagctatagtagtctttcccctccaactttaactccggtgatgccagtaaatgctggtggtaaagttcaagaatcacagaagcctccaactctaatacccgaaccaaaagactcccaggcaaattttaagagttcttcagaacagagtttgacggagatgtggagacctaataataacctcagcaaagagaaaactgaatggcatgtggagaaaagcagcggaaagttacaggctgctatggcatctgtcattgtgcgtccatcttctagtacaaaaactgatagtatgccagcaatgcagttagcttctaaagatcgagttagtgaaagatcttcagctggggcacataaaacagattgcctcaaactagcagaagccggagaaactggaagaatcattttgccaaatgtgaattcagacagtgttcacacaaaatctgaaaaaaactttcaggctgtctcacagggcagtgttcccagttcagtcatgtctgctgtaaatacgatgtgtaataccaaaacggatgtaatcacatctgctgccgatactaccagtgtttccagctggggtggttcagaagtaatttcctctttatcaaataccattttggcctctacatcatcagaatgtgtatcttcaaaaagtgtcagtcagccagtggctcaaaaacaagaatgcaaggtcagcaccacagcaccagttacattagccagtagtaagacaggaagtgttgttcaacccagttctgggttctcaggcacaactgattttatccatttaaaaaagcacaaggcagcattggctgcagctcagtataaaagtagtaatgccagtgagactgaacctaatgctataaaaaatcagacactttcagcctcccttcctctggatagcactgtaatctgtagtacaattaacaaagcaaactctgtaggaaatgggcaagcttcccagacaagtcaaccaaactaccatactaaactgaaaaaggcctggctcaccagacactcagaagaagataaaaatactaataaaatggaaaattcagggaattctgtatcagaaattattaagccatgttctgtcaacttaatagcctctacatctagtgatatacaaaatagtgtagatagtaagatcatagttgataaatatgtaaaagatgataaagtcaacaggagaaaagccaaaagaacttatgaatctggctctgaaagtggagactcagatgaaagtgaaagcaagtcagagcaaaggactaaaagacaacctaagccaacttacaaaaagaagcaaaatgatttgcaaaagagaaaaggtgaaatagaagaagatttgaaacccaatggagttctcagcaggagtgccaaagaaagaagtaaactgaagttgcaaagcaacagtaatactggcattcctcgttcagtattgaaagattggcgtaaagtcaagaagctgaagcaaactggggaatcctttttacaggatgactcctgctgtgagatagggcctaatttacaaaagtgtcgagaatgtagacttattcgcagtaaaaaaggagaagaaccagctcactcaccagtattttgtagattttactactttagacggttgtcatttagtaaaaacggagtagttagaatagatggtttctcttctcctgaccaatatgatgatgaagctatgagtttgtggacacatgaaaattttgaagatgatgaactagatatagagacttctaaatatatcttggatataataggtgataagttctgtcaattagtaacatctgaaaaaacagctttgtcctgggtgaaaaaggatgccaaaattgcctggaaaagagcagtgagaggagtccgggagatgtgtgatgcatgtgaagcaacattgtttaacattcactgggtctgccaaaaatgtggatttgtggtctgcttagattgttacaaggcaaaggaaaggaagagttctagagataaagaactatatgcttggatgaagtgtgtgaagggacagcctcatgatcacaaacatttaatgccaacccaaattatacctggttctgttttgacagatcttctagatgccatgcacactcttagggaaaaatatggtattaaatcccattgtcattgtactaacaaacagaatttacaagttggaaattttcctacaatgaatggtgtatctcaagttttacagaatgttcttaatcacagtaataaaatttctctgtgcatgcctgagtctcagcagcaaaatactcctccgaagtctgagaaaaatggtggcagcagcccagagagtgatgtaggcacagataacaagttaactcctccagaatcccagtcaccactgcactggttagcagatcttgcagagcaaaaagccagagaggaaaaaaaagaaaacaaagaacttacccttgaaaaccaaattaaagaagaaagagaacaagacaactctgaatctccaaatggcagaacatcacctcttgtgtcccagaataatgaacaaggctcaaccttacgggatttgctgactacaacagctggaaagctacgtgtggggtctacagatgctggcattgcctttgccccagtatattcaatgggagccccaagtagcaaaagtggacggactatgcctaacattcttgatgacataattgcttcagttgttgaaaacaaaattccaccaagtaaaacctccaagataaatgtaaaaccagagcttaaagaagagcctgaagaaagcataatatctgcagtggatgaaaataataaattatacagtgatataccacattcttggatctgtgagaagcatattttatggcttaaggattataagaatagcagtaattggaagcttttcaaagaatgttggaaacaaggacagcctgcagtggtttctggtgtgcataagaaaatgaacattagcctatggaaggcggaatcaattagtcttgattttggagaccaccaagctgatctcctgaactgcaaagatagcatcatttcaaatgccaatgttaaggaattctgggatggttttgaagaagtttcaaaacggcagaaaaacaagagtggagaaacagttgttttaaaattgaaagattggccttcaggagaagacttcaagactatgatgccagcaagatacgaagatcttttaaaaagtctgccattgccagaatattgtaatccagaaggaaaattcaatttggcctctcatttgccaggattttttgtacgtcctgatctaggacccaggttgtgcagtgcctatggtgtagttgctgctaaagatcatgatataggaacaacaaatctccatattgaagtttctgatgttgtaaatatactagtttatgttggcatagcaaaaggaaatggcattctctcaaaagcaggaattctcaagaaatttgaggaagaagatttggatgacattttaaggaaaagattgaaggactcaagtgaaatacctggtgctctgtggcatatttatgctgggaaagatgttgacaagataagggaatttcttcaaaagatttcaaaagaacaaggccttgaagttctaccagaacatgatccaatacgtgaccaaagttggtatgtgaacaaaaagctccgtcaaaggctgcttgaagaatatggagtcagaacctgtactcttattcagttccttggtgatgctattgttttgccagcgggagcacttcatcaggttcagaattttcacagctgtattcaggtaactgaagattttgtgtctccagaacatcttgtagagtcatttcatttaacacaggaactgagacttttgaaggaagaaatcaattatgatgataaactacaggttaaaaatattttgtatcatgcagtcaaagaaatggtgagagccttgaagatacacgaggatgaagtagaggatatggaagaaaattaagtgtgatccagtttgatatttttaggttgttgaactgggattacttaaccttgaatgatgatatgtatgcacactgactttaagcttcataaaaccatcagtgccaagaaattctctttgtagtaattacttgttactgacaccacagcagtatagcatatgtcacagctcctgtgattcaatgttataaaacaagcagaattttaaaagcagcactatatagctgttttgtattatagtgtatatgatgtttgtgaaaatgccagatttaaaatgatgtatttatttttggtaaaaaataaaaaattctatgctatattgttgatcaagtgtaaatgtgaccttgtacagtttactaaaattactgatatttttcactacattgagacagttactgtgagaataggacacaaacaccagctattgcctgcatctgggaaattgctgaatcgcacagcagtcatgtcataatcagaaaattactgccaaataattgtaaaatttgtaaagtataaagtatataaagtagatactaaatacagacacttcaatattttgttgaagctattgactgtacaattaaacattttcaaaaggtgtaatttatttaaaattgtctcattttggtaaaatttatgtgaacttttaaagctaaatattaaacttaatatgctatgtaaatatatacatatatacatttaatgatgtatttttttaaaacattggcttgcttttgttaaagtgcaagtgttacatatggctttgtacattaaagttgaaaggggttttacattttccattaaaaggactttatcaaaaaaaaaaaaaaaggggctgaaataccaggagacatacgacgtttgaaggccaagagataagagggggaagtgtagaactgtttgacttgggagaccagaacggtatttgtttgtcggtttatgtatcatggtgctctgtgcgca

SEQ ID NO: 21613 - DNA, 2538 bp, Homo sapiens; identical to SEQ ID NO: 20316
  misc_feature 2538: n = A,T,C or G

SEQ ID NO: 21614 - DNA, 747 bp, Homo sapiens
gagtcgacccacgcgtccggcggctccaagatggcgtccatcatggaagggccgctgagcaaatggactaacgtgatgaagggctggcagtaccgttggttcgtgctggactacaatgcaggactgctctcctactacacgtccaaggacaaaatgatgagaggctctcgcagaggatgtgttagactcagaggagctgtgattggtatagacgatgaggacgacagcaccttcacaataactgttgatcagaaaaccttccatttccaggcccgtgatgctgatgagcgagagaagtggatccatgccttagaagaaacaattcttcgacatactctccagcttcaaggtttggattcaggatttgttcctagtgtccaagattttgataagaaacttacagaagctgatgcttacctacaaatcttgattgaacaattaaagctttttgatgacaagcttcaaaactgcaaagaagatgaacagagaaagaaaattgaaactctcaaagagacaacaaatagcatggtagaatcaattaaacactgcattgtgttgctgcagattgccaaagaccagagtaatgcggagaagcacgcagatggaatgataagtcctattaatcccgtagaagcaatatatcaacctagttctttggaacctgtgatcagctttttttttatcaacagcaacaaccaagacccagggtcctggcccttcttttcctctcaggaaacagctatgacc

SEQ ID NO: 21615 - DNA, 349 bp, Homo sapiens
  misc_feature 347, 348, 349: n = A,T,C or G
tccgcaaaatcttgcattcagatatttgctgagatttttgcttttttatctaacctcatttggtgtcctgtaaagcgcatcttgaacagcccctagagctaaagggtagtcactagaccagcagcatcaacatcagctgggagctttactgaattgcagaatatgaggccccagtccagatggactgagtcagagtctggggggatgtgacccaccaatctgtgttccaacaagccctctagaagattcgaacacgcacgaaagttggacaaccattgctttgaattttgacaccagaaactcagggaaagctacagaatgacgtttgaatgaagaagcaatattannn

SEQ ID NO: 21616 - DNA, 3793 bp, Homo sapiens
  misc_feature 1, 2, 3, 968, 3789, 3790, 3791, 3792, 3793: n = A,T,C or G
nnnctaggatacgagggcccgggtgttgaaatcgggtcagaagattaccgtgagaacatatactagtggcggtgcgagagatgcgaggttccgatgtgatcagtaggatgatagtgggagaacgtacaaccgaaatggagtcaatgctctgcagctggatccagcactaaatagacttttcacagccggtcgagactctatcataagaatatggagtgtcaatcagcacaagcaagatccatatatagcatctatggaacaccatactgattgggtaaacgacattgtactctgttgtaatgggaaaacattaatatctgcttcttctgacacgacagtaaaagtatggaatgcacacaagggattttgcatgtcaacattaaggacacataaggattacgtaaaggccttagcatatgccaaggataaagaactagtagcatcagctgggttggacagacaaatattcctttgggatgtgaatactctaacagcattgactgcctcaaataacactgtcacaacttcttctttaagtggaaacaaagattccatttatagcctggccatgaatcaactgggaacaatcattgtatcagggtccactgaaaaggtgttaagggtatgggatccaagaacatgtgcaaaactaatgaagcttaaagggcacacggataatgtgaaggcattgctattaaacagagatggcacgcaatgcctgtcaggcagttctgatgggacaattcgcctttggtcccttggccagcagagatgtatagcaacataccgagtccatgatgaaggtgtttgggcgctgcaagtcaatgatgccttcacacatgtgtattctggtggaagggaccggacgcattctcggtaccgacctagaaccctgacattcgggtgcaaattggaggaaaaagccccgtctacagatgacctgaaaaacacggacccctcccgcactnctgcaatttgggttgcaacaactaagtctacagtaaataaatggactatgaaaggaattcataattttagagcctctggagattatgacaatgactgtacaaatcctataacacctctttgtacacaacctgaccaggttattaaagggggtgctagtattattcagtgccacattcttaatgataagagacatatattaaccaaagataccaataataatgtggcatattgggatgtattgaaggcatgtaaagttgaagatctgggcaaagtggattttgaagatgaaattaagaaaagatttaaaatggtgtatgtgccaaattggttctcagtagacttaaaaacagggatgttaactattactttggatgaaagtgattgttttgctgcctgggtttctgcaaaagatgctggtttcagcagccctgatgggtcagatccaaaattgaatttaggaggacttttactccaagcactcctggaatattggcctagaacacatgtgaatccaatggatgaagaggaaaatgaagtaaaccatgtaaatggggagcaggagaaccgagtgcagaagggaaatggatattttcaagtgcccccacatacacccgtgatctttggtgaagctggaggtcgcacactgttcaggctgctctgccgagattccgggggtgagactgagtctatgcttcttaatgaaacagtgccacaatgggtaattgacatcactgtggataaaaatatgcccaaattcaacaaaattcctttctacctccaacctcatgcatcttcaggagcaaaaaccttaaaaaaagatagactctctgctagtgacatgctccaagtccgaaaagttatggaacatgtttatgaaaaaattatcaacttggataatgagtctcaaaccactagctcttctaataatgaaaaaccaggagaacaggaaaaagaagaagatattgctgtgttggcagaggagaaaattgaacttttgtgccaggaccaggttttggatccaaatatggaccttcgaacagtgaaacacttcatatggaagagcggtggagacctcaccctccattaccgtcagaagtccacgtgaaggctgggctaatgctcctggatattcatttacgaccttcctctatggccccaagagtagtcctaggaagcccactgatccccaacgggagcaagacttctaacggctgattggtatggaccgagattatctttcaattgaagtgactaatcgagatgtaatatagaaaccagtctccatgtgtagattaagctgtccccagggaagcagagtgcaagagcagaagagccccaagcagactatgtctttcaagatgtacagaagactgacaacaggccagtgcagactttgcttcctccttttgtttcaaaggaccttatctacccattaacacttgttagagacacctcagtcgggccacaactgtctctgtttcaactttaagcccacacactctgtagcttttctaaaacagtacattccattcatgcagtagatatgaaggctttttccaagtttgtcatataaagtaatcaaattgttttcaccgtttaagacagttatttttaatgggaatttgctgttgcacaatttgagaaccagcccatttcataataaaagattaatgttgggcttgttgttaatattgcatctcagatgtgttcttgtaggaagatctgttgaaattccaggtgctggatcatagcacttggactgttgggccggagtttgtgcagcccatgcctagcgatgctgcacctcccatgatgtcctggctttgtggcaaccccagggaggtgcagcagtttcactccttcctccactgtgtccagttttatttacacaaagcgagctgagaccacaggttcttgctctggatgagcagcatgacaccatcaaaatttaagaccatgatgaaatttcagtttcattcaaatgttacctaaaatttatggtgtcagaataaagggagatcatagtgagttaatttgatattcatatcctggaagtatacatatttgtttttccaaagttttatatgcaggtttttgttgtacctgtatccagatcttcttttcactgttctaacaatctaacactttcatagaatcatttggatcttgtatagagtgtaacttattggggataaacacttcaacttttggcagaaaatactttggattctccccaaggtcatttgtattcagagtaaatcagtggtccacccccataaaactgtaagacaagcctcctgtatgaagccagaagcacaagtgccttcagagggcagttgattccagtccagttgcctccctagcttgtgtgtggcctgcctccaccatagcagggactagggagggaggcagggaacgttttttcttttctacatcttcacaggttcggctgggggcagctgataggcctaaggccataccttactatttaagatactctgatcgcacaactgcagagacagggttccctcactgctagtcagcttcttttggaaactggacaggccattgccacctgcactttgaagaagtgagcaaagacgtggccacatttctaataagttgaaatggtctttctcccttcctcagagagcaaccagcttctttttttttaaaagtcctttctatctgttggatacaacagtgtgcttttggtgcacattttttagcaatagttgtgaattaatggcaaagaaaaaaggggggctaaaaatctgagggcaagtagcgtccgtttgtcaaggccagggggtaaaagannnnn

SEQ ID NO: 21617 - DNA, 2841 bp, Homo sapiens
cggaagtcttctagaattaattaacgcgggggcgcagctcttagtcgcgggctgactggtgtttatccgtcactcgccgaggttccttgggtcatggtgccagcctgactgagaagaggacgctcccgggagacgaatgaggaaccacctcctcctactgttcaagtacaggggcctggtccgcaaagggaagaaaagcaaaagacgaaaatggctaaattcgtgatccgcccagccactgccgccgactgcagtgacatactgcggctgatcaaggagctggctaaatatgaatacatggaagaacaagtaatcttaactgaaaaagatctgctagaagatggttttggagagcaccccttttaccactgcctggttgcagaagtgccgaaagagcactggactccggaaggtaacccctcgccctttccagaagccagagagaccaagtgttatgtaagaagtagtgtcggctgtgtagaaccactgactacacaggccgaagttactgagaacttggacagaaaaaatagccagcaagtgttcaaactactgaggaaaaaaaaaaattagatatgctgcacttaagaatactagggcaggttaaaagagctgtttaagtaagtatcagagtgctgtggagactcggaagtgtttaagctgcttaagtaagtataagtgctgtggagacccggaagagttagatataatgtcatttgttgtaattcagtttcataaaatggttcttgtttgaccctaacgtaacagtttttgtaattgtgttaaatcacatttttttctttaatttgtcccaatcttcaggttacagtctctagcttcgccatgtacatggcccttccgtgtacatggatgggcggggaggtaactaaaagatcctttacacaataaagtagatgatcatgataaatgaggtaaggtcctattatcacacacttcaaacacggtagatcagaaacccactatgatactcgcttcctgtctgtttgctaaggaatataaaatggctagaaagtttaatttgaaacctttgcctccatttggaatagtagacaccagttaagagggtgtcagatgccttttttttttttttttttggctggtccctgttgattggtcagaagacagctcagctaaaaggggaagttgtctgggtggttgctttttttctgacgtctgttcctcaggctggaagaaatgagcagaaaacaagggatgagtactttttagagtatgtgcatgttacgtaatacctgtttctgggcaatgctgcttcttctgactcaacaaatggggagagcaaattgaaaatgcgtaaattggaaggcaagttctgaaattaaacgttgtactttggcctgatgttctgacctttaaggaagcaagagtttgtaaactttcaaatatttactattctgaactgtcgcgtaaacctgacgtatttccaagtcaacataccagtataccaatacggatgtgaataatgtgtgagtcgagtttaaaaccatagcagttttgctctggcaagtaatgaaagcgttctcgcttcctgagtgtgagctccagcagactgcagagtggccagtccacagttgtagcctgacttcagtgagttctgatgtgtgctttttgcaaatacatgttctcagaacagtgagatcatccagcagtggcctggactgcactcacataaaaatcatgagacagccatggctacttgtttctgtaatacatgcatgtgtgttttttaaaacctatgataggcctctgattctgcagctgcaacttttatggaatgttttccttctccacatctcatgtgatgctcttattacaggacacagcattgttggttttgccatgtactattttacctatgacccgtggattggcaagttattgtatcttgaggacttcttcgtgatgagtgattatagaggtacgattgagttcggagcagagggtctgaagagagttcagagttataaatgcttacaatgactttttaaattgtactctttctttttaggctttggcataggatcagaaattctgaagaatctaagccaggtatgtcttagtttttggtttccaaatttgtaagtttactggattattttaatgatggaataaaaattgggtcttgagagcaggctgaaatgtcactgagtgtgtgttttactctctcataataggttgcaatgaggtgtcgctgcagcagcatgcacttcttggtagcagaatggaatgaaccatccatcaacttctataaaagaagaggtgcttctgatctgtccagtgaagagggttggagactgttcaagatcgacaaggagtacttgctaaaaatggcaacagaggagtgaggagtgctgctgtagatgacaacctccattctattttagaataaattcccaacttctcttgctttctatgctgtttgtagtgaaataatagaatgagcacccattccaaagctttattaccagtggcgttgttgcatgtttgaaatgaggtctgtttaaagtggcaatctcagatgcagtttggagagtcagatctttctccttgaatatctttcgataaacaacaaggtggtgtgatcttaatatatttgaaaaaaacttcattctcgtgagtcatttaaatgtgtacaatgtacacactggtacttagagtttctgtttgattcttttttaataaactactctttgatttaattgtttggtgtaagcatttttactagttctttatttcttacacatctttcttgctgttgaagacaaaaatgacccgcgttaattaattctagaagacttccga

SEQ ID NO: 21618 - DNA, 2475 bp, Homo sapiens; identical to SEQ ID NO: 21595

SEQ ID NO: 21619 - DNA, 450 bp, Homo sapiens; identical to SEQ ID NO: 20659
  misc_feature 448, 449, 450: n = A,T,C or G

SEQ ID NO: 21620 - DNA, 1396 bp, Homo sapiens
cgcccacgcgtccgctggtatcttagtctttaaaagctaaattttgagaattacaggtttgagcgaaatctagaaaattcatttagaaataattaaaatgtgagggataggagaaacataaggaatcatttggtctctcagttcttcacattctgcatgctctcttttctccccccttcagatggtcttgctgcattcagggcttttttaaagtcggaattctgtgaagaaaatattgaattctggctggcctgtgaagacttcaaaaaaaccaaatcaccccaaaagctgtcctcaaaagcaaggaaaatatatactgacttcatagaaaaggaagctccaaaagaggtaaggaaacaagttcctaatttcagcacaatctggacatctttagcacaaaagtgaaacaaagtaatcaaggacaaagcgggctaggaggggtaaaaagtccctccacgttgtagctttcagttatgttaaagttctcctgtgacttagctagtaaagctaatcacacataatttttattttttgttttcaaatactaaattttaatctttaactctgagtaccaaataaacaacttttttgttttatttcagataaacatagattttcaaaccaaaactctgattgcccagaatatacaagaagctacaagtggctgctttacaactgcccagaaaagggtatacagcttgatggagaacaactcttatcctcgtttcttggagtcagaattctaccaggacttgtgtaaaaagccacaaatcaccacagagcctcatgctacatgaaatgtaaaagggagcccagaaatggaggacatttcattctttttcctgaggggaaggactgtgacctgccataaagactgaccttgaattcagcctgggtgttcaggaaacatcactcagaactattgattcaaagttgggtagtgaatcaggaagccagtaactgactaggagaagctggtatcagaacagcttccctcactgtgtacagaacgcaagaagggaataggtggtctgaacgtggtgtctcactctgaaaagcaggaatgtaagatgatgaaagagacaatgtaatactgttggtccaaaagcatttaaaatcaatagatctgggattatgtggccttaggtagctggttgtactgaggctgtatacagccacagcctccccccatccctccagccttatctgtcatcaccatcaacccctcccatgcacctaaacaaaatctaacttgtaattccttgaacatgtcaggcatacattattccttctgcctgagaagctcttccttgtctcttaaatctagaatgatgtaaagttttgaataagtttgactatcttacttcatgcaaagaagggacgcatatgagattca

SEQ ID NO: 21621 - DNA, 446 bp, Homo sapiens; identical to SEQ ID NO: 20632
  misc_feature 441, 442, 443, 444, 445, 446: n = A,T,C or G

SEQ ID NO: 21622 - DNA, 1020 bp, Homo sapiens; identical to SEQ ID NO: 20647
  misc_feature 1, 2, 3, 14, 20, 35, 42, 48, 81, 1019, 1020: n = A,T,C or G

SEQ ID NO: 21623 - DNA, 508 bp, Homo sapiens; identical to SEQ ID NO: 21293
  misc_feature 502, 503, 504, 505, 506, 507, 508: n = A,T,C or G

SEQ ID NO: 21624 - DNA, 2538 bp, Homo sapiens; identical to SEQ ID NO: 20316
  misc_feature 2538: n = A,T,C or G

SEQ ID NO: 21625 - DNA, 1132 bp, Homo sapiens
  misc_feature 1125, 1126, 1127, 1128, 1129, 1130, 1131, 1132: n = A,T,C or G
gcccacgcgtccggttctagatcgcgcccagcctacatttataattttcattctcttttacctataaaattcagtgtattagtttcattacatacggagaaattatatttctaaacatttgatgatgtttaaaaacaaaacaggctgttgtaaaaaaaaaaaaaaaaaaaacttctgaatatactttaggtatcagaaagccaagaataaaatttagctctaacggtggcaactccatgtccggtgtccagctttggacagggtttatgacgtttctgtttctctagtaatgattaatgattcctcaggagattcgtgatgttgtctggtctatctggaaatttaaagtcactaggagctttgcctcatcgtgagtgatgctgtgctgtatttttacaaactctcgcatacagcaccttcctggggccacgttggcttgtgcagtggagcttgtccaggcaccagcatggagcaagtacagggttgctgtgttgggttggagcacactgtcaccacagtgtctgaagtcttataaacaggaagatcattttctgttttccttctaaccagggtgagaaaatacaaagtaaagaactaaagaatattaaaacctagcatttatgttccacagtgtgtatttcagaagtttgtaatccagaaaatatagtagtgtataatatctgaaaagagaatcaagtatacaattgtacatatttttaaagaactttgaaaaactccgtcatatcttttaccatttgtctatttgatagtaatgcagaaaaaagtccctaaagaccctgtgttccaaaatttaccaagattgacatttctattagacatccttaacctaagtgttttaattagattattagactataataaggatgaaattgctgtctgtaattttgttgaggttttattgttaatataataaaagctcaactgtacaaaattaagctaaatgttatccagtcagaaacatcagcccgtgagccaccgcgcccagcctacatttataattttcattctcttttacctataaaattcagtgtattagtttcattacataggagaaattatatttctacactgaattttatgatgtttaaaaacaaaacaggctgnnnnnnnn

SEQ ID NO: 21626 - DNA, 689 bp, Homo sapiens; identical to SEQ ID NO: 21367
  misc_feature 1, 2: n = A,T,C or G

SEQ ID NO: 21627 - DNA, 879 bp, Homo sapiens; identical to SEQ ID NO: 21368
  misc_feature 1, 2, 3, 4, 5, 6, 750, 846, 852, 872, 879: n = A,T,C or G

SEQ ID NO: 21628 - DNA, 791 bp, Homo sapiens
  misc_feature 1, 2, 3, 4, 5, 6, 786, 787, 788, 789, 790, 791: n = A,T,C or G
nnnnnnataatgacatttccaaggaacagagattaatcaatgtgcccaaattcacattattcacagagctgggatttaagcctagtctggctgtggaatctgtattcttaatgaccatgctatattgcttaagattaaccttgaaaatttactccagttacaaagattgtttttatttctctgaaactgcccccaatgagccataacaataaattaatcaattatcttggttatctcttttgcccaagtttatatttcaaaaaaaattcaaacataccagaaagatgaaagaatagcacagaatccaatcaaagatcaggcactgcatgtcatgtcttcatttcctttaatctaaaacatgcctctactttctttgatctttcatgacactggcattttttaagagtcaaagatagttgtcttgtaaattgtcccacaatccagatttgtctgtttcctcatgatgaaattcaagttaagcatttttgggaaaaatactgcataggtgatgtatccttcctgcctcgtaaccgcagatggcctgtaatactaagtttgatcacttgactaaggtgatcttccaggtctctccattgtaattattttgctggctacagtggctcccacttgtaatcccagcactttggaaggccgaggtgggaggattgcttgagcccaggagttctacaccagcctgagcaacatggggaaactctgtcactactgaaaatacaaaagtacaaaaaaaaaaaaaaaaagggcggccgctctagagtatccctcgannnnnn

SEQ ID NO: 21629 - DNA, 816 bp, Homo sapiens; identical to SEQ ID NO: 21390

SEQ ID NO: 21630 - DNA, 2187 bp, Homo sapiens; identical to SEQ ID NO: 21516

SEQ ID NO: 21631 - DNA, 558 bp, Homo sapiens
  misc_feature 1, 2, 3, 4, 5, 6, 7, 558: n = A,T,C or G
nnnnnnnccgaggttccttgttgcagctctttatttcttagtcccactcccccgaggtaacacatttctgcttttttagctgtttcctctagtgtaggttcacctttctaatttttgattcaatcacttaaccaccgttacatactacaaaatatcactatattatgaccatgattatatttcttttctttttcccttcatcaaggaagttcatcaaagaatttcatcaaagttcaatgatgacctctttttaaaattttcttagtattctatgtaactatcaccgatcttttccccacacactccaagagctttttaatataattttctacatagccatcagcacagataaccaatcctctttttttccccactagagatgtgccttccgtaacctctgtcctcttcctttaacctggaatattgctcttcaggcctgttgtgcagctaagagcttcattcctcatcatcctggggttcctttccctctctcttgggctggaatccctcttgcctggatctctcaccttcataaatctagtttactcctttgttttn

SEQ ID NO: 21632 - DNA, 508 bp, Homo sapiens; identical to SEQ ID NO: 21293
  misc_feature 502, 503, 504, 505, 506, 507, 508: n = A,T,C or G

SEQ ID NO: 21633 - DNA, 2538 bp, Homo sapiens; identical to SEQ ID NO: 20316
  misc_feature 2538: n = A,T,C or G

SEQ ID NO: 21634 - DNA, 643 bp, Homo sapiens; identical to SEQ ID NO: 20678
  misc_feature 1, 2, 640, 641, 642, 643: n = A,T,C or G

SEQ ID NO: 21635 - DNA, 407 bp, Homo sapiens
  misc_feature 403, 404, 405, 406, 407: n = A,T,C or G
acgcgggggcgcatagctgcagccgccgagccggacgtgtccgcgaagatggcgggccggagcatgcaagcggcaagatgtcctacagatgaattatctttaaccaattgtgcagttgtgaatgaaaaggatttccagtctggccagtgagtatctgactttgttttcttttaacctgctaagtggcattcgggaaacttccagagagtcatttttaggaaacgttggaaaatatttttaaaaaattcttgctgagttggaaaatggagaggatgagaaaaagttatgtatttgaatcattactgtgtcaaactttgataaatactgtataatgttttaaaaatgttttatgtataaaactctaaattttatcagttttcttagtagagcttaacatactggnnnnn

SEQ ID NO: 21636 - DNA, 689 bp, Homo sapiens; identical to SEQ ID NO: 21367
  misc_feature 1, 2: n = A,T,C or G

SEQ ID NO: 21637 - DNA, 2538 bp, Homo sapiens; identical to SEQ ID NO: 20316
  misc_feature 2538: n = A,T,C or G

SEQ ID NO: 21638 - DNA, 1025 bp, Homo sapiens
acggtattggaaatggatctgtctttggtaaagatcagcctataattcttgtgctgtggatatcacccccatgatgggtgtcctggacggtgtcctaatggaactgcaagactgtgcccttcccctcctgaaagatgtcatcgcaacagataaagaagacgttgccttcaaagacctggatgtggccattcttgtgggctccatgccaagaagggaaggcatggagagaaaagatttactgaaagcaaatgtgaaaatcttcaaatcccagggtgcagccttagataaatacgccaagaagtcagttaaggttattgttgtgggtaatccagccaataccaactgcctgactgcttccaagtcagctccatccatccccaaggagaacttcagttgcttgactcgtttggatcacaaccgagctaaagctcaaattgctcttaaacttggtgtgactgctaatgatgtaaagaatgtcattatctggggaaaccattcctcgactcagtatccagatgtcaaccatgccaaggtgaaattgcaaggaaaggaagttggtgtttatgaagctctgaaagatgacagctggctcaagggagaatttgtcacgactgtgcagcagcgtggcgctgctgtcatcaaggctcgaaaactatccagtgccatgtctgctgcaaaagccatctgtgaccacgtcagggacatctggtttggaaccccagagggagagtttgtgtccatgggtgttatctctgatggcaactcctatggtgttcctgatgatctgctctactcattccctgttgtaatcaagaataagacctggaagtttgttgaaggtctccctattaatgatttctcacgtgagaagatggatcttactgcaaaggaactgacagaagaaaaagaaagtgcttttgaatttctttcctctgcctgactagacaatgatgttactaaatgcttcaaagctgaagaatctaaatgtcgtctttgactcaagtacctgcccgggcggccgctcg

SEQ ID NO: 21639 - DNA, 758 bp, Homo sapiens; identical to SEQ ID NO: 21402
  misc_feature 1, 2, 756, 757, 758: n = A,T,C or G

SEQ ID NO: 21640 - DNA, 1264 bp, Homo sapiens
  misc_feature 1, 1260, 1261, 1262, 1263, 1264: n = A,T,C or G
nacatcgtttgtgtttattacctataagccggccaatgttgtttttttgaaacgggtcaccttgcctggctgggccatactgtatccgcccgcaactgtccctacagctaagcattcttcctgctcagtctcccaagcagctggactatagcgcctgacaccatcccggtaactttgcaatttttgtggagatgggatccgccataatgcccagctggtctcaactcctggacccagtgatcttcctgcctccacctcccaaaatgctgggattataacaagctttgtcccacccgcagaccaaggcccaggaccacttcaaatgcagcccaacacaaattcgtaaactttcctaaaacattatgagatattttttgtgattttttttttaaagctcatcagctatcattagtgttactgtatattatgtgtggcccaagacaattcttcttccattgtggcccagggaagccaaaagattggacaccctggataacaggcatgagccactgtgcctggccggtagccacatttcaagggcttgaaagtcacaggtggcccatggctacagtactagacagtgcagattaaagaacactatcactgcacaaagttctagtgagcaacactgctgctctaatctctagagccaggtgacaaccaggaattgctggttgcctggaacctgcaacttgacagccagacctcagccccaagggctggtcagccagacagccagtctccctgtctcagagcagcaagagacagcccaattcagggcaaacgctcaggaaagcttggcatgtttatgccaagttaatcatcacctttagagagcctccatttggctgctgaagaagaaagaggtcaaaggaggacagagtggcctcacactgccctgccggacagcactgtaaagagatgccagagtttcatccacacagccttgaactgttcacctactcacccagccaggaacttctggatgagcatcaggaaatgaggttcaaatacaatacagaaaagtgtgcccaggctggctaccatccctgctggaaaccccggctcttgcaaaacttggctaccagagtaccccagtccagcactttcagactgtacccctgcccctgtatcactgccaagtgcttgctgtcaaactccctggagcatctccactctcacctctatgcacctgaatgttcccacctctaaaatgctccctgggaacactctcctttccagctacctcgatgacctgcnnnnn

SEQ ID NO: 21641 - DNA, 508 bp, Homo sapiens; identical to SEQ ID NO: 21293
  misc_feature 502, 503, 504, 505, 506, 507, 508: n = A,T,C or G

SEQ ID NO: 21642 - DNA, 905 bp, Homo sapiens; identical to SEQ ID NO: 21290
  misc_feature 1, 2, 3, 4, 5, 6, 7, 8, 9, 10, 11, 12, 13, 14, 15, 16, 17,18, 19, 20, 21, 855, 905: n = A,T,C or G

SEQ ID NO: 21643 - DNA, 3186 bp, Homo sapiens
  misc_feature 3143, 3166: n = A,T,C or G
cgcgtccggcaggtgtgttatagcacagctatggatacccctcctcaatctgtgaatgctgtgaaggggagggagaagacattctgaaatcagcattgggaagactaggcaatttcagcactattttaagaatctgagtgattcttttccctgaacttctgctttgaggaagagataatatggcccatctttctatggtcttctctgttggttgcataaaatagcattggatttgtccagatctgtttgccggtcttggagtccccagtaacagccttcctgcctggaatgtaggccaggacaaatgtaaaccaatggacaaatgtttctcaaaaattatagaatggctccaagtgcctgagaaatgaagaataaatctgacaaccagaagcagctgtcttgtgaatagagggttaagtgcctggcatttggtgcttgggaggtggccagaatgcagataaggtgaaagttgccctgttctaaatccactcccatgtgacttggttgtaactgagtttagttaaaactgaagtctttcagagtcttcctacagatgtacaattaacagcttctctcatttttctgactcggtgatcccaagaaggcctatactgggtcagttcataccatagtgcacacctcagttgtatagaatccaaggactattctcccatcagcatcggtattcagcatctatgtctttagatccctgatggcgtattattgactcttttttctagagaccaatttgaggcacacctgtaaacggataatggacatggtgagcaaccagcacccctggtttggcatggagcaggagtataccctcatggggacagatgggcacccctttggttggccttccaacggcttcccagggccccagggtaagtctccttgggttagaggtgaaattcccagaagtgtctaactgtgcaggaatgccccttcccagggatgggaatgactttcagaatcaagaagcaaaataatacagtaaaggcgaaacagccctcacatcaccaaagtccaaaaatggatatgaatatataaagtaaggttttagggggaacgtttggccccactgaagctgtggtgaagaggaactcccctattgcccctcccctgccccgcacctgcagatgaaggcaaggatagtgattcaagagggcaaggcttaagggccttctgatctctgactttgggattctctggatttcttgactcttagtgttttgtcctgatgcttctgtaggtccatattactgtggtgtgggagcagacagagcctatggcagggacatcgtggaggcccattaccgggcctgcttgtatgctggagtcaagattgcggggactaatgccgaggtcatgcctgcccaggtaagtatagctccaatccatcaatgaagaagggtaggtaggtgcacataggacttttgctagtaagggctgctgatacaccactcactaacccaaaacctaagaacgggttggagtacaggtgagaagagaacaggtttaggagattctgagttggagtgagcagttagctttgttttaatggccaagcttctcgtt[450 bp omitted]ataatttatataatatatattagtcatatatcattatataaatatatatcgatatatatatttgtgacatgtcatggtgacagggaaaagttgacaaattcatgcatttgaaaatcttttagaactaaattagtaacaatacaggcatgtggataagcttaatgcttatgagggggagaaagtttcaaatgattagtcttttcaacaaacagtaactttgtactgcttgtcgggcactgttctcaccactgagacacacaggtaagaagatgcagccactgccctcatgaagtatttgttctactggtatcatattttggtgcacttcattcttggctccatacctggagacaaggttggactgccatcttttctgtttactctaggtacatcgaggaggccattgagaaactaagcaagcggcaccagtaccacatccgtgcctatgatcccaagggaggcctggacaatgcccgacgtctaactggattccatgaaacctccaacatcaacgacttttctgctggtgtagccaatcgtagcgccagcatacgcattccccggactgttggccaggagaagaagggttactttgaagatcgtcgcccctctgccaactgcgaccccttttcggtgacagaagccctcatccgcacgtgtcttctcaatgaaaccggcgatgagcccttccagtacaaaaattaagtggactagacctccagctgttgagcccctcctagttcttcatcccactccaactcttccccctctcccagttgtcccgattgtaactcaaagggtggaatatcaaggtcgtttttttcattccatgtgcccagttaatcttgctttctttgtttggctgggatagaggggtcaagttattaatttcttcacacctaccctccttttttttccctatcactgaagctttttagtgcattagtggggaggagggtggggagacataaccactgcttccatttaatggggcgcacctgtccaataggcgtagctattccggacagagcacgtttgcagaagggggactcttcttccagggtagctgaaaggggaagacctgacgtactctggttaggttagggactttncccttgtggtgggaaacttttcnttaaaaagtttataaccaac

SEQ ID NO: 21644 - DNA, 349 bp, Homo sapiens; identical to SEQ ID NO: 21615
  misc_feature 347, 348, 349: n = A,T,C or G

SEQ ID NO: 21645 - DNA, 594 bp, Homo sapiens; identical to SEQ ID NO: 20446
  misc_feature 586, 587, 588, 589, 590, 591, 592, 593, 594: n = A,T,C or G

SEQ ID NO: 21646 - DNA, 508 bp, Homo sapiens; identical to SEQ ID NO: 21293
  misc_feature 502, 503, 504, 505, 506, 507, 508: n = A,T,C or G

SEQ ID NO: 21647 - DNA, 2538 bp, Homo sapiens; identical to SEQ ID NO: 20316
  misc_feature 2538: n = A,T,C or G

SEQ ID NO: 21648 - DNA, 365 bp, Homo sapiens
  misc_feature 362, 363, 364, 365: n = A,T,C or G
accagtgaaggacaagaaacttctggaggtcaaactgggggagctgccaagctggatcttgatgcgggacttcagtcctagtggcattttcggagcgtttcaaagaggtcagagccttgtgggatgtctgtaaatgaaagcaaatctctgggtcttcagatctcttttttgccatgaattaatttgggcaatgaaggccttgttgtctgaaagcagtaagttatgtagaggatgacagggagggatgctaggccttggacttctgtggttgattggccctttcaaaggctggctctgagatattacagccaagaacatgcttcctgttgcttggaatcagtatgtctgcctctgtcttagannnn

SEQ ID NO: 21649 - DNA, 692 bp, Homo sapiens
  misc_feature 690, 691, 692: n = A,T,C or G
acagtaacatgctgcacagttttgtaggctatgagcaataggccataccatataggctaggtgtgtagcaggctgtgccacccaggtttgtgtaagtgcactctatgatgcttgcacaacgaccaattccacccaacaacgcatttctcagaatgaatccctgttgtcaagcgatgcatgactgtgcctttgatagttccttacaaattgatcttgagatgtgtattcatgtgtaacctagttactgaataatgcatctcgaaatgttggattctttttgcatccgcctgtgctgtgctgccttccatggagctctatgatgactggcacctcctggtggaggcatccttcccacattacccccagtaagagcaacaacaggcaaggctgtcctcttccccaggagggggaaggtaaagatggagagtcaggaggaaccaagagtttcccagtggcagaagctccggctcccctgaccacacagtgtgggttttcaccagagcttgagccttagcatcagccactcctgcgttcaacaacagctttggtgcttaggggctgggtgatgctgacccaatatagatgtcagtagagtgtacatttggcaaggaaaaaaagctactgttctcatttcccctttcatatgcttgttacatctatggctggataaatttgtgaatgcgtccgtcnnn

SEQ ID NO: 21650 - DNA, 858 bp, Homo sapiens; identical to SEQ ID NO: 20527
  misc_feature 1, 2, 858: n = A,T,C or G

SEQ ID NO: 21651 - DNA, 369 bp, Homo sapiens
  misc_feature 1, 2, 3, 4, 5, 6, 7, 8: n = A,T,C or G
nnnnnnnncaggtacatattttttaaaactggttagcgatagctacatgacccaattatattttctatatttatttgattatcagccagtaaactcataatgaagcagctgcgcactcccccaacaattgagaattgaacaaatttccagagagaagtgaaaaatatcaaaaattaaaatcctaaacttgaagacaagttgagagaccatttagtctggccacctgtatccaagattcatttaaaaccaagcagcggccaggcacgatggctcacgcctgtaatcccagcactttgggaggccgaggcgggcggatcacgaggccaggagatcaagaccatcctggctaacacagtgaaaccctgtttc

SEQ ID NO: 21652 - DNA, 1020 bp, Homo sapiens; identical to SEQ ID NO: 20647
  misc_feature 1, 2, 3, 14, 20, 35, 42, 48, 81, 1019, 1020: n = A,T,C or G

SEQ ID NO: 21653 - DNA, 2538 bp, Homo sapiens; identical to SEQ ID NO: 20316
  misc_feature 2538: n = A,T,C or G

SEQ ID NO: 21654 - DNA, 1210 bp, Homo sapiens
  misc_feature 1, 2: n = A,T,C or G
nnacgcgtccggccatttgagcactgggtacaaatgtattttggatcaaagaaactccagtattcaaagataggaactgacaggattttaggtcactttgtaggtcaccacctagaggggaggaagacctcgctttggagagtgggaataaaacgctcgtggaaaagggtacacgtgagtgtctcattacacgaaaaacctcaggaagtaggatggacgtctttctggctgacctgaaacagaaagtgtaaaccaggcaagccataggtgggagctggagttctttttctaagagggctcttttccttctctctccttttctcaattaggcttttctgggaaagtgaggccaccatggctctggagaagtctcttgtccggctccttctgcttgtcctgatactgctggtgctgggctgggtccagccttccctgggcaaggaatcccgggccaagaaattccagcggcagcatatggactcagacagttcccccagcagcagctccacctactggtaccaaatgatgaggcgccggaatatgacacaggggcggtgcaaaccagtgaacgcctttgtgcacgagcccctggtagatgtccagaatgtttgtttccagggcatgcacatcacagactgccgcctgaccggaaacggctccaggtaccccaactgtgcatgccggaccagcccgggggagacaaaaataaatgaggcctccaacacacaaccaaaaaccaacacaccacccccccccccccaacaaccccaaaaccactccccaggagagagagagatgaaaaaaaaactccctcggcctcatcctctccacagctgcctcttccctcttccttccctgctgtgaaagaagtaactacagttagggctcctattcaacacacacatgcttccctttcctgagtcccatccctgcgtgattttgggggtgaagagtgggttgtgaggtgggccccatgttaacccctccactctttctttcaataaaacgcagttgcaaacccctcaaaacccaaaaccaaaagcgaccgcgaattccagcacacgttggacctatttacattagggaaggaaacagatcaacataaaaagtaagttatactgtaacaaattcagctatttctccctaaaaggcctgcagagaaaccaagcactaggacacatccactactgccaaaaaaaggagcagaagt

SEQ ID NO: 21655 - DNA, 1060 bp, Homo sapiens; identical to SEQ ID NO: 20584
  misc_feature 1, 2: n = A,T,C or G

SEQ ID NO: 21656 - DNA, 879 bp, Homo sapiens; identical to SEQ ID NO: 21368
  misc_feature 1, 2, 3, 4, 5, 6, 750, 846, 852, 872, 879: n = A,T,C or G

SEQ ID NO: 21657 - DNA, 666 bp, Homo sapiens
  misc_feature 1, 2, 3, 4, 5, 6, 7, 8, 9: n = A,T,C or G
nnnnnnnnngagtctttcttaaaaaacaaacaaataaaaaactcttcaacaaatcctaaagaccaggaaataaacatctgctgagttttctgctcagtgtccattcatgatttttctggtaacaatactgccagttacttagggggcaaccccctgactctagagccatgtagcttagtggagtgaaccccacccccagcttcagaagtgggaaagtttacacagtccaagctcactcagacactgcaagcccttcccatagatgcaggttcagaatcaaggtcacagacttgtagggaaagataagatctctctggacttgaataagcctctgtgcagtaaaaccaactgggaggcaagcagagcccagaactggaaggagatggttctaatacatgggcccctggatgcaaccatgcctgatgcctgatcattctggacttttcagttatggatcaatacattcattttgctcaggccagtttgaattgggtttgaggagagaggaatttagactcaagcagtcctcacctcagcaagattggcctccatagttgtccatccacgaatcaagggaggatgtgggaaaaattgaaggtgttacaggataaaagtaaatgaaggcctcgtgagtttcatgctcctgacatgacgagtgggcaaagt

SEQ ID NO: 21658 - DNA, 374 bp, Homo sapiens
acagagacaactagtgacttatcccaagtcacacaggagttagaggcagggccaggacccaaacccaagtttcccttttatgagtcagctcatttcctgtgactccatattaaagatgccactctgaattttgccttggaagctggcgcttcagtttataacacaaattgacactttaggaagacaagagagctttgtattctccctgcaatcatttactcagtcaggaaaatactaaacactgtctttgcgtagaatataatgctactgatgtgaggaaaagaaatccagtgcctggcacatagaaaaggatagatacacttttgtgggaggaaaaacagtggtaaaaacatggactggagtctcagctctac

SEQ ID NO: 21659 - DNA, 420 bp, Homo sapiens
  misc_feature 1, 2, 3, 4: n = A,T,C or G
nnnnaccacagttttctgaatctggccaccctctacctcttcctcagctttcctctcccactcggccttcattatatgctcagcccctccctttgcctactcctcccccacctgacgatactgaggattcaatatctaactccagtgactttggcttaacatcaccccctgatgatcttatttcttttcacgaagagccgacacttgtagctcctgcggccccaactcagacagcccaggaccatatctatgctaactcttccctctccaaacctttacagtctttgcctccggagccatccaaactacaatttacctgtaattctgcaggccctcccccatccaccacagcccctcaccctcctatcattttggtccctcaaccggtcactttgccatccactcaacctgcttctctgt

SEQ ID NO: 21660 - DNA, 882 bp, Homo sapiens
  misc_feature 1: n = A,T,C or G
naggaaaagtcacggagctgtcacactgcctctttaatgaagttgttttcttccaccttaccactggctcacccttgaattctttcctgggtaaagccaggaaccctcatgggctaaggcccaatttggggcttgcctgtcctgcaagaaaaccacaacctcagcagcaatcagccccaaatggtcaggactcttgcaactcagaatcaaccacagaaaaacaaataggctcctcaaaccaatcactgaagacacctacctctatcagctgcttccaacttctccaggccagaagcctccaatcagagcactgctgcagccttccccttttccaccgtaaagcttcccactcccctgcctgcctcggagtgtccactaagtacaaaactcccttactacagcaagctccgaatcaagaaccttatttgtttgtgttcattgggctgatctttactttcacagacctcagtacttctaccatgttcagtggttcctcccaacctgaactttctgtactctaataatctcttgtctgtttcgccacctcacagtggccccctcaagcacaagggctgggcctacacagtatctggcagagggtttacagcgtaatcagatcagtcctagaaagctcagaacacaaacagtccagtcacttaacccccatcctcacacagcactttttccattaacagaaacactttacatactcccgttacagtaggatttggctttgtattttgtttagccttgtattgccaaatcctagcatttaggaggcatttaagaaatatttatgaaatgtctaaagccactgtgaaaatctatgttaaatcccccgtttttcacaatgtcagttatcacaaaaccccaaccggacgc

SEQ ID NO: 21661 - DNA, 506 bp, Homo sapiens
  misc_feature 1, 2: n = A,T,C or G
nnacctgtggatgggaagaatagaaatcaggagtgggcagagggaaaagttaagctgtgatgtaggcccagtgacaagccactgacacttctatggggagctgtaaatagacctttggcattgtcccaagttgggccaatatggccaggcctttacaggctcacacatcatttattgcttgtgggccactccaggaaggtgcatgactttgggtaaggaggctctctggagctgaggtaatccctgaaaggactaacagctgaagattgtctgctgagaatactgccgaagactaaggcaacaaattcttccacatacaggatctggatggcacatcacagtgcccaaaataaaggctgaacttatttagttataatctgatcagttaggaattgcaatcagctgagagtgagagagtctcccacaacagtgatgcaaactcatcacaggctttttcttttaacaggaattccggagcaaggaagttattggcattcgtttagtgt

SEQ ID NO: 21662 - DNA, 560 bp, Homo sapiens; identical to SEQ ID NO: 20759
  misc_feature 560: n = A,T,C or G

SEQ ID NO: 21663 - DNA, 878 bp, Homo sapiens
acctgtctataaggagtcctgcttatcacaatgaatgttctcctgggcagcgttgtgatcttggccaccttcgtgactttatgcaatgcttcatgctatttcatacctaatgagggagttccaggagattcaaccaggaaatgcatggatctcaaaggaaacaaaacacccaataaactcggagtggcagactgacaactgtgagacatgcactttgtacgaaacagaaatttcatgtgtgcaccctgtaagtctcaagccaagtgctggccaagagggggacatagctgttctctgaggaacagctactccgtcttgcaaaattccaatcttcaggggtttagtttttgttttagttttttatagactttatatagagtagttttagattcacagcaaaactgagcagaggtaccagaaatttcccatgtgcctcctgccctcaaacatgcagactccctgttatcaacatcgtcccaccacaggggggtattctgtatgactgatgaactacctgtgcacatcattatcacctgggtccatagttcatgtagggcttcctcttggtgtgtggaatgggggtaagttcaggacctatttctttcttttaacacatgtgggcagtcacaatggtcagctgtaattccagcattgggggcgaggggggaccaggaggcgggacgaagcctcctaggaaagtggaaccggttctctaaaacaaaagaaaaaaaatgtggggcccgccgagaagttaaacctgggggggcgccaagaaaagaaagagcagagcaagaccggcagacaggggtcccaaaagccgggggtgacagcagctggttgtcgagaacacgcgcgacgcgaaacacacacgagccagc

SEQ ID NO: 21664 - DNA, 386 bp, Homo sapiens
acaaactctgtttagataaagaattaaacaaaacttccatttttattaataattcaagtataatccataatatgattattaggtgttataactaataagttgttattttatatcttaatgtaggtaaagagaactggtcttgtggtggtgaaaaacatgaaaattgttggtctccactgttctagtgaagatttacatgccgggcagattgctcttattaaacatgggtcaaggctgaaaaactgtgatctttatttttccagaaaaccatgttctgcttgtttgaaaatgattgtaaatggtaagtgcagaaaagggtttgttggggattaagagtatttatctgggatgggcgtgggggtttatgcctgtcatcccagcacttt

SEQ ID NO: 21665 - DNA, 1214 bp, Homo sapiens; identical to SEQ ID NO: 20119

SEQ ID NO: 21666 - DNA, 1498 bp, Homo sapiens; identical to SEQ ID NO: 20817
  misc_feature 1, 2, 1498: n = A,T,C or G

SEQ ID NO: 21667 - DNA, 2538 bp, Homo sapiens; identical to SEQ ID NO: 20316
  misc_feature 2538: n = A,T,C or G

SEQ ID NO: 21668 - DNA, 2538 bp, Homo sapiens; identical to SEQ ID NO: 20316
  misc_feature 2538: n = A,T,C or G

SEQ ID NO: 21669 - DNA, 1060 bp, Homo sapiens; identical to SEQ ID NO: 20584
  misc_feature 1, 2: n = A,T,C or G

SEQ ID NO: 21670 - DNA, 689 bp, Homo sapiens; identical to SEQ ID NO: 21367
  misc_feature 1, 2: n = A,T,C or G

SEQ ID NO: 21671 - DNA, 414 bp, Homo sapiens; identical to SEQ ID NO: 21428
  misc_feature 1, 2, 3, 4, 5, 6, 7, 8, 9, 10, 11, 12, 13, 414: n = A,T,C or G

SEQ ID NO: 21672 - DNA, 1264 bp, Homo sapiens; identical to SEQ ID NO: 21640
  misc_feature 1, 1260, 1261, 1262, 1263, 1264: n = A,T,C or G

SEQ ID NO: 21673 - DNA, 2187 bp, Homo sapiens; identical to SEQ ID NO: 21516

SEQ ID NO: 21674 - DNA, 642 bp, Homo sapiens
  misc_feature 1, 2: n = A,T,C or G
nnactatagggcaatggagctcaccgcggtggcggccgaggtacaactgatcagcaaaaatattatgattaatatgttaactgaggaagtatatcctacaatttagaaagattaatatttaaaatagttaaaattattgaaagttttaacttgcccgaaacagtccctaaccataagggacaattaatgatgctataaaattctatctaacattcctagtctacttgttgttttggagggcaggctgccattcctgcctattttaatctttcgaaggtggtctctgctcccatttaaaggtataagcaattaagagatacagaaccctcagaactaccttctataacttacctaatttctaagcttaaaatgtaatctaggctgggcatggtggatcacccgaggtcaggagttcgagaccatcctggccaacatggagaaaccccatctctactaaaaatacaaaaattagccagacgtagtggcagccacctgtaatcccagctactcgggaggctgaggcaggagaatcactcgaacccaggaggtggaggttgtagcagtgagccgagatcgtgccactgcactccagcctgggcaacagagacacctgtctcaaaaaaagatataaaaaaataaagt

SEQ ID NO: 21675 - DNA, 689 bp, Homo sapiens; identical to SEQ ID NO: 21367
  misc_feature 1, 2: n = A,T,C or G

SEQ ID NO: 21676 - DNA, 496 bp, Homo sapiens
  misc_feature 496: n = A,T,C or G
cgggcaggtacgcgggattgtaaaagttgggacctgaaaatttaatgcctgggacttgaacgtattgacatatctttattgttcagtatagatctgaaggaacatttcagcagaaaggaaagcatgaggaataggaaaccttgtgggagtataataacaagagtattggttgagtagtcttttgaaaaatataaattatattttcgcaaatagaactccttgagtccccttatggcagtcaagctgaagcagcatgagcgtcatatcatagtgatgtattttaaggtcacaacggcggaaagacatagaaagtatctgacctcttagaaacaagcagctgctgcctggtggtaacagcaaagggtggaagtcaatagagtctctgtgagactgtttcacagaaggatgtgtgtttacccaaggctgcgcatcaaaaagaaatagataaaataaatggaaaattagaagggtctcctgttaaagatggtcttctgan

SEQ ID NO: 21677 - DNA, 860 bp, Homo sapiens
  misc_feature 851, 852, 853, 854, 855, 856, 857, 858, 859, 860: n = A,T,C or G
ccccggcgcagtcagatccgaggacatgtgacgtcgtccgagagtcttaaaatcctgctgtggccggattccagactcgtgggggaaaggctggatcttaatgcaagtcatgaacttgaatgtgccgatgaggcctggcattcttggtccagagacagagtaaggaagtgttggccacacccttagaaaacagaagggacatggaggcagaagaggagaaccaaataaatgagaagcaagagcctgagaatgctggagaaactggtcaagaagaggatgatggtttgcagaaaatacacacatctgtcactagaactccttcagttgttgaaagccaaaaaagacctttaaaaggagtgacattttctagggaggtaatgtgttgtggatctgtgggaatgaataccctacacctcgaagctatactcgagaacataaagagaggaaatgaagctcaaaaaagggtaagagtgaaagaaaaatgtaacgtttgactaacgttgaaagactgagggtacaaatcatgttgaaaacaacaaaacaatggggaattaagcaaataaagatatattttacctttgtgcagaaaggaggtgaggcatgtgcaaaattctgtagtaaaataattagagtgatatattttttaaaattcaatctgggttcagaaatggtggttgcttaaaattttattcaacatgtctggtggtgataaggcttggtgcaaaacaaacaacaaaggcaaattggaaaaaaaaaaaagggggggggggcagaattaaacatggggggaggataaaggtgggaagcggaagggtcacaaaagggggggaaaggggtgtagcgtccttgcnnnnnnnnnn

SEQ ID NO: 21678 - DNA, 382 bp, Homo sapiens
  misc_feature 1, 2, 378, 379, 380, 381, 382: n = A,T,C or G
nnatacattctaatggtgtaggaatgtataatgaaagatggtcttcaatggctactgaaacacctgatataagggatgctgtgtgcactactacatagagattgggtcttaaaaatatttagggaaaaaagctataattttctttctgaaaaatttaatcttaagtgatatttactaagaaatatatactgcaaaccacaataacaatgatcttctcaaaatttgcctaattgcttcacaaatgagtcaacttacaaagaagaaaacacagaaaattgcttttaaatatataactccttcattttgctgataatcaaatgaaaatttaattcatcccatttaatacaaattaaactcatgctcaatgtaagatatcannnnn

SEQ ID NO: 21679 - DNA, 2538 bp, Homo sapiens; identical to SEQ ID NO: 20316
  misc_feature 2538: n = A,T,C or G

SEQ ID NO: 21680 - DNA, 981 bp, Homo sapiens; identical to SEQ ID NO: 21549
  misc_feature 1, 906, 981: n = A,T,C or G

SEQ ID NO: 21681 - DNA, 634 bp, Homo sapiens
  misc_feature 1, 2, 3, 4, 20, 40, 617, 618, 619, 620, 621, 622, 623, 624,625, 626, 627, 628, 629, 630, 631, 632, 633, 634: n = A,T,C or G
nnnnggtggccaactttccnccctcctcaattttccaaantaataaggcaacaaacctcccctttcctaagaataatgaactttggcccaagatgactcaccctgaatgcccaccctaaagggcattgccctggccccggtacatttcctcctggctcccagccttggctaagttgatgacctgacgtcgatctccacattcatctacatgaacgtgggggcgttggttttggcggccaggctgtaaaatgtagggcttgtctcagtttgctatttaatcaacatgtggacattttagcagagaaaccccagagcaaataggaatgagaagctacctgattaaaatgatgaaatgatagagaatgttttttggctgggacattttaaccaaagttgcacaactgatgctgattgccttccttgtagtttagtagaatttgtcatttgtttagctccttttcgttccagtgaaaatagataagctttactgagtggcttactttgaggtgtggactcctttgtaagtagctatagggtctcttcttgaacactgaccaaagaatccacctttaatcctattcagttaagttgaagcccctctaaaaaattttgttgtnnnnnnnnnnnnnnnnnn

SEQ ID NO: 21682 - DNA, 396 bp, Homo sapiens
gaggctgcagttagttgagattgcgccactgcactccagcccaagtgacagagcaagacttcgtctcaaaaaaaaaaattgatatagtcaactttacaattattttaaatttcaattattaaacattatttgagcagtttaaatgattttcaatatacgacaggaaaaaagattgtggaaatagccttttttaaacatctttgaaaagcatttgaaatcagctctatttttttaaagtccaagacatcactctgtattttcttaaatattccatagttatctgaaattgtttttttaaccacatctggcttattttatttccagactttcctgaaggaacgctttgacagtgaagaaatcaaacctgacttatggatgtccttagaaggtggaagt

SEQ ID NO: 21683 - DNA, 530 bp, Homo sapiens
  misc_feature 527, 528, 529, 530: n = A,T,C or G
agtcgacccacgcgtccggggggataaagggcttttttttttcctttctctagtttctacatttcttttaatgttgttataccactgttacctaactaggaaaaaataaatttttttaaatgaccaagctcattttgaagctgctcggtgtcccataaacactgaggcctgcctgcctcaactaaagcagccacttgaaatgcagctccagctgctcattcttctgtttatcaaaacagggcaaagccgcccaggaaactcgcctcagcaaggtgacctgacctcaggcccatcacagtcacaaatctgcattcccaataaaaaataatcacaacgaagaaaagcacccaggtaaccagttatggaaaagcaaaggattgatgagttgggggtgacaggacagtgaattactggttttgtgtttttgttttttggggtttttatactgatcatagtcacaatgcctagcacaaagtgctcaataggatttgaagcagaaaatgtttcaaatgggaaaatgcactcannnn

SEQ ID NO: 21684 - DNA, 2538 bp, Homo sapiens; identical to SEQ ID NO: 20316
  misc_feature 2538: n = A,T,C or G

SEQ ID NO: 21685 - DNA, 1631 bp, Homo sapiens
  misc_feature 1630, 1631: n = A,T,C or G
agggagtcgacccacgcgtccgcttccagctgtcccctgaaagtcatccaggcggcggtccctttttttctgcctttttgtttccctccggcgagtcggcgcgagggtgaatttccgtttccggcggtgtccaagcggacctaaggagtcgcagttgtgaacaggttagagttacttgttattggtaaatagccactatggagactaaggaccagaagaaacacagaaagaaaaacggtggacccaaagctgcaaagaaaaagaagtggcatctgcaggatctccagctaggagactaagaaaatgcccagaagagaaatgccaatgcttttgcagttcagtctgctgtgtggatgtctcgatcctttcacaggactctggatttgaagacacaaaagcatcatattccagtggttgatggaactccactagagccgccaccaatagcggtagtggtgacggggcctccaaagttggaaagagcactttgatataatgcctcattcggaacttcacctggcagaagttcaccgagatcagaggccctgtgacgatcgtgtcaggtaaaaagcgcagactcaccattattgaatgtgggtgtgacattaacatgatgattgatctggctaaagtagcagatctggtaagtgagcaggggcagcctggggtgctgatggagacttacagcattgtggtaggttatttaccccgtgatgaagggaagagagttttgtgattattaaaaggatcatggtcattatcagggatatagtagatgtgattgaattgatgatgataataataatagtaataaatgttgtcatattaataatacaaatggaatgtgcacaatgaaatgtgttccaaaatctaaaagcagatcacaggatggagaaaacctttaatgaacacagctaataagagctcatttacatgcatacatatatatgtacaaatatatcatagtaagtaccatttcttcttggacccttcctggcactgtgctaactgctttctacaactttagcttaccataaacccttgatacacccttgaggtgagtaggtattatctgtagtttacataagatgaaatagagcctcccagcagttaagtaacttgtgtgaagatgggacccttgttcctgatggttctagaaccttcatccttaatgataatgctaaagtaagtacatgaattgcctgaagaagtggtcagagtttatcaatagaaaatttagatagtactcagcgtgtggaaaatgtacatttatggaaatgataatgttcactatctctgatattctatgatcttttacattagcaaaaaaaaaaaaaaaaaaaaaaaaaggccagacacagtggctcatgcctgtaatcccagcactttgggagaccgaagtgggtgaatcacctgaggtcgggagttcgagaccagcctgaccaacatgcagaaaccccgtctctactaaaaatacaaaattagacgggtgaggtggtgcatgcctgtaatcccagttacttaggaggctgaggcaggagaattgcttcaacccaggagatggaggttgcggtgaggcgagatcgtgccattgcactctagcctgggcaacaagagtgaaattctgtcnn

SEQ ID NO: 21686 - DNA, 2538 bp, Homo sapiens; identical to SEQ ID NO: 20316
  misc_feature 2538: n = A,T,C or G

SEQ ID NO: 21687 - DNA, 2854 bp, Homo sapiens
  misc_feature 2852, 2853, 2854: n = A,T,C or G
gctcgggtaactcccaggggctggctagagacccagaggcgcacagcggatcggcctgcggcgaggatggagggcctggcagtgcggttgctgcgcggcagcaagctgctaagaagaaatttcctgacttgtttgtcttcttggaagattcctcctcatgtctcaaaatcttcccagtcagaagctctactcaatataacaaataatggaatacactttgctcccctgcaaacatttacagatgaggaaatgatgataaagagttcagttaaaaaatttgctcaggaacaaattgcacctttggtttcaaccatggatgaaaattcgaaaatggagaaatcagtaatacaaggattatttcaacaagggttgatgggtattgaagttgacccagaatatggaggcacaggagcttcatttttatccactgtgctcgtgatagaggaattagccaaagttgatgcatctgtggctgtcttttgtgagatccagaacacattaattaacacactgattagaaaacatggaacagaagaacaaaaggccacctatttgcctcagctcactacagaaaaagtaggaagtttctgcctttcagaggctggagcaggtagtgactcatttgctttgaagaccagagctgataaagagggagattattatgtcctcaatggatcaaagatgtggatcagcagtgctgagcacgcagggctctttctggtgatggcaaatgtagaccctaccattggatataagggaattacctccttcttagtagatcgtgatactccgggccttcatatagggaaacctgaaaacaaattggggctcagagcttcttccacctgcccgttaacattcgaaaatgtcaaggttccagaagccaatatcttgggacaaattggacatggctataagtatgccatagggagtctcaatgaaggtagaataggaattgctgcacagatgctgggactggcgcaaggatgttttgactacactattccatatattaaagaaaggatacaatttggcaaaagactatttgattttcagggcctccaacaccaagtggctcacgtggccacccagctggaagctgcaagattactaacatacaatgctgctaggcttttagaagctggaaagccattcataaaagaagcgtcaatggccaaatactatgcatcagagattgcaggacaaacaacgagtaaatgtatcgagtggatggggggagtaggctacaccaaagattaccctgtggagaaatacttccgagatgcaaagattggtacgatatatgaaggagcttccaacatccagttgaacaccattgcaaagcatatcgatgcagaatactgacgtctataggagtgggacccctccctggtgtcactgctgtaaaattttaaacggttgtgtcttgttgggagtaagtgccttgcgtgggaataaacttccacagcattcgaatattttaatgaagcccttagtcagggtcctggtgttggcctttttggttttctcttttcaggctgtttaacttaggcacaggagatccacttttaaacttgggaaataagcacctgtatttttttccaaaactgtttttaaagctgtatacgcatacatatatatatttttactctgtcttactctgtcacccaggctagagtgcagtggcgcgatctcagctcactgcagccttgacctcctgggttccggtgattctcatgcctcatcctcccaagtagctggaactacaggtgtgcaccaccatgcctggttcatttttgtgtttttagtagagatggggttttaccatattgcccaggctggtcttctggcttctggatatcgcccaccttggcctcccaaagtgctgggattacagggatgagccaccatgcctggctgggtatttatattatcattctagtttcagagtatacagaagtttcatcccatcatttggaaaaataaaggcatctgaagtacaatattacttatagaaatagtttatattcctattaaatcttaatcttgtggcatcagggaaatatttgttacatagtaggcaatttttatccagtactttatagattcaactctaagttgcaagcgaagtcaaaactgatgaaaatttatttagaaaaatctaaaaattctggttttaaatatgagaatcagtggaaaataagggtataattttgtaggtcatatgattgaagaaaatattattttaacaatgtaaagcaatatgatttgttactataattaacctgtataaaagatacattttatggtggtttcagtaggtcattttaaaaaccaatgtgcattagttttcaagtataaggtttaagtaatttggtttaataatcagaaaatattcaatacagtgttggatattctgtcatgcactatttttcagttgacaatttctgtattttaattgaatactgtttcttcagtcatggttattgcactttatcctgaataataattcagaaattgggttttggttcagtgattctcaagaaaaagatctcttgcccattaagaagtgtatcaaaatctcataaggaatgagggagagaagggggctgtagagtttgaaaaagcatattcaatattaaaatagttttatatttgggaaggcaaaaatgaatctattgttttgcaatataggttataaacaggcaaaatgcaataaaatatatatctgggtgaaaaaaaaaaaaaaaaggaaaaaaaaaaaaaaaaaaaaaaaaacatgcggccgcaattcgagctcacttggccaattcgccctatagtgagtcgtattacaattcactggccgtcgnnn

SEQ ID NO: 21688 - DNA, 981 bp, Homo sapiens; identical to SEQ ID NO: 21549
  misc_feature 1, 906, 981: n = A,T,C or G

SEQ ID NO: 21689 - DNA, 632 bp, Homo sapiens
acggtgaatagaaaattccccatatgatgtcaactaccaggtgcttgtaagtttgagggctctgaaggccatcctagggatacccacatgatttcagcggtgtctgttgggcagtgccagtcttggaaggtgggccaagcataaattccacaaccttataactaatattagatgaagtttctcaaacattcctttgagacatggcaggacagcgccagggatcctccttcaggaagaaactagattttacattggtacgcggggggttccgggcgttaccatcgtccgtgcgcaccgcccggcgtccagatttggcaattcttcgctgaagtcatcatgagctttttccaactcctgatgaaaaggaaggaactcattcccttggtggtgttcatgactgtggcggcgggtggagcctcatctttcgctgtgtattctctttggaaaaccgatgtgatccttgatcgaaaaaaaaaatccagaaccttgggaaactgtggaccctactgtacctcaaaagcttataacaatcaaccaacaatggaaacccattgaagagttgcaaaatgtccaaagggtgaccaaatgacgagccctcgcctctttcttctgaagagtactctataaatcta

SEQ ID NO: 21690 - DNA, 398 bp, Homo sapiens
ggcagaggaatgttttctaaaacagatctgtcaagcaacatacaaggtatgtatcaaaacttttatcatattgttatagaaaacatgctacttgaatgttacataaaccatcaagtcacatatttataacctaaggatcagaatatccttcaatttaaattgtgaaggttaattacattaaaaaataatagccaatttgaaaatcaaagtgcactgaagcattcaatctggaaggaggtagctggtaaaatgaagacatttatctttcatgtgcaaaaattttgtaaaggaaattaaatagattatatcaggcatgcaaactataaatcctcttatttataacataatcatggtcaggaaaaaagtattaaataaaaccacttaactttatattaggt

SEQ ID NO: 21691 - DNA, 1498 bp, Homo sapiens; identical to SEQ ID NO: 20817
  misc_feature 1, 2, 1498: n = A,T,C or G

SEQ ID NO: 21692 - DNA, 3695 bp, Homo sapiens
  misc_feature 1, 2, 3694, 3695: n = A,T,C or G
nncgtccttccacgcgtccgccggtgtccgcggcgctgggtcggtggcggaggctgaggagaaggaggagcgggccgtggaggcttcgccgcctaggtactgctataaccagaatttggtagaaaaaggatttacttgttggggccctcttgataaaaagagatgtggggggattctcgacctgctaacagaactggaccttttcgtgggagccaagaagaaaggtttgctcccgggtggaacagggattatcctcctcctccccttaagagtcatgctcaagagagacactctggcaactttcctggcagagattcacttccctttgatttccaggggcattcggggcctccttttgcaaatgtagaggagcattctttcagctatggagctagagacggaccgcatggtgactatcgaggaggggagggacctggacatgatttcagggggggagatttttcgtcttctgatttccagagcagagattcatcacagttggacttcaggggtagggacatacattctggggattttcgggatagagaaggaccacctatggactataggggtggagatggtacttctatggattatagaggtagggaggcacctcatatgaactacagagacagggatgctcacgctgttgacttcagaggtagggatgctcctccatctgacttcaggggccggggcacttatgatttagattttagaggccgggatggatcccatgcagattttaggggaagggatttatcagatttggattttagggccagagaacagtcccgttctgattttaggaatagagatgtatctgatttggactttagagacaaagacggaacacaagtagactttagaggccgaggttcaggtactactgatctagactttagggacagggatacgccacattcagatttcagaggtagacaccgatctaggactgatcaggattttaggggcagagagatgggatcttgtatggaatttaaagatagggagatgccccctgtggatccaaatattttggattacattcagccctctacacaagatagagaacattctggtatgaatgtgaacaggagagaagaatccacacatgaccatacgatagaaaggcctgcttttggcattcagaagggagaatttgagcattcagaaacaagagaaggagaaacacaaggtgtagcctttgaacatgagtctccagcagactttcagaacagccaaagtccagttcaagaccaagataagtcacagctttctggacgtgaagagcagagttcagatgctggtctgtttaaagaagaaggcggtctggactttcttgggcggcaagacaccgattacagaagcatggagtaccgtgatgtggatcataggctgccaggaagccagatgtttggctatggccagagcaagtcttttccagagggcaaaactgcccgagatgcccaacgggaccttcaggatcaagattataggaccggcccaagtgaggagaaacccagcaggcttattcgattaagtggggtacctgaagatgccacaaaagaagagattcttaatgcttttcggactcctgatggcatgcctgtaaagaacttgcagttgaaggagtataacacaggttacgactatggctatgtctgcgtggagttttcactcttggaagatgccatcggatgcatggaggccaaccagggaactctaatgatccaggacaaagaagttaccctggagtatgtatcaagcctggatttttggtactgcaaacgatgtaaggcaaacattggtgggcaccgatcttcctgttcattctgcaagaacccaagagaagtgacagaggccaagcaagaattaataacctaccctcagcctcagaaaacatccataccagcaccattggaaaaacagcccaaccagcccctaagaccagctgataaggaacctgaacccaggaagagggaagaaggccaagagtcacgcttaggacatcaaaagagagaagcagaaaggtatctgcctccttctcgaagggaagggccaactttccgaagagaccgagagagggagtcatggtctggagagacacgccaggatggagagagcaaaactatcatgctaaagcgtatctatcgttccacaccacctgaggtgatagtggaagtgctggagccctatgtccgccttactactgccaacgtccgtatcatcaagaacagaacaggccctatggggcatacctatggctttattgacctcgactcccatgcggaagctcttcgtgtggtgaagatcttacagaaccttgatccgccatttagcattgatgggaagatggtagctgtaaacctggccactggaaaacgaagaaatgattctggggaccattctgaccacatgcattactatcagggtaaaaaatatttccgagataggaggggaggtggcagaaattcagactggtcttcagatacaaatcgacaaggacaacagtcatcatctgactgctacatatatgattctgctactggctactattatgaccccttggcaggaacttattatgaccccaatacccagcaagaagtctatgtgccccaggatcctggattacctgaggaagaagagatcaaggaaaaaaaacccaccagtcaaggaaagtcaagtagcaagaaggaaatgtctaaaagagatggcaaggagaaaaaagacagaggagtgacgaggtttcaggaaaatgccagtgaagggaaggcccctgcagaagacgtctttaagaagcccctgcctcctactgtgaagaaggaagagagtccccctccacctaaagtggtaaacccactgatcggcctcttgggtgaatatggaggagacagtgactatgaggaggaagaagaggaggaacagacccctcccccacagccccgcacagcacagccccagaagcgagaggagcaaaccaagaaggagaatgaagaagacaaactcactgactggaataaactggcttgtctgctttgcagaaggcagtttcccaataaagaagttctgatcaaacaccagcagctgtcagacctgcacaagcaaaacctggaaatccaccggaagataaaacagtctgagcaggagctagcctatctggaaaggagagaacgagagggaaagtttaaaggaagaggaaatgatcgcagggaaaagctccagtcttttgactctccagaaaggaaacggattaagtactccagggaaactgacagtgatcgtaaacttgttgataaagaagatatcgacactagcagcaaaggaggctgtgtccaacaggctactggctggaggaaagggacaggcctgggatatggccatcctggattggcttcatcagaggaggctgaaggccggatgaggggccccagtgttggagcctcaggaagaaccagcaaaagacagtccaacgagacttatcgagatgctgttcgaagagtcatgtttgctcgatataaagaactcgattaagaaaggagacaagttccatgggatacaacctccctcttgttttgtttgtctctccttttcttttgttactgttcttgctgctagaacttttttaaataaactttttttcaatgtgaaaaaaaaaaaaaagaaagagtagagatcttaaaagaacacatann

SEQ ID NO: 21693 - DNA, 1380 bp, Homo sapiens; identical to SEQ ID NO: 20118
  misc_feature 1380: n = A,T,C or G

SEQ ID NO: 21694 - DNA, 663 bp, Homo sapiens
gcgtccgcctggcctcccagggacatatcttggcagctggctgtggagcttgcctcctgctgcagtgaggcacctcactgtatcccttcagatgtgggcagcagcttgagtaggacagggcagaacatcttcttgcctgagcctctgcatcctgtgctaaaccgaccatggctgcaagctgcagggtttgtagtttgtgtcctttgtgttatttgtatcatctcacttcacatcagctatgctgcaactcctacagattcgtacagcagtcgaagtgaactgccatctctgattctgtatccctgatggctctgcacagcctagtcttccctggtgggaagagtgtcccttgtccacagaggtggtggggacccacattgcttgtagctcccgtgagcatgcaaagaaggccattaccaggaggaaccgcctctcaggatctgatcttttcttccctctttcttgacttccttctatttctaatggcagtgcttatcttcttctctttgcaggttgtaacctccatttctgacatccccactggtattccagttcacctagagctggccagtatgactaacagggagctcatgagcagcattgtccatcagcaggtctttcccgcggtgacttcccttgggctgaatgaacaggagctgttat

SEQ ID NO: 21695 - DNA, 1211 bp, Homo sapiens; identical to SEQ ID NO: 20419
  misc_feature 1207, 1208, 1209, 1210, 1211: n = A,T,C or G

SEQ ID NO: 21696 - DNA, 1001 bp, Homo sapiens; identical to SEQ ID NO: 21314
  misc_feature 681, 682, 683, 684, 685, 686, 687, 688, 689, 690, 691, 692,693, 694, 695, 696, 697, 698, 699, 700, 701, 702, 703, 704,705, 706, 707, 708, 709, 710, 711, 712, 713, 714, 715, 716,717, 718: n = A,T,C or G

SEQ ID NO: 21697 - DNA, 2538 bp, Homo sapiens; identical to SEQ ID NO: 20316
  misc_feature 2538: n = A,T,C or G

SEQ ID NO: 21698 - DNA, 2389 bp, Homo sapiens
  misc_feature 2382, 2383, 2384, 2385, 2386, 2387, 2388, 2389: n = A,T,C or G
ccacgcgtccggccttccgaaatagaaacaaagttggtcacaaatcacattagctttgcccgaagtttttccccacactcttctttagcatgctattatggggaaagtgaccactcctgggagcgggggtggtcggggcggtttggtggcggggaagcggctgtaacttctacgtgaccatggtacctgttgaaaacaccgagggccccagtctgctgaaccagaaggggacagccgtggagacggagggcagcggcagccggcatcctccctgggcgagaggctgcggcatgtttaccttcctgtcatctgtcactgctgctgtcagtggcctcctggtgggttatgaacttgggatcatctctggggctcttcttcagatcaaaaccttattagccctgagctgccatgagcaggaaatggttgtgagctccctcgtcattggagccctccttgcctcactcaccggaggggtcctgatagacagatatggaagaaggacagcaatcatcttgtcatcctgcctgcttggactcggaagcttagtcttgatcctcagtttatcctacacggttcttatagtgggacgcattgccataggggtctccatctccctctcttccattgccacttgtgtttacatcgcagagattgctcctcaacacagaagaggccttcttgtgtcactgaatgagctgatgattgtcatcggcattctttctgcctatatttcaaattacgcatttgccaatgttttccatggctggaagtacatgtttggtcttgtgattcccttgggagttttgcaagcaattgcaatgtattttcttcctccaagccctcggtttctggtgatgaaaggacaagagggagctgctagcaaggttcttggaaggttaagagcactctcagatacaactgaggaactcactgtgatcaaatcctccctgaaagatgaatatcagtacagtttttgggatctgtttcgttcaaaagacaacatgcggacccgaataatgataggactaacactagtattttttgtacaaatcactggccaaccaaacatattgttctatgcatcaactgttttgaagtcagttggatttcaaagcaatgaggcagctagcctcgcctccactggggttggagtcgtcaaggtcattagcaccatccctgccactcttcttgtagaccatgtcggcagcaaaacattcctctgcattggctcctctgtgatggcagcttcgttggtgaccatgggcatcgtaaatctcaacatccacatgaacttcacccatatctgcagaagccacaattctatcaaccagtccttggatgagtctgtgatttatggaccaggaaacctgtcaaccaacaacaatactctcagagaccacttcaaagggatttcttcccatagcagaagctcactcatgcccctgagaaatgatgtggataagagaggggagacgacctcagcatccttgctaaatgctggattaagccacactgaataccagatagtcacagaccctggggacgtcccagcttttttgaaatggctgtccttagccagcttgcttgtttatgttgctgctttttcaattggtctaggaccaatgccctggctggtgctcagcgagatctttcctggtgggatcagaggacgagccatggctttaacttctagcatgaactggggcatcaatctcctcatctcgctgacatttttgactgtaactgatcttattggcctgccatgggtgtgctttatatatacaatcatgagtctagcatccctgctttttgttgttatgtttatacctgagacaaagggatgctctttggaacaaatatcaatggagctagcaaaagtgaactatgtgaaaaacaacatttgttttatgagtcatcaccaagaagaattagtgccaaaacagcctcaaaaaagaaaaccccaggagcagctcttggagtgtaacaagctgtgtggtaggggccaatccaggcagctttctccagagacctaatggcctcaacaccttctgaacgtggatagtgccagaacacttaggagggtgtctttggaccaatgcatagttgcgactcctgtgctctcttttcagtgtcatggaactggttttgaagagacactctgaaatgataaagacagcctttaatccccctcctccccagaaggaacctcaaaaggtagatgaggtacaaggtcctaagtgatctctttttctgagcaggatatcaggttaaaaaaaaaaagttactggctggtttaatactttctaccttcttacagagcagcctttgaatagactatgtcctagtgaagacatcaacctccgccttaagctatgtatgtannnnnnnn

SEQ ID NO: 21699 - DNA, 781 bp, Homo sapiens
  misc_feature 625: n = A,T,C or G
gcgtccggtgcaatcgactgttaagtggtgtcctgccccagattgccaccatgttgttaaagtccaatatcctgatgctaaacctgttcgctgcaaatgtgggcgccaattttgctttaactgtggagaaaattggcatgatcctgttaaatgtaaggtgagtttgtctgacatttcaatttttaaataatggcacacttctaagacttagtgactaaaaatcatagctgatgattttgttatctatctattgatagattttttttttatccttttaatttcagatgatcattacatgtattcagaggtaattccttaggataagccaagtcagctcctgattgttattaggataaccatggctaaggcacctctttgtcaggctttgtaattaggggaatacacaccttgcagttgggcttctcttcaagctctaggttccccactcagcttctgccaaagaaaatcctgctttggttgattttatatatactggacattgtagctatgggacttccctggcttaagaggatgtgagcctagtgataatcttattcattggcttttacatttaagcttgaccatagttaagtgctaaagtaatttgctatttttaaaagtcttntgttgtatcctaaccgttgttattttcaaacagtggttaaagaaatggattaaaaagtgtgatgatgacagtgaaacctccaattggattgcagccaacacaaaggttggtgttttccttcagtaactcttggtaataaaaatgataaggattggt

SEQ ID NO: 21700 - DNA, 1716 bp, Homo sapiens
  misc_feature 1694, 1695, 1696, 1697, 1698, 1699, 1700, 1701, 1702, 1703,1704, 1705, 1706, 1707, 1708, 1709, 1710, 1711, 1712, 1713,1714, 1715, 1716: n = A,T,C or G
acgcggggagagcgagcttcggagaagcagtggtgggttccatgtggtggtggagtaggaggcaggtctccgcggtggtttccacaagaaaaatggcacaatgtttctcagaagacaattacataagaatcagcatactttagattcacagcaaataatcagacaattgatgaaaatacttacccaaacactaattgtagactgtgccttctgaatatgtttgtcataaacttggagtaaggaatcctcacaggcactggacaattcaaaaaacgtaaagttgtttgttagaatactggtgcttttggatagaaaccctcatccatatcctggtaaggcttgaagttgcacaggagttttcatttgtcaaaacccagaaaaccataagctttagatttgggaattttatattgcattatatgtgacctttctttttaaaaaatgagctgtaagcagtctcccagacagtagctcagcctccagaactctctttctgcatagttgaagacccctcttcacacaagatggtagcaacaaatcataggtgcaattgcaccaaattcacagaagatcaattgaaaatcctcatcaataccttcactcaaaaaccttacccaggttatgctaccaaacaaaaacttgctttagcaatcaatgcagaagagtccagaatccagatttggtttcagaatcaaagagctaggcatggattccagaaaacaccagaacctgactttagatttaagccacagccatggacaagattaacctggtgtggagtttcaaaatagagaagccagatggtgttgtaccacctatagcacctttcaattacacacagtcatccatgcatttatgaaaaacccataccctgggattgattccggagaacaacttgctgaagaaattggtgcttcagagtcaagagtccaaatttggttccaaaatcaaagatctagatttcatctccagagaaaaagagaacctgttatgtccttagaatgagaagaccagagaagaccaggggcaaggtttctgagggacttcaaggtacagaagatacacaaagtggcaccagcctcactagcactctcatttctcaagagccagaacatggtgaatacagtcaagttcagtgtatttgataatatcaatttgggccccaaatctctctcacagtcttcctgggagtctattcttcttccaaaagtgcaagctaagccttctgaagatggtaaagaacttggccgggtgtggtggctcatgcctgtattccccagcacttttaggaggctgaggctggaagattgcttgagcctaggagtttgaaacccagtctgggcaacatagtaagaccctgtctctaattctaaaaaacaaaataagtaaaaaggactgtaggaggccaagacaggtacaggaggcaccacactaccctgttgacacagcctggatccagagttcagcagaccttgagacaatgaaaacaaacttagtaataatcatttttcaatcattgcagtaattattgatttggacaaaaatcaattgatgtcaaaaccttaaagtgacgtttctctgcctatggagtggtcattcttttattcctttagtttcataataaattttcttttacttaaaaaaaaaaaaaaaaagtgcggctgctcccacttcagattggtaacagccgcacnnnnnnnnnnnnnnnnnnnnnnn

SEQ ID NO: 21701 - DNA, 728 bp, Homo sapiens
  misc_feature 1, 2, 727, 728: n = A,T,C or G
nncgtccgcaacagtggaaactcaaagcagacaaaattgttgtacctcaaggtgagttgtcgtagtcatataattcctttgcttgtaactgcccaataaatggatgaggactcacttcacccataaataagaaaggtgaacagcacatggggcctgtagatgccttttgcagggccctctttttctcttcctaaagttgcaatttgagtatttctctagatgggcacatcatagaaactgtcgtcctagatcagagcctggggagagagatacaggtgtcatgcttacatctgcagagtgggaacaagcccagaaaaatcaagatgattaagcagagagcttccatactggagataaaccagctgtgtaaaaaatcattgcaccaaaaaagcattgcaccatcgacataactgctttaactaagaagtaaaggaactgatgccccagcagagcacagagagccacagagacaggagctgcatttcaaacaaggtcattgctgttgtccccaccctgagttaagtatctctgcttcacccttccttaccaaagttctgcttgatcatccttttgttttgttttcttttttctgcacttcacttctttgagaaaatataaaccaaaaccttacataaaacaggaattgagcttttgacaatgttagctcttgaaacaaccgaacaaaaaggtttctattatttctcatctctgtgctacccagtacccnn

SEQ ID NO: 21702 - DNA, 395 bp, Homo sapiens; identical to SEQ ID NO: 20498

SEQ ID NO: 21703 - DNA, 2187 bp, Homo sapiens; identical to SEQ ID NO: 21516

SEQ ID NO: 21704 - DNA, 492 bp, Homo sapiens
accaatgactgagcagacataaaagtcagcctggatggctaccaccactaatcagatttgtctgctgatgcaaggcccttcagtcattccagaactggtaaacggagtcaccctgaggacaggccctgctgctgattgatgtccagtgtgggcagctctcttggctgctcaacattcagagaggctctccttgtttcagtgctaaatgattgacagtcaggcattcagattcaaggaagaaacagtttctctggagaattttgttccttagtgactgatttcagttgatttcaagataccacagactgggaaatttatgaagaaaagaaatttatttggcttatggttctggaggatggacagtccaaggtcatgacacttggatctgttcggccatctggtgaagaccttgttgcattctcccatggtggaaagaagaaagcaagcaatctgtcaagatctcatagattaagggctcctacagcaacctgt

SEQ ID NO: 21705 - DNA, 802 bp, Homo sapiens; identical to SEQ ID NO: 21464

SEQ ID NO: 21706 - DNA, 2841 bp, Homo sapiens; identical to SEQ ID NO: 21617

SEQ ID NO: 21707 - DNA, 414 bp, Homo sapiens
actttgggaggctgaggcaggtgaatcatctgagggcaggacttcgagaccagcctgcctaacacggtgaaacctcatctccactaaaaatacaaaaaaattagccaggcgtgctggcaagcacctataatcccagctaatttcttctagttttaatagtccaagcttcgggagaaaagatagttttagcataggtagatgaaaggaaaaattattttcttaaagatgttgacactcactgggaagctgattttcctttagacaaattcaactgaagagatgttgaagagtacgcgggggtcagaagctggaggagttgaaggcagaggagccagataacttcagcagcaaagtagtgcagaggggccgagagttctttgacagcaacgggaacttcctgtacctgcccgggcg

SEQ ID NO: 21708 - DNA, 2538 bp, Homo sapiens; identical to SEQ ID NO: 20316
  misc_feature 2538: n = A,T,C or G

SEQ ID NO: 21709 - DNA, 372 bp, Homo sapiens
  misc_feature 370, 371, 372: n = A,T,C or G
acgcgggggcttccttccagtaaggagtcggggtcttcctcagttttctcagccaggcggcggcggcgactggcaatgtttggcctcaaaagaaacccgccaagggtgggttggaaaccgaaacgagtcagtgttgaaacgtgtctcatcctattcctgaagccagaatattctggccatgagtcattgtttccgcccatcttgattcttttggaaatggcagctcttgttcaaagaccggaaagggtgggatgtcaatttcaagtggggtcaacctgagttctgtaaatcccagtagcgattttcccgccgcgggtgggtaggcgaatcttgcgccggtttatacaaaggaggccgtgaggacctgcannn

SEQ ID NO: 21710 - DNA, 1270 bp, Homo sapiens
  misc_feature 1, 2, 3, 4, 5, 6, 1263, 1264, 1265, 1266, 1267, 1268, 1269,1270: n = A,T,C or G
nnnnnngaggtaagggttctgatgtgaaaagctgagggtgtgatgaggacaagtggcagaaagttcacctggcttggtggaagggaaggtcagagaagacctcttagaggactcagtaatgtccattgaggattttaggttgaagggaatgtttgaagtttgagggcccttttgaggaccaccaagaacttcactgtgctgtaggatattgagcaggaggtgaagctagagagatgtgtaggccacattgcagagtttgaacttggggcaatgggaagccattgaagggttttaaacaacccaagtggtgcattcttctgtaaatgttagagagatcagtggctgccctgcacatcaaaggggagaacgattggagacaggcagattagatggaaggacggagttgtactccaagccaaagatgatggagagtgaattaagttagtgcaatgggaccaagtctagagctatttagaagtgagaagtgacacggaaaaaaaaaaagattgattggatgtagaacaagttggataagaatccaggacaaccccaggtgtcaggctggggcagctaggtaggtgctattgccatataaagtgttaaaaaagaatagagaaggggctagttgtcgggggaaggagttcagttttagacatgttgaactgcaaggagatttgatactataattaaggaatgtgttttaataaatttaataaacaatgaacacacattattcgcatttcccaaacaatttggatggtagatcaaaaagaatgagagtgaaaataaggggtctgtgaccactcaattaagattgagctaagagcaaggtcaagttcaaacccactataagcttcttgcatccatggtcactgactgttttcttactgttagctgtcctgttggacagtgtaacagtgagagagcatatacagattagcattgaaaaggataaagtgacatgtgtaagggttttgaaaaagtattatacaaatgcaaggcagatatattgaaataaatgcttattggcaaaatttcaggccagataggttggagtagtgcttcacaaactataatgtgcacatgaacaactcagggattttgttcaagtgttgatttcaattctgtagctggagttgggtggggtagaaaggatatctgagatcctgcatttctaataagctcccaggtaatgttgagtctgtaggtccttgaaccacactttaagtattaaagggttagaaagcttatactgtaactgannnnnnnn

SEQ ID NO: 21711 - DNA, 1290 bp, Homo sapiens; identical to SEQ ID NO: 20742
  misc_feature 1, 2, 1281, 1282, 1283, 1284, 1285, 1286, 1287, 1288, 1289,1290: n = A,T,C or G

SEQ ID NO: 21712 - DNA, 385 bp, Homo sapiens
  misc_feature 384, 385: n = A,T,C or G
cgtactttcccgtgtggaggcgcgcccagtcaccttgttgcggtagcctcaaggtgaggaatcgagacccaccaagtatgatgaataaacccagactctcagcaatgcaggaaaggaacaaacgggcagcttgggaaaagggggctcacataccacagcgactaggtaaacctctacacagaccaagattttgatagtttacctgtgcaaattacagttccggagaaaatacggtcactaataaaggagggaattgaatcgcaggcatcctacaacattgtaattgaagggaaaccatatactgtgaatttaatgcaaaagtaggtaatcatcattattttatcaattctctttgttctacttataatttttgcttgaaattgnn

SEQ ID NO: 21713 - DNA, 981 bp, Homo sapiens; identical to SEQ ID NO: 21549
  misc_feature 1, 906, 981: n = A,T,C or G

SEQ ID NO: 21714 - DNA, 388 bp, Homo sapiens; identical to SEQ ID NO: 20723

SEQ ID NO: 21715 - DNA, 4740 bp, Homo sapiens
  misc_feature 4537, 4538, 4539, 4540, 4542, 4543, 4544, 4546, 4547, 4548,4549, 4550, 4552, 4554, 4556, 4557, 4558, 4559, 4560, 4561,4563, 4564, 4565, 4574, 4575, 4599, 4603, 4608, 4616, 4617,4623, 4624, 4638, 4643, 4644, 4650, 4659, 4662, 4673: n = A,T,C or G
  misc_feature 4678, 4687, 4693, 4694, 4695, 4696, 4698, 4699, 4701, 4702,4712, 4714, 4715, 4717, 4721, 4729, 4730, 4731, 4732, 4733,4734, 4735, 4736, 4737, 4738, 4739, 4740: n = A,T,C or G
agggagtcacccacgcgtccgcggagagcggagacgctgggcgaggctaggtacgaggcccgagcggggttcgggctggttgttccgttgcgagctgcagctgcgatctctgtggtaggcccagaagtgtatgctgacttgtaaagtgaagaagccagtggtgctgcgggtgttcttttggggtagtgtctgggatccagtacgagttgaatcattgttcaaataaggtgtaattgaaaagtgatcctctcttcagagatgtcaaaaacaaacaaatccaagtctggatctcgctcttctcgctcaagatctgcatcaagatctcgttctcgttcattttcgaagtctcggtcccgaagccgatctctctctcgttcaaggaagcgcaggctgagttctaggtctcgttccagatcatattctccagctcataacagagaaagaaaccacccaagagtatatcagaatcgggatttccgaggtcacaacagaggctatagaaggccctattatttccgtgggcgtaacagaggcttttatccatggggccaatataaccgaggaggctatggaaactaccgctcaaattggcagaattaccggcaagcatacagtcctcgtcgaggccgttcaagatcccggtccccaaagagaaggtccccttcaccaaggtccaggagccattctagaaactctgataagtcgtcttctgaccggtcaaggcgctcctcatcctcccgttcttcctccaaccatagccgagttgaatcttctaagcgcaagtctgcaaaggagaaaaagtcctcttctaaggatagccggccatctcaggctgccggggataaccagggagatgaggtcaaggagcagacattctctggaggcacctctcaagatacaaaagcatctgagagctcgaagccatggccagatgccacctacggcactggttctgcatcacgggcctcagcagtttctgagctgagtcctcgggagcgaagcccagctctcaaaagccccctccagtctgtggtggtgaggcggcggtcaccccgtcctagccccgtgccaaaacctagtcctccactttccagcacatcccagatgggctcaactctgccgagtggtgccgggtatcagtctgggacacaccaaggtcagttcgaccatggttctgggtccctgagtccatccaaaaagagccctgtgggtaagagtccaccatccactggctccacatatggctcatctcagaaggaggagagtgctgcttcaggaggagcagcctatacaaagaggtatctagaagagcagaagacagagaatggaaaagataaggaacagaaacaaacaaataccgataaagaaaaaataaaagagaaagggagcttctctgacacaggcttgggtgatggaaaaatgaaatctgattcttttgctcccaaaactgattctgagaagccttttcggggcagtcagtctcccaaaaggtataagctccgagatgactttgagaagaagatggctgacttccacaaggaggagatggatgatcaagataaggacaaagctaagggaagaaaggaatctgagtttgatgatgaacccaaatttatgtctaaagtcataggtgcaaacaaaaaccaggaggaggagaagtcaggcaaatgggagggcctggtatatgcacctccagggaaggaaaagcagagaaaaacagaggagctggaggaggagtctttcccagagagatccaaaaaggaagatcggggcaagagaagcgaaggtgggcacaggggctttgtgcctgagaagaatttccgagtgactgcttataaagcagtccaggagaaaagctcatcacctcccccaagaaagacctctgagagccgagacaagctgggagcgaaaggagattttcccacaggaaagtcttccttttccattactcgagaggcacaggtcaatgtccggatggactcttttgatgaggacctcgcacgacccagtggcttattggctcaggaacgcaagctttgccgagatctagtccatagcaacaaaaaggaacaggagtttcgttccattttccagcacatacaatcagctcagtctcagcgtagcccctcagaactgtttgcccaacatatagtgaccattgttcaccatgttaaagagcatcactttgggtcctcaggaatgacattacatgaacgctttactaaatacctaaagagaggaactgagcaggaggcagccaaaaacaagaaaagcccagagatacacaggagaatagacatttcccccagtacattcagaaaacatggtttggctcatgatgaaatgaaaagtccccgggaacctggctacaaggctgagggaaaatacaaagatgatcctgttgatctccgccttgatattgaacgtcgtaaaaaacataaggagagagatcttaaacgaggtaaatcgagagaatcagtggattcccgagactccagtcactcaagggaaaggtcagctgaaaaaacagagaaaactcataaaggatcaaagaaacagaagaagcatcggagagcaagagacaggtccagatcctcctcctcttcctcccagtcatctcactcctacaaagcagaagagtacactgaagagacagaggaaagagaggagagcaccacgggctttgacaaatcaagactggggaccaaagactttgtgggtccaagtgaaagaggaggtggcagagctcgaggaacctttcagtttcgagccagaggaagaggctggggcagaggcaactactctgggaacaataacaacaacagcaacaacgattttcaaaaaagaaaccgggaagaggagtgggacccagagtacacacccaaaagcaagaagtattacttgcatgatgaccgtgaaggcgaaggcagtgacaagtgggtgagccggggccggggccgaggagcctttcctcggggtcggggccggttcatgttccggaaatcaagtaccagccccaagtgggcccatgacaagttcagtggggaggaaggggagattgaagacgacgagagtgggacagagaaccgagaagagaaggacaatatacagcccacaaccgagtaggggccacccttgacgggattcctgcccaggggagagaggcgctgggaagatggctggtgaggagcttaacagaggaacctcaagaagattctgaaaatcctacccccaccccccaccagccgcacagattgtactaccgcgagaggcatccctggcgctgtctcccactggacagaggaggctggccatggggcccaggggtcaggcccagcttttgagcagaatacaacgcattgggctttagctgtttttctcatttgttggtgtgtggggtgggggcaggggtagggcgggagagcgatgcttggatttttgtttcctattagaaaccaacagttttgttctaatttcatttcatttggagctaagatgactaatttgatgattttcgatctcttttcccctgtcctgattttaaaagccccctctttttttttttttttttctttttttaggcatatgtagtaatattagaaacatttaatttgggaaactttgattcttgaaagagaaaacaaaagcatgtgaataaactttgaagtgttcacctcagtttgggaccaaactgcttggatctttgtaaaaaccggttttgtatgtcaaggaggagtttaaggcctttccgaccaccttgtgttccccttttctgcgcagccatgtatcacgtggagttgctccttaccacacctcacgtgcccctgagccctatttcctgatttcttctgggctggacttccccgttctccaccagcagctccagtatcccaaactttctagtcctgctgatcctcccagcaacggggtggaaactggagggcagtgtctggtctgttttctaagaaacttatgaattctattatctttacaaatatgagaaaattttttcaatattttttattaatctttttataaaatgaaaagaaactcctatgatcgattaaggaaggtggttatggctgggtggttcaggggtttttttgggtttctttttttttttctttgtctttttaaccttaagctgtttaagttgaagcattctcagatgtttggggggaaacatcctcttaaaatgggtccttgtgcttgccttctggggaggcggtcctgagcaggtgaatcataaggcatttatgcatatgttatatgcggactgcacccacctctcccccccagcctttgcctcttgggttgttgtgctgctttccccttactttgctacatttctatagttaagttggttttacttgaatgattcatgtttagggggaaaatgaaaatctcccttaaaatttgtttcaactcctcctgcaaataaaataaatgaagtggcagatgtaaaaaaaaaaaaaacgcagcaacacccccaacacatcacatcgacacctcgcacaacacacaagcccaaaacgcnnnncnnnannnnncncncnnnnnncnnncaaacaaannacccccgggggggggcccccgggncacnaattnccccccanngggggnnggaaaaaaaccccnggggnnggttanaaaccgggnccnggggaaccccnggggngcccccaanaacccnnnnanncnncccccttcgncnncnggcnaaaacgannnnnnnnnnnn

SEQ ID NO: 21716 - DNA, 731 bp, Homo sapiens; identical to SEQ ID NO: 20529
  misc_feature 1, 2, 3, 4: n = A,T,C or G

SEQ ID NO: 21717 - DNA, 341 bp, Homo sapiens
ccacacaacctttccccaaatatggcccaagcttctactttggggggattaagatttatctagaagaaatgcatttgccaagaccaagaaagatgaaatattcaacttcttgactttcggaaaataagatactgcatcaaaacaagagctctgcaaatcaaattatgttgagaacagattgcataaaacttttacccctttatcctctctttcccatctctgccgagctaaattgtattagttatacataaagaccacctaggagaaagaagatgagctttctgcccatttttgatattagaatagttgtgcggaaaattaaagagaagaaaagaaagaaa

SEQ ID NO: 21718 - DNA, 515 bp, Homo sapiens; identical to SEQ ID NO: 20177

SEQ ID NO: 21719 - DNA, 1074 bp, Homo sapiens
  misc_feature 1, 1018, 1037, 1040, 1073, 1074: n = A,T,C or G
naaccaggagtttggcgtgaccatggtgagagaagacggtccaagaagggacgttatcaggccactttttgggtggagaaggaggtagtcagaccgtggccaaatttccttcacattatcctagcatattttcattctggtcttagctcttaaacttctccaagcggtgactgttatgctttacagagtggggaagagggtctgggttatttgaggcaagaagggaaggcaatagacaagagaaaagaagagactttaaaagatgccgtgtgtttccaacttttttaattctaaaatttctgtttcaaggggaagcaaaagaaaacaaggaagtatgcgaccatgaagcgaatgcttagtctcagagatcagaggctgtgagtgtctggaatcaactgcccagggatattctaataagagtctagagaggataagtagtaaaaatgtttgttgttattattttgttttttgcttattatcgtgtcttagatttatatagcatgagatagccagtgtttaacagtaatttagctgctgagcgatcacactgggaaaggcgttgggaattaaacatttcttaagtgttcactttttctaccgttatatgctttgtctgccatatcgcatttaaacctcatgtcagttcggtgaagtccgtatagttctctttatgtttttaccattacactactacattcccctggggtggggcgaaggggagtgtttcttgttgaaagatggcaaggttagagaccttgtttggctggcgtttccagtgccctggtactcaaatatttttgtcagagaaaatgggaaaactccaagatatctccattttataagtcttactaatataagaatccaaatcactgtggaagaagaaagtgaagtgaaattccctagtatgaagaggatcaaagcggtgtccctgcttaagtgtagaataagcatagctattcaaataaaagactgatcttcactgagtttaagagtctcagaaagccgggcgcagtggctncacgcctgttattcccagncanttgggaggctgaggcgggtggatcacctgaggnn

SEQ ID NO: 21720 - DNA, 2538 bp, Homo sapiens; identical to SEQ ID NO: 20316
  misc_feature 2538: n = A,T,C or G

SEQ ID NO: 21721 - DNA, 826 bp, Homo sapiens
tatagggagtcgacccacgcgtccgataccattctagatgcataggagataagttaattattagggtttaattctttggaggaactagttgagaatgattgtaaaactgttctaactggatgttctcatatagcatcagtgaagactttctcattgattaactatttattagctggtatttaacagtcctttgtaaatagtaattggtcttttgacagatgttcagttttataagtagactcacatgtttatgtttcctgtgacaaatgacagttaacaacatatcaaagagtataatgttgttcttcagactgggcatctatctatacagtagaatgaaaaggaagaaataggtaacagaaaataatgaaaagaaggccttgatgcttctgaagaagttatgttaactttgaatgcttctctagcactaactttattaatgagtcccactggttctgaatgacctggtgtgttgtcagtgtgtcagaagacctctatgtgagaacagtcatttggaatatctatatatactatttggcttacttttacaagttttacctatgtaaaattaatattgaaagggagcacctgattacctattagaaagaaaaattacaatttccctcagctggtcacaatctgaggcatgtgaagcaatgtggaataatgttaaaatcttgtatttaaagacggaaaacctggatataagcccttacctcaccacttaataattcggacaagttacttaaaatttaagcttcagttctcatctataaaatggaaataataattatcctgtatctcacaacagattattatttttagt

SEQ ID NO: 21722 - DNA, 1211 bp, Homo sapiens; identical to SEQ ID NO: 20419
  misc_feature 1207, 1208, 1209, 1210, 1211: n = A,T,C or G

SEQ ID NO: 21723 - DNA, 2187 bp, Homo sapiens; identical to SEQ ID NO: 21516

SEQ ID NO: 21724 - DNA, 516 bp, Homo sapiens; identical to SEQ ID NO: 21320

SEQ ID NO: 21725 - DNA, 386 bp, Homo sapiens
  misc_feature 383, 384, 385, 386: n = A,T,C or G
acttttttttttttttttttaaagaatcagaacaggcttaataggaactttgaattttaatccttctattcatctgttatagattattttccctagtgatttctgtattaataaaacttaaacatggcaagttttttctaataagcaaaataaccaacagcttaatatatttgtattaaactctaacagtgcactaactttaaatgttgaaatagattacacattttagggcctaatgggcagaatatttgggctacaatagaccataggattttgttgaagcaaataacaaaatgatgatttatcattttaatgcaaactcaattttattgtttaatgggaatttaatttttgtctttgggaaatctttttgagtagctgannnn

SEQ ID NO: 21726 - DNA, 1344 bp, Homo sapiens
  misc_feature 1: n = A,T,C or G
nacgcggggaaaaaagaagggcacatgagcaaacatgatggcccctttatgagaggtaatttactgaaatgcacagcgattacctgctcacccagccctgatgtaattaaaaatggcaggctaggggctctgtttcccccggctctggcagagaaacctgggtttcgacttgtgaagcttgaggttggatgtgggaattggcttggagtcataggcgatgagagggacattaggatattatgaagcccgtgaactcaactcctgagaaggacacagcagagcgagagaaaagatggaataaaaaggcctacctcattgggctcgtgtgggtgaggagaactgaagagtctgagagcgcggcacgagccagaggctacggaaaacactgccctcctacactccaccttggagagacccagaaaagaacaagcttcatttgtaaaaaaggaaaacaactcaggcaatgggggtggcttaaaggcactctacagtgtgcagatgccttccacttcttccatctgccctgtctctccaagaacccctatggccccggtctcagaacagagctgagtgcagaaatgaaaatctatggctctgtgttccaaaacgatgaagaatttcaagatggtggcagtggtaaaatccttctccaggaaaaatctgtccttggcccaatgtgtaaacacttgctgaggaacttggaataacttgcagtgtcttgcagtattgtgaaaccagcaacttgttcacaattcttctgaatttcttgggaaatttgaagtggagtacctgtaccaacatgaaatgacacgaatttaagtgacgctcaacaacgaaaagcaaaaagaaccaaagaggaagcaactgaaacaacatctggatgtatttaaaaatatacaatgcctccaaaatcaggtgtcattaatgaaaattctgaagaaatgccaccggacatagccaacgcacctacgctgttgttattcatttcctgcttttcacagaaaacaattttgttgcatggaagatcgtgaacttcaaagggcagaggggaaactgtcccttggcctctacccctccaaggccccactttttcatcaacactccttggacgcagcagaagtatgaacataatatggtcctgaatgaggctgagtctttgggcgcagaagacccgggttaataaaaataggaaggtggtgtgaagaccagaaaggaggctgttgcactagttcaggaagagaagaggaggtgggcgacagaagtagaggcagcgctctgagggaccttgggcaggtggaagccacaaaactggatggccatgagggcaaggaggcacctgttgaa

SEQ ID NO: 21727 - DNA, 2538 bp, Homo sapiens; identical to SEQ ID NO: 20316
  misc_feature 2538: n = A,T,C or G

SEQ ID NO: 21728 - DNA, 1365 bp, Homo sapiens; identical to SEQ ID NO: 20708
  misc_feature 1348: n = A,T,C or G

SEQ ID NO: 21729 - DNA, 2538 bp, Homo sapiens; identical to SEQ ID NO: 20316
  misc_feature 2538: n = A,T,C or G

SEQ ID NO: 21730 - DNA, 966 bp, Homo sapiens
  misc_feature 966: n = A,T,C or G
gggagtcgacccacgcgtccggttgactatgtggcttggacatttacatttcttaggttgcctgtatctaacctagcatttctgaccattttatgtttgcaaaacagttagatgtgtttctgccatagaacaggtgacttctggttctgacttacgtattagtctccttttttttcctccctaatctttcttttttctaacttaaaatcaaccccaggggcctcagagagcaattcatgcttaggccatgacacatgcttaagatctgtttttgtcacttaatgttgtttccatattgcaggctaggaactctgaagccagggatagctcagcaccatcattttcttttctaggttctagcaagaggagaagaaaggaggaaaccacagggaaaaatgttaagaagacacagcatgaattagatcacaatggtctcgttcccttacccgtcaaagtctgcttcacgtgttacaggagttgccgtgtggctcctctcatccagtgtgactattgccctctcctgtttcacatggattgcctcgagccgccgctcactgccatgcccctgggcagatggatgtgtccgaatcacatcgaacatgtggtgctgaaccagaagaatatgacactgagcaatcggtgccaggtgtttgatcgtttccaggacaccgtttcgcagcatgtcgtcaaagtggacttcctgaaccgaatccacaagaagcacccccctaaccggcgtgtgctccagtcggtcaaaagaagaagcttgaaggttcctgatgctataaaatctaaggtgcaggcaagatggtagtctgcctgccatcatgggttagacagaggatcactgtcccaattttacaggcagggaaactgaagccccaaaataggtttgtggtgtctcgtgagaatgagtgtgaccttcattttaatacttggggatgatggtcaggattatgagggccn

SEQ ID NO: 21731 - DNA, 2725 bp, Homo sapiens
acgcggggactcgcgtcggttggcgactcccggacgtaggtagtttgttgggccgggttctgaggccttgcttctctttacttttccactctaggccacgatgccgcagtacgcgggggggtgaagaaggggccggccttcaagcaacagcgacgcaagatggcagccaccacgggctcgggagtaaaagtccctcgcaatttccgactgttggaagaactcgaagaaggccagaaaggagtaggagatggcacagttagctggggtctagaagatgacgaagacatgacacttacaagatggacagggatgataattgggcctccaagaacaatttatgaaaaccgaatatacagccttaaaatagaatgtggacctaaatacccagaagcacccccctttgtaagatttgtaacaaaaattaatatgaatggagtaaatagttctaatggagtggtggacccaagagccatatcagtgctagcaaaatggcagaattcatatagcatcaaagttgtcctgcaagagcttcggcgcctaatgatgtctaaagaaaatatgaaactccctcagccgcccgaaggacagtgttacagcaattaatcaaaaagaaaaaccacaggcccttccccttccccccaattcgatttaatcagtcttcattttccacagtagtaaattttctagatacgtcttgtagacctcaaagtacggggggaaaatccacaagacagaatagccagatctcagaggagcctggctaagcaaaaccctgcagaacggctgcctaatttacagcaaccatgagtacaaatggtgatgatcatcaggtcaaggatagtctggagcaattgagatgtcactttacatgggagttatccattgatgacgatgaaatgcctgatttagaaaacagagtcttggatcagattgaattcctagacaccaaatacagtgtgggaatacacaacctactagcctatgtgaaacacctgaaaggccagaatgaggaagccctgaagagcttaaaagaagctgaaaacttaatgcaggaagaacatgacaaccaagcaaatgtgaggagtctggtgacctggggcaactttgcctggatgtattaccacatgggcagactggcagaagcccagacttacctggacaaggtggagaacatttgcaagaagctttcaaatcccttccgctatagaatggagtgtccagaaatagactgtgaggaaggatgggccttgctgaagtgtggaggaaagaattatgaacgggccaaggcctgctttgaaaaggtgcttgaagtggaccctgaaaaccctgaatccagcgctgggtatgcgatctctgcctatcgcctggatggctttaaattagccacaaaaaatcacaagccattttctttgcttcccctaaggcaggctgtccgcttaaatccagacaatggatatattaaggttctccttgccctgaagcttcaggatgaaggacaggaagctgaaggagaaaagtacattgaagaagctctagccaacatgtcctcacagacctatgtctttcgatatgcagccaagttttaccgaagaaaaggctctgtggataaagctcttgagttattaaaaaaggccttgcaggaaacacccacttctgtcttactgcatcaccagatagggctttgctacaaggcacaaatgatccaaatcaaggaggctacaaaagggcagcctagagggcaaaacagagaaaagctagacaaaatgataagatcagccatatttcattttgaatctgcagtggaaaaaaagcccacatttgaggtggctcatctagacctggcaagaatgtatatagaagcaggcaatcacagaaaagctgaagagaattttcaaaaattgttatgcatgaaaccagtggtagaagaaacaatgcaagacatacatttccactatggtcggtttcaggaatttcaaaagaaatctgacgtcaatgcaattatccattatttaaaagctataaaaatagaacaggcatcattaacaagggataaaagtatcaattctttgaagaaattggttttaaggaaacttcggagaaaggcattagatctggaaagcttgagcctccttgggttcgtctacaaattggaaggaaatatgaatgaagccctggagtactatgagcgggccctgagactggctgctgactttgagaactctgtgagacaaggtccttaggcacccagatatcagccactttcacatttcatttcattttatgctaacatttactaatcatcttttctgcttactgttttcagaaacattataattcactgtaatgatgtaattcttgaataataaatctgacaaaatattagttgtgttcaacaattagtgaaacagaatgtgtgtatgcatgtaagaaagagaaatcatttgtatgagtgctatgtagtagagaaaaaatgttagttaactttgtaggaaataaaacattggacttacacgaaatgtttaattcattcattttattgtgaaataaaaataaaatccttagctcctccaccaactgaacagaccctcttggccaaggagaccccagaaaccttaaaaactaagtttcccaaccatgacaagatgagagatcattcacacctcattatattccctcccttgctaactgccattggactttttccactgagttaaacagaaaccca

SEQ ID NO: 21732 - DNA, 672 bp, Homo sapiens
  misc_feature 1, 2, 65, 66, 67, 68, 69, 70, 71, 72, 73, 74, 75, 76, 77,78, 79, 80, 81, 82, 83, 84, 85, 86, 87, 88, 89, 90, 91,92, 93, 94, 95, 96, 97, 98, 99, 100, 101, 670, 671, 672: n = A,T,C or G
nnctccaccgcggtggcggccgggtacttttttttttttttgtgacagggtcttgctctgtcacnnnnnnnnnnnnnnnnnnnnnnnnnnnnnnnnnnnnngaaaatatgtatattggatatactatgtgccaggcacgattccaagcccctgatacattctctacattttacagatgggggaaggaggtccagagatgttaaatacttgcccaaggtcacacagaaagtggaacactgggatttgaacaaggttttggttgggcatcttctcctatgggagctcagaaatatctgttgtctagccctttctcagcctcccaaccttctcggttccttacctatgtcacagctgactttgagctaaagtcatctcggggcagctaggtgcctatgtgagctggcgttcatttctcactgtttctccttccaaatacctccaggaagaaaagcaagtcctttttggtccaagacattaaaaaagccaggctcagtggctcatgcctataatcccaacacttggggaggctgaggcaggaggatcgcttgagcccgggagctggagaccagcctggacatgttaacatagcaagacccctctacagaaaatgttaaaaatgagctgggtgtggtggcccacacctgtagtcccagttactcaagaggatgannn

SEQ ID NO: 21733 - DNA, 2538 bp, Homo sapiens; identical to SEQ ID NO: 20316
  misc_feature 2538: n = A,T,C or G

SEQ ID NO: 21734 - DNA, 2538 bp, Homo sapiens; identical to SEQ ID NO: 20316
  misc_feature 2538: n = A,T,C or G

SEQ ID NO: 21735 - DNA, 879 bp, Homo sapiens; identical to SEQ ID NO: 21368
  misc_feature 1, 2, 3, 4, 5, 6, 750, 846, 852, 872, 879: n = A,T,C or G

SEQ ID NO: 21736 - DNA, 420 bp, Homo sapiens; identical to SEQ ID NO: 21481

SEQ ID NO: 21737 - DNA, 4742 bp, Homo sapiens; identical to SEQ ID NO: 21339
  misc_feature 1, 2, 3, 4, 5, 4742: n = A,T,C or G

SEQ ID NO: 21738 - DNA, 516 bp, Homo sapiens; identical to SEQ ID NO: 21320

SEQ ID NO: 21739 - DNA, 3483 bp, Homo sapiens
ttttttttttttttttcgttcaaactgtcattttatttttacgttgttagatatggggagtagtgtgattgaggtggagtaggcgcgagctaagcaggaggcggaggcggaggcggagggcgaggggcggggagcgccgcctggagcgcggcaggtcatattgaacattccagatacctatcattactcgatgctgttgataacagcaagatggctttgaactcagggtcaccaccagctattggaccttactatgaaaaccatggataccaaccggaaaacccctatcccgcacagcccactgtggtccccactgtctacgaggtgcatccggctcagtactacccgtcccccgtgccccagtacgccccgagggtcctgacgcaggcttccaaccccgtcgtctgcacgcagcccaaatccccatccgggacggtgtgcacctcaaagactaagaaagcactgtgcatcaccttgaccctggggaccttcctcgtgggagctgcgctggccgctggcctactctggaagttcatgggcagcaagtgctccaactctgggatagagtgcgactcctcaggtacctgcatcaacccctctaactggtgtgatggcgtgtcacactgccccggcggggaggacgagaatcggtgtgttcgcctctacggatcaaacttcatccttcaggtgtactcatctcagaggaagtcctggcaccctgtgtgccaagacgactggaacgagaactacgggcgggcggcctgcagggacatgggctataagaataatttttactctagccaaggaatagtggatgacagcggatccaccagctttatgaaactgaacacaagtgccggcaatgtcgatatctataaaaaactgtaccacagtgatgcctgttcttcaaaagcagtggtttctttacgctgtatagcctgcggggtcaacttgaactcaagccgccagagcaggattgtgggcggcgagagcgcgctcccgggggcctggccctggcaggtcagcctgcacgtccagaacgtccacgtgtgcggaggctccatcatcacccccgagtggatcgtgacagccgcccactgcgtggaaaaacctcttaacaatccatggcattggacggcatttgcggggattttgagacaatctttcatgttctatggagccggataccaagtagaaaaagtgatttctcatccaaattatgactccaagaccaagaacaatgacattgcgctgatgaagctgcagaagcctctgactttcaacgacctagtgaaaccagtgtgtctgcccaacccaggcatgatgctgcagccagaacagctctgctggatttccgggtggggggccaccgaggagaaagggaagacctcagaagtgctgaacgctgccaaggtgcttctcattgagacacagagatgcaacagcagatatgtctatgacaacctgatcacaccagccatgatctgtgccggcttcctgcaggggaacgtcgattcttgccagggtgacagtggagggcctctggtcacttcgaagaacaatatctggtggctgataggggatacaagctggggttctggctgtgccaaagcttacagaccaggagtgtacgggaatgtgatggtattcacggactggatttatcgacaaatgagggcagacggctaatccacatggtcttcgtccttgacgtcgttttacaagaaaacaatggggctggttttgcttccccgtgcatgatttactcttagagatgattcagaggtcacttcatttttattaaacagtgaacttgtctggctttggcactctctgccattctgtgcaggctgcagtggctcccctgcccagcctgctctccctaaccccttgtccgcaaggggtgatggccggctggttgtgggcactggcggtcaagtgtggaggagaggggtggaggctgccccattgagatcttcctgctgagtcctttccaggggccaattttggatgagcatggagctgtcacctctcagctgctggatgacttgagatgaaaaaggagagacatggaaagggagacagccaggtggcacctgcagcggctgccctctggggccacttggtagtgtccccagcctacctctccacaaggggattttgctgatgggttcttagagccttagcagccctggatggtggccagaaataaagggaccagcccttcatgggtggtgacgtggtagtcacttgtaaggggaacagaaacatttttgttcttatggggtgagaatatagacagtgcccttggtgcgagggaagcaattgaaaaggaacttgccctgagcactcctggtgcaggtctccacctgcacattgggtggggctcctgggagggagactcagccttcctcctcatcctccctgaccctgctcctagcaccctggagagtgcacatgccccttggtcctggcagggcgccaagtctggcaccatgttggcctcttcaggcctgctagtcactggaaattgaggtccatgggggaaatcaaggatgctcagtttaaggtacactgtttccatgttatgtttctacacattgctacctcagtgctcctggaaacttagcttttgatgtctccaagtagtccaccttcatttaactctttgaaactgtatcatctttgccaagtaagagtggtggcctatttcagctgctttgacaaaatgactggctcctgacttaacgttctataaatgaatgtgctgaagcaaagtgcccatggtggcggcgaagaagagaaagatgtgttttgttttggactctctgtggtcccttccaatgctgtgggtttccaaccaggggaagggtcccttttgcattgccaagtgccataaccatgagcactactctaccatggttctgcctcctggccaagcaggctggtttgcaagaatgaaatgaatgattctacagctaggacttaaccttgaaatggaaagtcttgcaatcccatttgcaggatccgtctgtgcacatgcctctgtagagagcagcattcccagggaccttggaaacagttggcactgtaaggtgcttgctccccaagacacatcctaaaaggtgttgtaatggtgaaaacgtcttccttctttattgccccttcttatttatgtgaacaactgtttgtctttttttgtatcttttttaaactgtaaagttcaattgtgaaaatgaatatcatgcaaataaattatgcgatttttttttcaaagtaaccactgcatctttgaagttctgcctggtgagtaggaccagcctccatttccttataagggggtgatgttgaggctgctggtcagaggaccaaaggtgaggcaaggccgacttggtgctcctgtggttggtgccctcagttcctgcagcctgtcctgttggagaggtccctcaaatgactccttcttattattctattagtctg

SEQ ID NO: 21740 - DNA, 2187 bp, Homo sapiens; identical to SEQ ID NO: 21516

SEQ ID NO: 21741 - DNA, 3793 bp, Homo sapiens; identical to SEQ ID NO: 21616
  misc_feature 1, 2, 3, 968, 3789, 3790, 3791, 3792, 3793: n = A,T,C or G

SEQ ID NO: 21742 - DNA, 611 bp, Homo sapiens
  misc_feature 610, 611: n = A,T,C or G
acttcaaatcattttgaggatgtatatgtaggttctgaaactgaattcatagtattgcacatagaccccaacgttgattaccagttcagagtctgcgcccgaggagatggccgacaggagtggagtccttggagtgtcccccagataggtcattccacattggtgcctcatggtatgctgctaaccttttctctcctgaagcctaactatatattagaatacctgtattctgtgctaagggcagcacactgacaaccagctattctaagcatagatcctgaattgataagaacaacatgcaccatgtcttttactcagattacctcatgtgatttttgttttcttcagttcttcagagtccaaaaaaaaatgctggacaagatttttagcctcattgaaaaccaaagattgaaaatattatgtagggcactgatattcctttttcttcttttttttatatttgaatgttatttagttagtttttttgagacaaggtctcactctgtcgcccaggctggtgtgtggtggtgcaatcatgcagcctgacctctagatccttctgcctcagtctcccaagtagctgggaccacctgcatgcacacggacgcgnn

SEQ ID NO: 21743 - DNA, 440 bp, Homo sapiens
ctctttccacagtggcacttgccaattaaaatagctgctattatagcatctctgacttttctttacactcttctgagggaagtaattcaccctttagcaacttcccatcaacaatatttttataaaattccaatcctggtcatcaacaaagtcttgccaatggtttccatcactctcttggcattggtttacctgccaggtgtgatagcagcaattgtccaactttcataatgggaaccaaagtataagaagttttccacattggttggaataagtggatgttaacaagaaagcagtttgggcttctcagtttcttttttgctgtacatcctgcacagccgtagatcccttaaaccttacagcacatgtttccgtgagcacagggttggggctaaagttacagattaacagcatctcaaggcaaaacaatttttcttagt

SEQ ID NO: 21744 - DNA, 2315 bp, Homo sapiens; identical to SEQ ID NO: 20885
  misc_feature 1, 2, 2313, 2314, 2315: n = A,T,C or G

SEQ ID NO: 21745 - DNA, 2538 bp, Homo sapiens; identical to SEQ ID NO: 20316
  misc_feature 2538: n = A,T,C or G

SEQ ID NO: 21746 - DNA, 2538 bp, Homo sapiens; identical to SEQ ID NO: 20316
  misc_feature 2538: n = A,T,C or G

SEQ ID NO: 21747 - DNA, 2538 bp, Homo sapiens; identical to SEQ ID NO: 20316
  misc_feature 2538: n = A,T,C or G

SEQ ID NO: 21748 - DNA, 3855 bp, Homo sapiens; identical to SEQ ID NO: 20695
  misc_feature 1, 2, 3854, 3855: n = A,T,C or G

SEQ ID NO: 21749 - DNA, 809 bp, Homo sapiens; identical to SEQ ID NO: 20847
  misc_feature 809: n = A,T,C or G

SEQ ID NO: 21750 - DNA, 3432 bp, Homo sapiens
  misc_feature 1, 4, 3412, 3413, 3414, 3415, 3416, 3417, 3418, 3419, 3420,3421, 3422, 3423, 3424, 3425, 3426, 3427, 3428, 3429, 3430,3431, 3432: n = A,T,C or G
ncgncccgcctgcgagtgctccaggagctcgccgacctcgtggacgacaaggagtagccgcctaggggctgccggcccctctgcctcccccgcacctcgctcccttcccttccccgcacccggacttcgcagtcagcggttctcaacctctgccccgccccgccacgcgcgtccgccgccggtggcccgggcccgggctgcacccccgcatccccaagccagcggcaggaagtctcaggaactgccccagggccgaaagggcgccgctgcgagcgcctggctgacagccacagcggtggtgacggtgctgggagaccccgcgtgcgctttccccttgagatgtaaaccgggaacggggaaggggctgaggggagaaaggacatggccttccccgcgagtccatggccagtgactgtggcccgactcgaaaacaaccctcttctcaaaagggaccatcaccgccccgagcgtgcgcacacagaccggtcggaggcgagaactggtctctacagggcacagttcagctcctctgtggatgcgtccccagatcgcaggatttccaagaaatcgagcctgtcccttgtgcacttgggaataattccccaagacagcacttcgggattccgggttatcctgaggctgcccgggacttttccagctctccagccccaggtctcctgacattgtgttccaggctgcgggctaagccagacagtgtttgcctccggttctttccaccgtgggaagcgaacgccacccccacccgcctttgcctgcgagtctccctcgctgcagaagggaagccggcccgtcccgggaggagatggcgctgcgaattcggtgaggacagccggccccgcccccgacaaggagctcgctcgttcacctggtgtctgggaacttgaatgtgtgaagggcgcttattgttctgaacccttgattgctccctcctcgggctgcatttcaaaaatagtcatatttttaaaggagttggaggagagggagggggaggacatggcaccattccagaaaccagcattgttacaacaccatagccagtatatttagtttggcttttcctaacatagaaatcttcaaagctggggaagtggaaataaagttttaaaaatgagagagcagttttccaactatgtcaacaaagcctatcgtgttgatgtttttattgaccattttagcaacaggctaataaaatttcaaattgaaatttttattttcatggctttaatccatgatagtttaaatactgggggccattaagagtggatgtagctaagagcttagctaacattgccttttcactctatttttctcagatattgtaagcattctgtttttcaatattgtagttaattttttggctttcaacagcagccctagtaatggtggagttgttaattaatgtgtatattgtactgaatttctgtcagttaaggggttcactgctttggtggaaattggtggaaattgctagcaggttccacgatgtttatttttttctccatgttgtatatcattaccatttcacatacgcgtttctatttttcttcctctcctcctgatctccttaaaaatgaatctagagttggtggctttttccccctcctctttggccagttccacagttcagttcttcctgaaaacagggatgatgaacttgtaggatcaggacaaatgtgtgtttttcaaaaacttaaggctgggtgtgaaacaccttctgtggacaaggatttgtaaacttctctcctccctccagctgcggccccagcctaactgatagttacttgattcagtgtgctagacacttaaatagcatctatgtctctttcaagggaatttgtcaaataatgctgtttagctaattgttgcaagcaattgcatattaacagctgtgattttgttggacagcaagtattatggccaaagccagtttcttggcatttcaaaaataatgcaataaaaactagttgaggttagctgaggctggaaatgcctttttcatggtaaatgattcacttctatatttttctttctttttctttttttttctttggttttcatcctggattcatcccctgatcttaaatcaaaacgtcagatcaatgaactatgaactaaagtatttttcttaagcctattgagtgatttattttttaaaaaatgtttaaatgcatatgcttttctttcagcacaaacaacagcaaaaacttttgtaataactaacttacctttgcatgtatgaagaactgagtcatttatttccctaacttactcctctttcaagtaacaggtggcagatcataaaatgaattctttattgtatctacacactccacattctttactgtgtcctactactgtatcttggctccctgctgtattaaacaccatcttaagcacttgttcctgcaggactccttcttgacattttgtctcccccttcaaagtcactcaaagagtgggacttcatcaaaagaaatgaattagtctctatcacaccgaatactaagatttatttcctctgatggtacatagatttctctctcactaagagggtcactctcatagaggaatgtctgtgtcagttttatacttgctgaggctagatgacaataaaaatgagctgggcagttaaattagcatttgttactatatttggcctataaaggatcaggttgatgataatacctctaaaaatatgcaataataaaccaatagttatgaaagaaacttgaaaggtttgcaaggtttctcctaatccctgttaaaaattatcatttatttatctcttttgtcagtgttagtaaggtaacccatgacagaataatttgagtgatagttcatcatgcagaggatatgatcaagatattaccttaatggttttatcctgaaaaaggtgtatacttttagggcactgttaacaatgcgagtgaaaccaagatggtgcaagttccctttgcagatggcgtgggcacacttgatttttattatgagtgaatgtaatctttctgtattttaccagagttacagcaattacctgaaaagtttcctaacattttaataatgttagggatttcgttttggttttagttgtcctcaagagacaacaggttcacagtaatttccatgatgttgggtgtggctaagctggggattggttctgttccccctgctcccgtgtagagaaaagctatatttatactgcattctttctcaactttcaggtaaaacaaactatgatttaaaaaaagaaaaaagaaaagacaggtacttttacttcaaagagtgctttgctacatttttatttaaaccaaaaatcaaataaaataaggaggggggctgggtatactttaaacaaaaccagtcctgaaatgctgttattctcaaagtacannnnnnnnnnnnnnnnnnnnn

SEQ ID NO: 21751 - DNA, 731 bp, Homo sapiens; identical to SEQ ID NO: 20529
  misc_feature 1, 2, 3, 4: n = A,T,C or G

SEQ ID NO: 21752 - DNA, 1380 bp, Homo sapiens; identical to SEQ ID NO: 20118
  misc_feature 1380: n = A,T,C or G

SEQ ID NO: 21753 - DNA, 2538 bp, Homo sapiens; identical to SEQ ID NO: 20316
  misc_feature 2538: n = A,T,C or G

SEQ ID NO: 21754 - DNA, 596 bp, Homo sapiens
aagaacttttaataaaataaaaacggagaggtgagcaaatccagcatataaaaatgtgtctgaaataagctttttttaaaaaaagtttcaaaatggtttataaaattgagttacaaacatgctagctattccacagaaaagtgtcccttttctacccggacatgcaacttgactacatttcccagtcttccttgtagttaggggcagtcatatgacaaagttctggccaatggaatgtggccaaaaggtatgaggcctcttcaaaactggccccataagcccctcccactcagcagccttcattctcatccatgtctctccgtgaaatggggaagatccgagtgttacttgctcaaatgcgagacgtctcatttaggagaatacaatattaaaggtttagtgcattaaaggaaagctggaaaactcaagggcagagcaagttctgaagagtatgcggaagtcgtggctgcagccaagggtaactttcctctgccgggtgacaaggtcacaggagagaagttttaacttgactcccaggaaagcagtctacacggttgttcctctctggaaatggcttcctctgtgactccccgcgt

SEQ ID NO: 21755 - DNA, 750 bp, Homo sapiens
  misc_feature 1, 2, 3, 4, 5, 6, 749, 750: n = A,T,C or G
nnnnnngggcccctaaaagggtcaagtttccgggggaggtgtttgggaaatcccccccttaaggccctccatttaagatgccgggttatttggcccaaaaaggggcctttttccccaggtttgtttttttttttttggcccaaaaaaaaaaagggggccttggcccaaatttgggggattcaacctttccagaatatttcccaaacccttttttttttttttttttttttttttgagcaagcccccaacaccatagaaaattcttgatttgctcggaggataattggatgaaggattattttcttctttgtttatgtgcaagaaatgaaaataaggaattgctttgatcagacaacttcttatctttgtggtagaaacagaactgcccttcttggagtggctctgcctctgagatcactacaggggagacagcatgccctgttcagctggctgaatatttggcaacaatctcctgaagcagctggaattgacaagaagtactggagattagctcgggccaaacccttacatctggcctgactactgctgcagtctgcctcaacttacccctaaagctggggagatgccacccacccacatctttgctacacatgccatcatgagctagagttcaccctttctccttaaagccctatttacttttctacttcaactttaaaacaaaattaaaatgtgaggatatccctgaattttaaaaagcatgaagtaaaaatgcaaattagtatagnn

SEQ ID NO: 21756 - DNA, 390 bp, Homo sapiens; identical to SEQ ID NO: 21534

SEQ ID NO: 21757 - DNA, 374 bp, Homo sapiens; identical to SEQ ID NO: 21658

SEQ ID NO: 21758 - DNA, 3483 bp, Homo sapiens; identical to SEQ ID NO: 21739

SEQ ID NO: 21759 - DNA, 816 bp, Homo sapiens; identical to SEQ ID NO: 21390

SEQ ID NO: 21760 - DNA, 1268 bp, Homo sapiens
  misc_feature 1, 2, 3, 4, 5, 6, 7, 8, 1266, 1267, 1268: n = A,T,C or G
nnnnnnnncaaattctcttttattgctttatgtccctgactcatgcaggccaaagggtgaggaggagtaatagccaacaagagcgtcctgcagaaagaaacaggctgcgtgggtccggaggagcttgaaaggaagaacccgaccaaagggcaggagacccggctctccaggtcgcggaggcgtgggtgcccagccaggcggagtgcggggcggggcctctcgggccgcaaggtggggcctcctgggccgggaggtgggaggtgagctccgccagcccagcccactgcagacaggttacccaggacctcaaggtgtgctgcgtcaccccgcccgcgctgcgctgattggttcctccagggagcccccgccccctcagctgtaaccgggccggcttcagtgtcgccgccatctttgttgatgtgtcagctccgcaggggttggggaaacggccgctgagtgaggcgtcggctgtgtttctcaccgcggtcttttcctcccactcttggctggttggaccccgctatggaaaagttggcccctgagccagagctccagcagccttgttagggcgtggcctgaggcttggataagtgggatgtaaaacgaagatcaggagcagatttgaagaattacaaagtgaattggtgccagtcagcatgtcagagacagaccacatagcctctacttcctctgataaaaatgttgggaaaacacctgaattaaaggaagactcatgcaacttgttttctggcaatgaaagcagcaaattagaaaatgagtccaaactattgtcattaaacactgataaaactttatgtcaacctaatgagcataataatcgaattgaagcccaggaaaattatattccagatcatggtggaggtgaggattcttgtgccaaaacagacacaggctcagaaaattctgaacaaatagctaattttcctagtggaaattttgctaaacatatttcaaaaacaaatgaaacagaacagaaagtaacacaaatattggtggaattaaggtcatctacatttccagaatcagctaatgaaaagacttattcagaaagcccctatgatacagactgcaccaagaaatttatttcaaaaataaagagcgtttcagcatcagaggatttgttggaagaaatagaatctgagctcttatctacggagtttgcagaacatggagtttggggacaggttgtggtgaaggtgggaaaatggggggctttaaggtttaaaaaagccgggtggatttgannn

SEQ ID NO: 21761 - DNA, 953 bp, Homo sapiens
  misc_feature 1, 949, 950, 951, 952, 953: n = A,T,C or G
ngctgaatgatagtatgtgatgtgtgctaggacttctagaagccaccctttgctttgctgttcattgggatcatggaatcggacctcagctggtttttgcctcagcactttctttcacaaaattatgtgtgactgcctccttccagactgtttcctgctgataggggcagtttaatagccttcttcctgtgtggtatctgcaacaaaatcccaatgaatgtcaccaagaaggaaacaaaggattgcccagcgatgagaaatgtccctggtgccaaaacatcagtttgcccctaacctcttgtgcaatacctttaagtccaggtcatgttgttaccatttgggggtttgcggatttgtttacttgtgcccaagaatggagaaaataacctgtactattgtacaactctggctccatggctcctcacaaatgttccatgtgagatataaacatctttatcctcgacaagtcatgttcattccaagaaaccagtctttgttcttaattggacatttgtttctgcaaacagcttaccatacattcaattccaaagttatcagaaacctacactcttatctcacaaatttagaggtgtggtagatcatctccaaagatggccaccaacagttgctctcatcctctgtgcacgtgctatttccaataaggtctatttttttctacagtgagggctgaacttgtgacttgttttgactaataggatatggaagtgatattttggcagcttccacttttgctcttgaaaataagctgacacgtttccaaacgagaagcttgggctaaattactgaatggtgagagacgatgcataggagaaccaaggtgctctagtcacagcactaaaagcccagacttgtgtctcttgaaggtttcaaccccgccagactcccagctgaacgcaccctcatgagtggcccttgctggtaccacgannnnn

SEQ ID NO: 21762 - DNA, 387 bp, Homo sapiens
accctccaacacctcttccataaaatcagcaaacaactgacagagatcatgcagcgggagcccacgatcggtttaatcatcactcacttccattggatcaactacaaatcaactcagatgagagtgctgagtctcagaggatggacatctcaccccttgccatacagataagtagaaaggatggtattcaaaattaatggccagactctaagtcccagatactatacttcatggtcttccaactctcaaaaagttgtgggagttttttttgtttttgtttttgtttttttgagacggagtctcattctgttgcccaggctggaagtgcagtggagtgatctcagctcattgcaacctccgcatcccaggttcaagctattctcctgc

SEQ ID NO: 21763 - DNA, 731 bp, Homo sapiens; identical to SEQ ID NO: 20529
  misc_feature 1, 2, 3, 4: n = A,T,C or G

SEQ ID NO: 21764 - DNA, 731 bp, Homo sapiens; identical to SEQ ID NO: 20529
  misc_feature 1, 2, 3, 4: n = A,T,C or G

SEQ ID NO: 21765 - DNA, 1203 bp, Homo sapiens
  misc_feature 1, 7, 9, 11, 1199, 1200, 1201, 1202, 1203: n = A,T,C or G
naatcantntnactaaaaaattttattgaactggtcaattttctttgccaatattactgtattcttatttctagtaatagaagtgtgaaaaagcatcaaggaaacttaaattgcattctcatactgactgcatacaataattctgaaaacagcggaagttatatatatcccccataagtaaaacatgagtaacacaacaaatgaaaaacgaataggagacaattcaaataatggcgacctgttattctcatctagttaagtactattattttctaacaggaatttgctatttcaaatatattatctgagatgtctatatatttatattttgagatactatacaaatttgagccaatgacatagaattttacaaatcaagaagcttattctggggccatttcttttgacgttttctctaaactactaaagaggcattaatgatccataaattatattatctacatttacagcatttaaaatgtgttcagcatgaaatattagctacaggggaagctaaataaattaaacatggaataaagatttgtccttaaatataatctacaagaagactttgatatttgtttttcacaagtgaagcattcttataaagtgtcataacctttttggggaaactatgggaaaaaatggggaaactctgaagggttttaagtatcttacctgaagctacagactccataacctctctttacagggagctcctgcagcccctacagaaatgagtggctgagattcttgattgcatagcagagcttctcatctaaaccctttccctttttagtgtctgtgtatcagtataaaagttctataaactgtagttacttattttaatcccaaagcacagtaacaatatacttcatcctagggttggcagtttctctgagtgttttgtttaattatcattattatatctgcaggattccaaagcgcccataaattcattgccaagtgcaatgtccagacgaatatttcctaggttttcttccaggatttttatagtcagaggatgtaatcttatgccaacgggtcttaataatcaaatgactccacagtgagaatcattactctgaaaaatgtcgacgcggccgcgaatttagtggtagtaggcggccgctctagaggatccaagcttacgtacgcgtgcatgcgacgtcatagctcttctatagtgtcacctaaannnnn

SEQ ID NO: 21766 - DNA, 929 bp, Homo sapiens; identical to SEQ ID NO: 20094
  misc_feature 1, 2, 3, 4, 5, 6, 7, 8, 9, 10, 11, 12, 13, 14, 15, 16, 17,18, 19, 20, 926, 927, 928, 929: n = A,T,C or G

SEQ ID NO: 21767 - DNA, 2187 bp, Homo sapiens; identical to SEQ ID NO: 21516

SEQ ID NO: 21768 - DNA, 728 bp, Homo sapiens; identical to SEQ ID NO: 21701
  misc_feature 1, 2, 727, 728: n = A,T,C or G

SEQ ID NO: 21769 - DNA, 463 bp, Homo sapiens
  misc_feature 455, 456, 457, 458, 459, 460, 461, 462, 463: n = A,T,C or G
acaagttcagagacattcagttgcaaagacatttaagcatattccctctgcttatgggaacttttctaaaaggtttgtaagaggaaacggcaccgcggagggacaggagtggaaatgtatctgtctggttccctcctgactcttgcttcccattggtcaaattttattccacagagatctaatgcttctatacatttggcaacttggtagctactcaagaagccatttcccaagccctgttttgtggcatttcatctaagaccagaagtggaggggagattcagcaggtcagactaccaaccaagagagaaggaggcagctgagggaatgtagaaagcatacaaaaaaaaaaaaaaaaaaaaaaaaccttacatacaataccacacagaaaaagcattgcgtgcaacttaacacttttttgtgagaaaaaataaataaaaagaaaacctcttaannnnnnnnn

SEQ ID NO: 21770 - DNA, 1380 bp, Homo sapiens; identical to SEQ ID NO: 20118
  misc_feature 1380: n = A,T,C or G

SEQ ID NO: 21771 - DNA, 4085 bp, Homo sapiens
  misc_feature 1, 2, 3, 4, 5, 6, 7, 8, 9, 10, 11, 12, 13, 4085: n = A,T,C or G
nnnnnnnnnnnnnctctctctgtctcagttccacttttttgtccaaaaagacccctcccaaaattttttttttcgcccctttccttttcgcttcccattttcaggatatttttttccattcctccccccttttccctaaatgtacaaaagtttaaaatcacccaaaccttcactggaacaattggaattagcccaacaagtcacacaaaaatttcatgtttatatttattaaaaacaaaataatgcaagttctgttaaagtaacaatatatacaccaagataaatatttggaattgtggaaacagaaatagtaaaaatttcaaattttttctcaatatcttaatgacttaaataatttagcttttttcaggcattttttgttaaaaataaacttacttaattttcaacttaggtcaatgtgcttttttgctttttttaaagacaaaaattagtaaaaatggcaggtactaggtttgcactagctaaaaaaataatgtttacagttgtctagatgtaacaattttaaaaacatacaaattcagtatgtagtatgaaaatacattaaaaaaacacataaggaactatgccccataaaaaatataaatgcaacttctattaattatatgaatatcaaaaattaaatattctgatttaaaagtagcttctataaaagtcggagtagtaggcattatttgctttcctaaatgtataaataagaagtatttctagctcaactaaacagaaatatcagtatttcttagcaaaaaatgtagtacatacatgaaaaggcaagcattgtcctgtattcaagtttttgagtttaaattccattaaaatgtttcctacaacttgaaagaactacacacacaaaagtaaaaagatgaggtaaacatcttatactctgaagaaagtacttaatactcagatattcccaattaatctgtatcttaatactcagacattctaaaacaatgctttaaaaggtcttccataatgaggatgattgtgataaatatctgaactacataatgaacagcaggtttctcagtcttctgagtagacagtgatgctccttcttgttattacaaaacaatcatgattaagttttgccaacaatatcgctccagtgtgggtttacatgaggcaccatgctacagtaagagcagctacgatgccattcaaaatcgccatgctatagcccatgtggaaagaatgtccagtcagtttcttgaacctggcaggtgaaagaggagtaggaggaaacattcctggttcaaaagaatcaaagtaagtcactgtccaagaaaagctgcaacaggagaatccagcagttagggatattataagtagagtccagaatcctaatagtccagtgtctacatcatcttcatttttcaaattctcagcatgcaactctttaacgatcaagtaggcgatggcgaggaggaaggcgagaagaatggcgaagagcagcgagcagagaatagagaggacctggaccggccaccgccgaggctgggctctgctgcccgcggccgcgggaaagataccattgcgcttatcgggcagaacgggcgacccgttcccgtccggcgggagcaccgagcgctttctgggctctgaccacgccccagccgagaactccgcccgcaggtcgcgggccacttggtcgcatccctcctcctcgtcgacttcgccttcaccccagctgtccccctgagtaaaggaggaatacgatggccgagccacagggcccggggtgccgggaccgcggcgccgcagagccgaccgccacccgctctcagcaaacgacatggcgcgaactctctacctggcgctctcgcggttccttacttgctcacccccatctccctttagtgtggttctccccacccgtattacaacttccctcccgctactgtacacgcctccttccccaggcgcgcgctctccacctggtgcgtacggagatcgaaccctctcctccgaacccctcctttcgccttccccgcctcctcccctccgcctcgagcaccgcgcgcgcgcattcggtcccagccaccgctaacactacaggctgcttacccccgccccctccaccctacccctggcggcctcaggtttgtggggcgtacgtaactcgggcggggagggtgaaggtggcagacccccactgccccaccccctacggggtgaggcggtctaagctcgggaagctgggacactgttgtcttcccttcccctggggaagttggtagagttttcccgacggaggactcggcgcagaaacttcctccgtcctcctcctcccccccccccccatgcaggcgacgccgagtgaggctgaggctgggggcgaatcgccgcagagctgcgtgtcggcggcgcattctgattggacagcggggaagcccgtcagcctgttggccccgctgatcccgccccgtagcgcagggcagcctttaacctttagccccagtgggcgccagccactcagatcgcttcttgttggtatgtgtagcggcagtggccgccggcggagcagtctgagcccgacgatgaggccggggacgggagctgagcgtggaggcctcatgatggggcaccctggcatgcattatgccccaatgggaatgcaccctatgggtcagagagcgaatatgcctcctgtacctcatggaatgatgccgcagatgatgccccctatgggagggccaccaatgggacaaatgcctggaatgatgtcgtcagtaatgcctggaatgatgatgtctcatatgtctcaggcttccatgcagcctgccttaccgccaggagtaaatagtatggatgtagcagcaggtacagcatctggtgcaaaatcaatgtggactgaacataaatcacctgatggaaggacttactactacaacactgaaaccaaacagtctacctgggagaaaccagatgatcttaaaacacctgctgagcaactcttatctaaatgcccctggaaggaatacaaatcagattctggaaagccttactattataattctcaaacaaaagaatctcgctgggccaaacctaaagaactgaggatcttgaaggataccagaataccatgttgctggaagtcttattacaaaatcaacctgcatgcaatgatcaaagctgaagaaagcagtaagcaagaagagtgcaccacaacatcaacagccccagtccctacaacagaaattccgaccacaatgagcaccatggctgctgccgaagcaccagctgctgttggtgccacaccagcatcgtagagcacgaccgcgctgcgcgacggaaaggcactctggtcaaccgggcggggccgtcccgccgaaccaacgaccaccacgagcactcggcaacagcaagcaaacaatgagcacctacacgctcaacgggaccatcataatatccttcacctaggtgtctatagttttcttacttcctactcagtactcatccgacatcgcgcacacgaagcacgcaagggacagagcgacggagagagaaggagagagagcagacagacgcacagcaggaaagggagagaacaccagaacaacacaagccagggaagaggaagagcacagaaagagaagacgcaacggggagaagaacggaagcggacaaagagcgacagcaagaacacacgaacgaacataagagaacggagacaaaagagccgggaataaaagacaggagcaagagagcgagagaggaaagccgaggcaagcgagccggacgaagccaagcgacggcgagggagaagcgaggcgagcagcgaggacgcgagaaggaaacagcggagggagaggaacagcaggcggagcggcgagatagcagagaaacatccgagagacgcaaacgacgcgcaagacagcgagaaacacacaggcgaccaggccacagcagacagaccagtcacagagcgagagagagcggtataagaaagagggcaagagagacagaagcaagcgaaacagagcaagtggagaagagagagccggagccagggaggagaggtcagaaggagaaagaggcagacgaaagtaacaccggagaagcan

SEQ ID NO: 21772 - DNA, 506 bp, Homo sapiens; identical to SEQ ID NO: 21661
  misc_feature 1, 2: n = A,T,C or G

SEQ ID NO: 21773 - DNA, 2538 bp, Homo sapiens; identical to SEQ ID NO: 20316
  misc_feature 2538: n = A,T,C or G

SEQ ID NO: 21774 - DNA, 461 bp, Homo sapiens
  misc_feature 461: n = A,T,C or G
gcggccgaggtacttcccattgtaaatcacatttttagatagtccagtggccaaagcccccagacgaacaaaaacactcgtatcagccaagacatgccagaggcctagtgattgtttcccagtagctgagggcagaagccagacctctttcaataaggttgatctttcactgtattaacactgtatataaaggacttttataaaagcttgtagttatggtgttattgtcatcatccagtttaatgccctcttttttccagtaagaaaagaaaggtctgggataatcatgttaattgatttgtttacattttcattttaattagtagcacaactgagagtgaaaatggaacccaaatagtccatctttagcataatacttttttttctcctctagtggagcttataccttgccaattattgaatcttgaactcctgacctcgtgatccacctgcctcagccn

SEQ ID NO: 21775 - DNA, 375 bp, Homo sapiens; identical to SEQ ID NO: 20539

SEQ ID NO: 21776 - DNA, 366 bp, Homo sapiens
actctgcattggtgttaatgcccttctggatgtgctgggactcctcaataagtctgtcctccagactgttacattatgctcatacttccacatatccccagaacctaacattttgccatatattttagtagatactaaattatgtttgttaattaggatgctgatggaacccattatttagcagtttttcccttacatttttaggaggtggttttgccagataaatataatgtttaattttttttctaatttagcttattgacatgtgtgtgcagaactgtggtccaagtttccagtctctgattgtgaagaaggaatttgttaaagagaatttagttaagctactgaatcccagatacaacttgc

SEQ ID NO: 21777 - DNA, 378 bp, Homo sapiens
  misc_feature 1, 373, 374, 375, 376, 377, 378: n = A,T,C or G
ncgcggggctgaccacagcagaaaggacggggatgagcactgactggagcaatctgttgactgtcccctgttgtaaaccacagctgcctaattttgagaaacaggggccgagccatcagatgtaggggaatggaagctgatgccaacggaagcccggaggtaaactagggccccggaaaaacgaagaggaaacagaaattatgagtaagcagcggaagttgatactactcccaagatggaggctaatcactctgaacagctctcagcggaacgacagtcaacacctccaggtgacagttcatcattacccagtcacaatggcctggagaaggaagatggccaggattttccaaccccagttcaaccaccagannnnnn

SEQ ID NO: 21778 - DNA, 742 bp, Homo sapiens
  misc_feature 1, 2, 741, 742: n = A,T,C or G
nnacgatggacggtgcatgttcttcagcaactcggaactattcccgtacgagttgggcccatcacctaggtacttctgaataagttcgagccaaccactctccagaaagtggctgaggtttggtttgctcctgctttggctaacacggtttcacctattttggatgtaaaagataaaaaaaataaagacaccttaagtgccattttaacttaaaaattcgtatcattaccaccttaaatggacaccataaaacaggcgggccctcatgctaaggcatggcaccaattcaagtgtcacgacattccattctcctaagtagataagaggacatttagaaaaatctagtaacatgtttggattatccttagctattttgctgaacttatgataacgtcagaaaatactttttacttggttattttccaaccttgacccagtttcccctgaaaagctgcgaactataattacctgtacgaagaattgcttcattccagtaatgaaataaatctcatttttttctctggttgagtctttcttgggccccttcaaagttgcatacattaacctgacccatccaacccagggctgtagagccaaagtaaactcctaggaaaccatcagtgctggaaaaaagggtctgggaatcctagctttggccctaaggagatacacgaagtgttcctgaactccaggcatgcagtgcctactgctccagaaaagtaactactgggtgggcttgcnn

SEQ ID NO: 21779 - DNA, 862 bp, Homo sapiens; identical to SEQ ID NO: 21330

SEQ ID NO: 21780 - DNA, 2538 bp, Homo sapiens; identical to SEQ ID NO: 20316
  misc_feature 2538: n = A,T,C or G

SEQ ID NO: 21781 - DNA, 283 bp, Homo sapiens
acaccgccagccatttaagccacaagcttataatgaggagaatctcacactttctcgaaagggtggcactttgctcctggcctgatggtcattatgtctcccggacttggctccagctccaggccagcactgtccagtggaaatggaatgtggactatgaatgcaagctacctatgccattttaaatttcctagtagccacagtcaaagaggaaaaagaaacagactacattaatcttaataatactttttggttttttgtttttttcaatttgagagcaggt

SEQ ID NO: 21782 - DNA, 2187 bp, Homo sapiens; identical to SEQ ID NO: 21516

SEQ ID NO: 21783 - DNA, 735 bp, Homo sapiens; identical to SEQ ID NO: 20803
  misc_feature 733, 734, 735: n = A,T,C or G

SEQ ID NO: 21784 - DNA, 365 bp, Homo sapiens
gcagtttccgtgggtctgtgaagaggtcggcggcccctgcgggcgccagtcagctttaagaaaaagtagggatcacttctgactgtacgcggggacacctgggaaaacttcacagaaaatgagagtttcagatactgagaatagaaccactaagaagcagaaaagagaagatattctcgtgggggagaacaacggctgggaggggaggaagcatggccaaggcaaagaggtgaatacaacatgtttaagaccacagaacatctgcataggctgtaaatttcgttgaatgatggatgcaaagatggaagacagatggatagaggaaaagacagaatcagatactggatgagttagttaccttgccc

SEQ ID NO: 21785 - DNA, 2187 bp, Homo sapiens; identical to SEQ ID NO: 21516

SEQ ID NO: 21786 - DNA, 354 bp, Homo sapiens
ctgttttggggaaaaaaaatcacattccatttttttttccccatgatatggataataaaggctggatgtctctgacctagggtgactgcagtctcaatttacatcttatgtccggacgtcccattcaatgtcgcattcattccagacaaaagcgtcccagtttagatgacagattatatgactgcccttttttgtcctcaaggtatgatccaaagggaagcatctttctctgccattgctgtttcccacgcgggccaactgctcaaatgttcaagtggagtcacggctcggttatccaatctggctccaaagatgtcctttttggcgagatcaattccagaaacaacttttact

SEQ ID NO: 21787 - DNA, 2133 bp, Homo sapiens; identical to SEQ ID NO: 21530
  misc_feature 1, 2, 3, 4, 5, 6, 7, 8, 2133: n = A,T,C or G

SEQ ID NO: 21788 - DNA, 757 bp, Homo sapiens; identical to SEQ ID NO: 20428
  misc_feature 1, 2, 3, 4, 5: n = A,T,C or G

SEQ ID NO: 21789 - DNA, 731 bp, Homo sapiens; identical to SEQ ID NO: 20529
  misc_feature 1, 2, 3, 4: n = A,T,C or G

SEQ ID NO: 21790 - DNA, 2187 bp, Homo sapiens; identical to SEQ ID NO: 21516

SEQ ID NO: 21791 - DNA, 498 bp, Homo sapiens; identical to SEQ ID NO: 21110

SEQ ID NO: 21792 - DNA, 2133 bp, Homo sapiens; identical to SEQ ID NO: 21530
  misc_feature 1, 2, 3, 4, 5, 6, 7, 8, 2133: n = A,T,C or G

SEQ ID NO: 21793 - DNA, 351 bp, Homo sapiens
  misc_feature 1: n = A,T,C or G
ngtcccaaacaagttgacagccgggagccactatcccagctgcaggcctttgtggtccatcttgtcatgcttcctcattggggacccctgtatgggccaccctagtgtgataagctgagcagtgcagtgtgaacagggcccatggtgtattataggccacagcccagcactcctatgggatgctctcaaaccatgtcccatcttcagcatcccccccaccaacttactcccctgtggtgagtacgcggggaagaacaaaaagaacaaaagtttactaacattcaggagtcttttctgaaaaccatatatgaattatatcactgacattataggtttcctctcagtatgggt

SEQ ID NO: 21794 - DNA, 2187 bp, Homo sapiens; identical to SEQ ID NO: 21516

SEQ ID NO: 21795 - DNA, 728 bp, Homo sapiens; identical to SEQ ID NO: 21701
  misc_feature 1, 2, 727, 728: n = A,T,C or G

SEQ ID NO: 21796 - DNA, 2187 bp, Homo sapiens; identical to SEQ ID NO: 21516

SEQ ID NO: 21797 - DNA, 635 bp, Homo sapiens; identical to SEQ ID NO: 20256

SEQ ID NO: 21798 - DNA, 656 bp, Homo sapiens; identical to SEQ ID NO: 20451

SEQ ID NO: 21799 - DNA, 1109 bp, Homo sapiens
acttcctgtatcccctgtagtgccaaaaccagtgatactttatttgctcctatggcagctcatagaggtaaccgaagtgatttttcctcagtaattgaaacacatattctctaaatgccaatgtgtggtgatgggccctgcactgccttcatttctctagggcagtgtctttggattgtctagagcctaggtaattctgagaactactgtaaaccaaccacagggcactaaagcaatgtacgcggggcttttcgatccgccatctgcggtggagccgccaccaaaatgcagattttcgtgaaaacccttacggggaaggccatcaccctcgaggttgaaccctcggatacgatagaaaatgtaaaggccaagatccaggataaggaaggaattcctcctgatcagcagagactgatctttgctggcaagcagctggaaaatggacgtactttgtctgactacaatattcaaaaggagtctactcttcatcttgtgttgagacttcgtggtggtgctaagaaaaaggaaaaaaaagtcttacaccactcccaagaagaataagcacaagagaaagaaggttaagctggctgtcctgaaatattataaggtggatgagaatggcaaaattagtcgcctttcgtcgagagtgcccttctgatgaatgtggtgctggggtgtttatggcaagtcacttttgacagacattattgtggcaaatgtgtgtctgacttactgtttcaacaaacagaagacaagtaactgtatgagtaataaaagacatgaacaaaaaaaaaaaaaaaaaaaaaaattttgggcgccacggccagagaaaagttttcaaagcacactgctggggcccgggcccccgatagtaggacacttggccatacgtggcccaagggaaccgggccagagaaggccgggcgttcccccaaaaaaaagcgggggaccggggtcgacaacccaagggtggcgccacgggtacaacggccagcctaccgccggcagcgacaccagagcgacaacgcaacacgagagacgacacacacgttcaacagcagacaaccaccacatctgagacgaagccgcaaagccatggtctcggcagc

SEQ ID NO: 21800 - DNA, 905 bp, Homo sapiens; identical to SEQ ID NO: 21290
  misc_feature 1, 2, 3, 4, 5, 6, 7, 8, 9, 10, 11, 12, 13, 14, 15, 16, 17,18, 19, 20, 21, 855, 905: n = A,T,C or G

SEQ ID NO: 21801 - DNA, 2315 bp, Homo sapiens; identical to SEQ ID NO: 20885
  misc_feature 1, 2, 2313, 2314, 2315: n = A,T,C or G

SEQ ID NO: 21802 - DNA, 946 bp, Homo sapiens
  misc_feature 940, 941, 942, 943, 944, 945, 946: n = A,T,C or G
aggtacgcgggggggagaagaggggtctctggcggcgacttggggaggagctaggtttgggcttggagttgggccctgaatggcgctttgctgtgaatctccgcggggaggctcttccaaccaggggctgagcttctgcgctgtggagaagccaggctcctgatgtcttattgggggccatatctagagtgatgccctagttcgcgtggctgaagatggcttgccaccctacctgctgattgcattctgactggatgggtcatcagttaaggaagttgaaacctaccaccggacacgtgctttaagatctttgagaaaagatgcacagaaattcttcagattctagttttgagaagaatgtggaaataacggagcaacttgctaatggcaggcattttacaaggcagttggccagacagcaggctgataaaaaaaaagaagagcacagagaagacaaagtgattccagttactcggtcattgagggctagaaacatcgttcaaagtacagaacacttacatgaagataatggtgatgttgaagtgcgtcgaagttgtaggattagaagtcgttatagtggtgtaaaccagtccatgctgtttgacaaacttataactaacactgctgaagctgtacttcaaaaaatggatgacatgaagaagatgcgtagacagcgaatgagagaacttgaagacttgggagtgtttaatgaaacagaagaagtaaatatattcttccattaagggaatgatttaatatccagttcaatttttttatagtacctaatccatttttcattaaatatctactttttacagcatctatttgatcagtcattagttactgctggaaatgtaagagtttatggctgtaaatatcttaattttaaacaagattggaggatccaacttaatttttttaataaatagattccaaatgnnnnnnn

SEQ ID NO: 21803 - DNA, 420 bp, Homo sapiens; identical to SEQ ID NO: 21481

SEQ ID NO: 21804 - DNA, 2538 bp, Homo sapiens; identical to SEQ ID NO: 20316
  misc_feature 2538: n = A,T,C or G

SEQ ID NO: 21805 - DNA, 508 bp, Homo sapiens; identical to SEQ ID NO: 21293
  misc_feature 502, 503, 504, 505, 506, 507, 508: n = A,T,C or G

SEQ ID NO: 21806 - DNA, 2187 bp, Homo sapiens; identical to SEQ ID NO: 21516

SEQ ID NO: 21807 - DNA, 2538 bp, Homo sapiens; identical to SEQ ID NO: 20316
  misc_feature 2538: n = A,T,C or G

SEQ ID NO: 21808 - DNA, 2061 bp, Homo sapiens
ccgccacgcgtccggagcgaataaacgggcgcagaggccggctgcccgcccagttgttactcaggtgcgctagcctgcggagcccgtccgtgctgttctgcggcaaggcctttcccagtgtccccacgcggaaggcaactgcctgagaggcgcggcgtcgcaccgcccagagctgaggaagccggcgccagttcgcggggctccgggccgccactcagagctatgagctacggccgcccccctcccgatgtggagggtatgacctccctcaaggtggacaacctgacctaccgcacctcgcccgacacgctgaggcgcgtcttcgagaagtacgggcgcgtcggcgacgtgtacatcccgcgggatcgctacaccaaggagtccgcgcggcttcgccttcgttcgctttcacgacaagcgcgacgctgaggacgctatggatgccatggacggggccgtgctggacggccgcgagctgcgggtgcaaatggcgcgctacggccgccccccggactcacaccacagccgccggggaccgccaccccgcaggtacgggggcggtggctacggacgccggagccgcagccctaggcggcgtcgccgcagccgatcccggagtcggagccgttccaggtctcgcagccgatctcgctacggccgctcgaagtctcggtcccgcactcgttctcgatctcggtcgacctccaagtccagatccgcacgaaggtccaagtccaagtcctcgtcggtctccagatctcgttcgcggtccaggtcccggtctcggtccaggagtcctcccccagtgtccaagagggaatccaaatccaggtcgcgatcgaagagtccccccaagtctcctgaagaggaaggagcggtgtcctcttaagaaaatgatgtatcggcaagcagtgtaaacggaggacttggggaaaaaggaccacatagtccatcgaagaagagtccttggaacaagcaactggctattgaaaaggttattttgtaacatttgtctaactttttacttgtttaagctttgcctcagttggcaaacttcattttatgtgccattttgttgctgttattcaaatttcttgtaatttagtgaggtgaacgacttcagatttcattattggatttggatatttgaggtaaaatttcattttgttatatagtgctgactttttttgtttgaaattaaacagattggtaacctaatttgtggcctcctgacttttaaggaaaacgtgtgcagccattacacacagcctaaagctgtcaagagattgactcggcattgccttcattccttaaaattaaaaacctacaaaagttggtgtaaatttgtatatgttatttaccttcagatctaaatggtaatctgaacccaaatttgtataaagacttttcaggtgaaaagacttgattttttgaaaggattgtttatcaaacacaattctaatctcttctcttatgtatttttgtgcactaggcgcagttgtgtagcagttgagtaatgctggttagctgttaaggtggcgtgttgcagtgcagagtgcttggctgtttcctgttttctcccgattgctcctgtgtaaagatgccttgtcgtgcagaaacaaatggctgtccagtttattaaaatgcctgacaactgcacttccagtcacccgggccttgcatataaataacggagcatacagtgagcacatctagctgatgataaatacaccttttttttccctcttccccctaaaaatggtaaatctgatcatatctacatgtatgaacttaacatggaaaatgttaaggaagcaaatggttgtaactttgtaagtacttataacatggtgtatctttttgcttatgaatattctgtattataaccattgtttctgtagtttaattaaaacattttcttggtgttagcttttctcaaaaaaaaaaaaaaaaaaaaaaaaaaaaaaaaaaaaaaaaaaaaaaaaaaaaaaaaaaaaaggggcggccgtataaactaaactaaaaaaaaaaccccccccacccccccctgaaccaaaaacc

SEQ ID NO: 21809 - DNA, 414 bp, Homo sapiens; identical to SEQ ID NO: 21407

SEQ ID NO: 21810 - DNA, 492 bp, Homo sapiens; identical to SEQ ID NO: 21704

SEQ ID NO: 21811 - DNA, 508 bp, Homo sapiens; identical to SEQ ID NO: 21293
  misc_feature 502, 503, 504, 505, 506, 507, 508: n = A,T,C or G

SEQ ID NO: 21812 - DNA, 656 bp, Homo sapiens; identical to SEQ ID NO: 20445
  misc_feature 1, 2, 3, 4, 5, 6, 7, 8, 9, 10, 11, 12, 13, 14, 15, 16, 17: n = A,T,C or G

SEQ ID NO: 21813 - DNA, 523 bp, Homo sapiens
  misc_feature 522, 523: n = A,T,C or G
actattattcccatttacagataagaaaactaaaacacagcaattctcaaatgtttgtttccttactctctggtttcctttgcttgaacaaaaaagaaaaaagaaaaaggaaaaaaatccacttcatttaggaagtctttcccacgtaatacagacccaaattatttctttgagcttccctccaacattcctccactacaaagaagacgacagaaggggaaaagggctgtgatactacaaataaatttaaaaaagcatcaccaaagaaaactagacaaagaacacaaaaaggctccaacatttgaacgtgctcaaacaaataactggaaaagatttttctgaatggtgaatattgtgccaggtattgtcaagaggtcaggaaatggccactcccattcactattggaggaagtgaaaaatcaacaccaactttctatggtgatttggcaataaataccataagccattaaaaaaaaaaagaaaaaaaaagtcgtatcgatgtcgagcgatcatgatgatgann

SEQ ID NO: 21814 - DNA, 879 bp, Homo sapiens; identical to SEQ ID NO: 21368
  misc_feature 1, 2, 3, 4, 5, 6, 750, 846, 852, 872, 879: n = A,T,C or G

SEQ ID NO: 21815 - DNA, 570 bp, Homo sapiens; identical to SEQ ID NO: 21500

SEQ ID NO: 21816 - DNA, 516 bp, Homo sapiens; identical to SEQ ID NO: 21320

SEQ ID NO: 21817 - DNA, 420 bp, Homo sapiens; identical to SEQ ID NO: 21506

SEQ ID NO: 21818 - DNA, 2538 bp, Homo sapiens; identical to SEQ ID NO: 20316
  misc_feature 2538: n = A,T,C or G

SEQ ID NO: 21819 - DNA, 2315 bp, Homo sapiens; identical to SEQ ID NO: 20885
  misc_feature 1, 2, 2313, 2314, 2315: n = A,T,C or G

SEQ ID NO: 21820 - DNA, 506 bp, Homo sapiens
  misc_feature 495, 496, 497, 498, 499, 500, 501, 502, 503, 504, 505, 506: n = A,T,C or G
acttttttttttttttttcgagtgtgtgtgagagacagacagggtcttattgttgtccaggctggctcagactcctaggattaaggatcttcccatctcagcttccctagtagctgtgattctttatctgttctttaaacgcaacaaacgttggctgaacatctacaatgtggcaggagacatgggaaaaaacaaagatgagtaagataaggttccacacccaaggagcttacaatgcagaggaagaaacagacatgttatgtgatggtgctatttgttagagagcccctaatccagctccctcagtctgacttaggtgtccacttggaagctgaacatacgaatggataacagccagacactatataacagaactatggcttaaacaaccgctgctgcaggcagtccaaggaactcaaaatgagatagaaggcgagattcgactccagaggtggggttcagacagccgaccaaattgaggactagctaaaacannnnnnnnnnnn

SEQ ID NO: 21821 - DNA, 2187 bp, Homo sapiens; identical to SEQ ID NO: 21516

SEQ ID NO: 21822 - DNA, 1380 bp, Homo sapiens; identical to SEQ ID NO: 20118
  misc_feature 1380: n = A,T,C or G

SEQ ID NO: 21823 - DNA, 689 bp, Homo sapiens; identical to SEQ ID NO: 21367
  misc_feature 1, 2: n = A,T,C or G

SEQ ID NO: 21824 - DNA, 2071 bp, Homo sapiens
ccggcgcggttgaggccttcggtggtgaacgagtctccagcaccatgtctggtttgtctggcccaccagcccggcgcggcccttttccgttagcgttgctgcttttgttcctgctcggccccagattggtccttgccatctccttccatctgcccattaactctcgcaagtgcctccgtgaggagattcacaaggacctgctagtgactggcgcgtacgagatctccgaccagtctgggggcgctggcggcctgcgcagccacctcaagatcacagattctgctggccatattctctactccaaagaggatgcaaccaaggggaaatttgcctttaccactgaagattatgacatgtttgaagtgtgttttgagagcaagggaacagggcggatacctgaccaactcgtgatcctagacatgaagcatggagtggaggcgaaaaattacgaagagattgcaaaagttgagaagctcaaaccattagaggtagagctgcgacgcctagaagacctttcagaatctattgttaatgattttgcctacatgaagaagagagaagaggagatgcgtgataccaacgagtcaacaaacactcgggtcctatacttcagcatcttttcaatgttctgtctcattggactagctacctggcaggtcttctacctgcgacgctttcttcaaggccaagaaattgattgagtaatgaatgaggcatattctcctcccacctgtgtaactcagccagcagaacatcgctgggacgtgcctggcctaaggcatcctaccaacagcaccatcaaggcacgttggagctttcttgccagaactgatctcttttggtgtgggaggacatggggtacgcggggattccaggctcttctgtgcctgtgggactacattctctgtgccgggcttagagaacacgaagagggagccatctgccacactctggaggctgaagcctgcaccagtgctgctcgcctcactgtggtaggtggtggtgatggaaactgcagatcggccagagtggtagaaaagttgctgcagggtttttctggctttgcctgcccagccgctccatgcctggctagaggagaaggaggagccacatgtggtacactggaggctggagcctgcagatggcatggctctgcggctcaccttgctgcagttggtggtggtgacagagactgcagcttgactgtagtgaatttggaaattatctgtctggaagctctgagtttatcttgggacctcaagaggagaggatcacccaactcacagcaatcaaactccaaatggtgctataaactgaaccacacatggacacgtcagtcttccgaggacccttagatcaaccccaggaggagccctagctgctgttccccattcgacgcccctttccagcaggaagtagccagaagacatcgtcgcccaaacctctaacagcagttagtgcggcatctccacaggggggaatgttgtaggagttattgataaattattttaggcagatagagaggaaaaggggtccttaggaagtttttgttttttaaagcacgtctggaaaagtttcttgtaaagctccagctcttaaagccaggccagttacccgatatccaaatgccagccattagaaagtgggtccacccaaacatggcgattcctgtggacttcttgccctttccccacattcctggatacatggacaccccgaagtatccccacctgtgtagaagatcatggtgccctgcatttgcatattaaaaggctagggtgggagagccagcttttcctgcgggctacgtgaatgacatgcctagtcaaaccaatcccctgagcctgtgcaaatcagacactgcctcctccagcctctgtatatatacctagctggtatctgtggcaggtggggttccctctcttggctttggggccccccttcctctgtctctgtacctgcccgggcggccgctcgactccctgctcctctccctatattactgattgcactgaacagcatggtccccaatgtagccatgcaaatgagaaacccagtggctccttgtggt

SEQ ID NO: 21825 - DNA, 460 bp, Homo sapiens; identical to SEQ ID NO: 20633
  misc_feature 1, 460: n = A,T,C or G

SEQ ID NO: 21826 - DNA, 831 bp, Homo sapiens
  misc_feature 1, 2: n = A,T,C or G
nnccagctgcccccgtgtctttcaatgggagcatttagcccattttcatttaaggttagtaatggtatgtgtggattttatcctgtcgtcatgctgtcagctggttattttgcagacttaacgtatgtggttggtttttagcatcactggactgcgtaattcactgcgttcttcactgcattttgtagtggctggtgatggttttttctttccatatttagtgcttccttcaggagctcttgtaaggtagatctggtgatattgaattccctcagcatttgcttgtctgaaaaggatcttatttctccttcacttatgatgcctaattttgctggacatgaaattatgggctgaaatttcttttctttaatggcagttgatgtgggttggggtgtgtgctgcactcctgtgtgctgtcagtgcaagtacagcaaaacccacctgtgtaaacacacacagcaaagtgatgtaagaagtttccatataaagggctgcagtatggagaggtaatgtgcaggctggtttgcggctgtaggggccaccttgctgcagctctccactgatatggtacggtccactagcacagaaactatggtatgggcacctgagagtgccctgtaagcaggtgtggccaggctggggccctgggagaggcaagcagactaaggagtgctgagatcagaccagccccatctcatgtgcaagactgcccagcctctaaagatcaggtctcagaggagaactctctcaaaagtgaatctccagcacagcacagctgctctacacaatcgtggccagacttcttttctaacggacgcgtgggtcgactcc

SEQ ID NO: 21827 - DNA, 2538 bp, Homo sapiens; identical to SEQ ID NO: 20316
  misc_feature 2538: n = A,T,C or G

SEQ ID NO: 21828 - DNA, 463 bp, Homo sapiens; identical to SEQ ID NO: 21769
  misc_feature 455, 456, 457, 458, 459, 460, 461, 462, 463: n = A,T,C or G

SEQ ID NO: 21829 - DNA, 2538 bp, Homo sapiens; identical to SEQ ID NO: 20316
  misc_feature 2538: n = A,T,C or G

SEQ ID NO: 21830 - DNA, 718 bp, Homo sapiens
  misc_feature 1, 2, 3, 718: n = A,T,C or G
nnngaatctttttctccacaaaggagtcagggttttttgccccaaactctgagatcacatcactcatctgctcacaggccatcattcttaaaatttcaggattggtcctcactctgacttcattcccatcagccacttcaagctcattcctgactcagaccctttgtgcctgctgatccctcctattacggcacctgtcacgtgaaatggtagagcaaaaataggaaatgacattgggtcaacagggcacttggaatgttttgcaaagcacattatctcctgtcattcttacaaccatcatgaagggaatagggtgttggtggtgccagcctagtttaccaaaatgttacaccgtgagtgatgaaaggatcgcactgccatgacttttaaaacaggcttttgctctagttcttacttcagctatccagccatggcgcctgtgattggcatgaattcttctgcatgcattttaatttgttcttattttatagtttgttgacatcggaatagtaacaagtattgaaataaaccataaacaagtggatgttgcaaaaaaaggacaagaagtttgtgtaaaaatagaacctatccctggtgagtcacccaaaatgtttggaagacattttgaagctacagatattcttgttagtaaggtaagtatttcagcaaaagtggcacactttaagcaacagggaatcactcttcttgggtcacctgn

SEQ ID NO: 21831 - DNA, 741 bp, Homo sapiens
actaaagtgtgtaatacatgttcaacttttcatttgattaaaagaagtattatttaatacattcttagtaaagaaaaatttttggattttttgttctaaaaataaattccaaattctggttttctaaacccaaatgaagaatgaatgacaatattcatttactttttctttcattcccttcatatcatatgtaaaaatttgtcagcaaagtgatatattatggaattgctgtcaggaaacacaggtgaataaaggtaatacacttccttctttgtggaaacttgaattattacagagaaagaaatataaaagctgtaccatccacgtcactgggcacctggccgaacatggccaggtagggctcgtagatgaccgaacggaatatccacctccagcgctgctcattctgcctaaggatcccttgcctggccacgccaaaggccaccatccacaccgcaaagaggaacaggaagaagaacacatcgatcagcatcctctgcagcattataatcttgggtcctaagtttctgcttacagtaaaaatgtggatcaatcttagagtgaaaataatgtagtccagacagaaaatgactcgtccagaatacaaagagcttttattagaagagtggagccgaaatacaattcctgctatgaagtaaaaaagccccagcgtgtccatcacattccacaggtcagtaaaataattcaccccatttacgtacctgcccgggcggccgctct

SEQ ID NO: 21832 - DNA, 2224 bp, Homo sapiens
  misc_feature 1, 2, 3, 4, 5, 6, 2220, 2221, 2222, 2223, 2224: n = A,T,C or G
nnnnnngctgccttcttcttgtctcctgtgtgttcggttcggtcgtcattgttgtcgtctctggtctcgttctttctccgtctcctgctgcatttctctcttgtgtttcttcttatctccacccgcgcgtgggtctatttttatcggacttccctcgggtacctcctgtgtgtgggatcgccctttggctcgtcctcgatcgccttctgggatgttttccagaacaacctctcgtctccccgcggcgtctttctttctggggggaggaatccccgcgaccctttgtttctgtccccgcggttttccttggggacccctttgtgccccatgtttcccttcctcattggggcccgccccccccacaaagagtgtggttttttaaaaactctttttctggggctcctgtgcgccccaaaacaatttttttttttttggtttttttttttttaaaagaagaaaataaaaaaaaaaagagggtacaaagataataaaattcaccacagagaacattagaaaatcataagtgaattaccaaactgacaaggcagttgtagaaaaagagtcactggtgggaaaggtagcctctactaaataaaagtctttttattgttggcagttggattcagtagtacctacgtgggtaagtttagaaatgttataatttcacggaagaggaacagcatataattgtatcttgcctataaattgttctattttaataagggaaatagcaaattggggtggggggaatgtagggcattctacagtttgagcaaaatgcaattaaatgtggaaggacagcactgaaaaattttatgaataatctgtatgattatatgtctctagagtagatttataattagccacttaccctaatatccttcatgcttgtaaagtactccctaatgaatggttatgcaggcaggagaacttctcaggaagagaaaaggagaagactaactctacagagatttttgaaagactccgtgggatctcagcaatttgttaacactgctagggcccttcactgcatagggaggcatatggactgccatgggtctccaggctcatgttccaagcaagaatagggtaagtaactgtgaattaccctacaagcagtaataagtttattataataatatttttatacatttttggatgcacccaacccactctaaagaatgtcagtgactttatacaaaagaggaagcatctagattggcattgtgaacataatgcataggggcgcggcgggagctctagagcctagtggttaaaaccgtggcctctggaatatgactacctggacttgaatgctcactctgccatttattaactgcatgacctttgaaaaataacttttctatccttcggtccctcatgtgtaaaatgaggataataactacttatctcacggggttgttctaagtattaaatgggataatacaagtaaagtacttagaaccatgcctagcacatcagaatccctcaaagaacatcagtataatcctataccatagcaagtggtgactggttaaggtgcgacaaaggtcagctggcagattacttgtgtgcaaacttgatacttttgttctaagtaggaactagtatacagttcctaggattggtaccgtattagagatagcagttttggaggccaaatgttactgaatcctcttcctgatcagtatattaatatgaaaatgaaactgctctgtaacacaataaagaataaaatctttcatgaggtatgtattatcagtatgtatttcatgtctcaaatatattttaaatataatttcaggtttaatttgtctttttaatttgtgtctcttcatataatcacattgcttcatacaattaatttcatccttcaaatcctattttatgagagaaatataggaatgctatcatgcagccttacctagatgctaacataacgtgtcctttcttaaaaaaatgtataataatgcatttctactttttcaagttgaataattaaaatcttaatcttcagaaaaaaatgtatatccattgaattattttaaaagcttaaaattctgctggtttgcaaattgtatataacattatatctatattattaactgtaagtatttttgcctgattatgaaatataaagtaacaacagggttacagttgtgcaaaacaaaacaaaacatacctaaattacaataatatgttgactagaaaaattcatannnnn

SEQ ID NO: 21833 - DNA, 2538 bp, Homo sapiens; identical to SEQ ID NO: 20316
  misc_feature 2538: n = A,T,C or G

SEQ ID NO: 21834 - DNA, 731 bp, Homo sapiens; identical to SEQ ID NO: 20529
  misc_feature 1, 2, 3, 4: n = A,T,C or G

SEQ ID NO: 21835 - DNA, 578 bp, Homo sapiens
  misc_feature 1, 2: n = A,T,C or G
nnccaagtggcctacaagagaatactgctaaggctgttaacacatacaatttatgcaggagaatattccaagcttcctgactgcatcacacttttaactttttcttacattcgaaactacacttagaatcataacaaacttcatttttcaaacgtttgactttgaggtgtgtacaagtatactccgactctataaacttactcttctttaaagcagatcatcctatttatcataagattattaaaaatgtatacctttgcttttatttgccataaaaaaagctttctttggaataaaatagatttttatccaaagatgcagaactgttttcaagataaatccaatctgatcaatttgacagattaagactctcttcaatagtaattcctcaaattatttaaataatttatgaaacagtaaaggcttaaaatatgaattacatagccttaaaagttctagatccttcatggattttatttttggtttattattgcaggaaaattacatacaaatcttttgagaaaaataacaaaaccaagactttttttcccagtttgctataagcgagctcaataaat

SEQ ID NO: 21836 - DNA, 1001 bp, Homo sapiens; identical to SEQ ID NO: 21314
  misc_feature 681, 682, 683, 684, 685, 686, 687, 688, 689, 690, 691, 692,693, 694, 695, 696, 697, 698, 699, 700, 701, 702, 703, 704,705, 706, 707, 708, 709, 710, 711, 712, 713, 714, 715, 716,717, 718: n = A,T,C or G

SEQ ID NO: 21837 - DNA, 1270 bp, Homo sapiens; identical to SEQ ID NO: 21710
  misc_feature 1, 2, 3, 4, 5, 6, 1263, 1264, 1265, 1266, 1267, 1268, 1269,1270: n = A,T,C or G

SEQ ID NO: 21838 - DNA, 3053 bp, Homo sapiens
  misc_feature 3050, 3051, 3052, 3053: n = A,T,C or G
ggagtcgcccacgcgtccggcccgcggccctggcttcgggcttcagggagctctggtgcagtctccgcctgtcagtgccggcagtcgtccgcggcgcccgccccggtcccgcactggtgcagccatgtcctcttccccgtgggagcctgcgaccctgcgccgggtgttcgtggtgggggttggcatgaccaagtttgtgaagcctggagctgagaattcaagagactaccctgacttggcagaagaagcaggcaagaaggctttagctgatgcacagatcccttattcagcagtggaccaggcatgtgttggctatgtttttggtgactctacctgtgggcagagggctatctatcacagtttgggaatgactggaattcctataatcaatgtcaacaataactgtgctactggttctactgctttgtttatggcccgccagctgattcagggtggtgtggcagaatgtgtcttggctcttgggtttgagaagatgagtaagggaagccttggaataaaattttcagatagaaccattcccactgataagcatgttgacctcctgatcaataagtatggattgtctgctcacccagttgctcctcagatgtttgggtatgctggaaaagaacatatggaaaaatatggaacaaaaattgaacactttgcaaaaattggatggaaaaatcataaacattcagttaataacccgtattcccagttccaagatgaatacagtttagatgaagtgatggcatctaaagaagtttttgattttttgactatcttacaatgttgtcccacttcagatggtgctgcagcagcaattttggccagtgaagcatttgtacagaagtatggcctgcaatccaaagctgtggaaattttggcacaagaaatgatgactgatttgccaagctcgtttgaagaaaaaagcattattaaaatggttggctttgatatgagtaaagaagctgcaagaaaatgctatgagaaatctggcctgacaccaaatgatattgacgtaatagaacttcacgattgcttttctaccaacgaactccttacttatgaagcactgggactctgtccagaaggacaaggtgcaacgctggttgatagaggagataatacatatggaggaaagtgggtcataaatcctagtggtggactgatttcaaagggacacccactaggcgctacaggtcttgctcagtgtgcagaactctgctggcagctgagaggggaagccggaaagaggcaagttcctggtgcaaaggtggctctgcagcataatttaggcattggaggagctgtggttgtaacactctacaagatgggttttccggaagccgccagttcttttagaactcatcaaattgaagctgttccaaccagctctgcaagtgatggatttaaggcaaatcttgtttttaaggagattgagaagaaacttgaagaggaaggggaacagtttgtgaagaaaatcggtggtatttttgccttcaaggtgaaagatggccctgggggtaaagaggccacctgggtggtggatgtgaagaatggcaaaggatcagtgcttcctaactcagataagaaggctgactgcacaatcacaatggctgactcagacttcctggctttaatgactggtaaaatgaatcctcagtcggccttctttcaaggcaaattgaaaatcactggcaacatgggtctcgctatgaagttacaaaatcttcagcttcagccaggcaacgctaagctctgaagaactccctttggctacttttgaaaatcaagatgagatatatagatatatatccatacattttattgtcagaatttagactgaaactacacattggcaaatagcgtgggatagatttgtttcttaatgggtgtgaccaatcctgtttttcctatgctctgggtgaatagagcctgatggtatactactggcttgcggaattgcatacactgtgcttacaaagttaatatggaattatggtcggggcaacatgggttcagaataaaattaggaacagtaaatccacagaacttgttttcacaacgcttggctcgcttacaaagtatattaggattatctggcgaaagattccgggaaaaaaaacgccgcgcgtggggggcaactaaggacgcagaagacagacgagatgagaagagcgaatacgacgcaacaagcacgcagcacaagacgaacaggcacaacgcggagggtacgacagagagagcaacgaacctaataccgacggaaagaggcaacggcggagggaggaggagaagacagacgaggaaagagaggagagcaagagcagaacacgaaaaagaaaagaagcaagaaagaagagacgagaagaaaaaacgaaaaaggaagcgagcagaagaagagcaaagaagaggaagagagaggcggaagaaggaacgaggacgagagagaagaaacgagacagagaaaagagagaaagaggcacagcacagaggagagaagaaagagagagaaaagacgaaaagacgggaaggaaaggggaaacgagagagacacacgaaaagaggaggaggagcgagcgcgagagaaaggaagggaacgggggggacaaggaaaagagagcagaaagcagggccggagaaccagacggagacaggcgagcgcagagagcaggcgagggaaggagacagagccgggcaggaaaagaagcgagagccggcgagacagccgacacgggacacggcacagagacgagcaacgaccaagaacgaagagaagacacaaagaaggacgagacgcgggagaaacgaggatcgagacgagtaaaggagagaagaacgacacgcgagacaaacgagaaacaaaaggaacgcgacgcagagagaggaaagagaggaggaggggcaggagacacaagagagagagaggagacgacagccgaaaaaagcagggagagacgccaacagcagggacgacacagagagccgaacgcgcagaacagacaagacacaagagggagtagccgacaaaacaaagaacgacnnnn

SEQ ID NO: 21839 - DNA, 801 bp, Homo sapiens
  misc_feature 528, 532, 587, 624, 635, 651, 657, 666, 669, 678, 689, 696,699, 714, 720, 732, 733, 743, 744, 774, 796, 797, 798, 799,800, 801: n = A,T,C or G
acatggggaaaaaatcagtttcaatagtcaagttagctttgggaatagaactgggttaaactgtgtttaaaaggtctctttaatgcagtaatcctaagtctttaacatgctaatacgcactgtggctttcaaggaaaggatctagtgttttccaaactctgttttcaaaattttgattacagcattcacctccctctttttttccccaatgtcctgtagaaaacactgagagaactgacatttttaactttatatggaaagaatcgtaaatatggtgaatctggatgtcctcatcaaccagcttcaaagactatcacccatgcaatcttgtttcatctgcatagccactcatttcccacacacacccacttgagttttttaagttatttcatgcaccatatcatccagaaatagaaaaatgtcattttaaagcatcctgtctcccctaacccagagaaaacccacaagttcagctgatccaagacagaaaaattccatctcatttcaccggtgttaagaaaggaatgnatgncttaccaaggtatacactcttctcattcttcatggttgactttctttcatgcagnattctttaaatcaagtaatataaatattcttgggttnttttttttttntttttgaggcaggggncttacntctggccgnctngggggtggngtgcaattggngtgatcnttnggtcactttggaccntggggnggcaggagggtnnagggggccanngttggtgccattggacttccatgccttggntggcaaggggaaggcttcaggnnnnnn

SEQ ID NO: 21840 - DNA, 383 bp, Homo sapiens; identical to SEQ ID NO: 20349
  misc_feature 383: n = A,T,C or G

SEQ ID NO: 21841 - DNA, 3881 bp, Homo sapiens
  misc_feature 1, 41, 3878, 3879, 3880, 3881: n = A,T,C or G
ngtctccttttatacttgaagcagaacacatagcatttgtnactggagagcatttgggtacaaagtgagaatttacagagatcatcctcttcagaaacagttcggtttttgcccactagggatgatgtggtttctcatgaggttacttgctctaaaggactttatattttggaaccataagagcacccttgtggcccaggcactttatggatgatcccttttagtgctcccagtaaccttccaagattgtcaagtggtcagactgttgtttgccattagcttgcagacctggggatccttatcggctaattgctgaagcaagtgtggacaacttcagcaagctgggggtggcgttcatggaagatagactccacatggataatggactggtaccccaaaagattgtgtcggtgcacttgcaggactccactctgaaggaagttaaggatcaggtctcaaacaagcaagcccagatcctagagccgaagcctgaaccttctcttgagattaagcctgagcaggacggtatggagcatgttggcagagatgacccaaaggctcttggtgaagaacccaaacaaaggagaggcagtgcctctgggagtgagcctgctggggacagtgacaggggagggggccccgttgagcattatcacctccatctgtctagttgccacgagtgtctggaacttgagaacagcaccattgagtcagtcaagtttgcgtctgccgagaacattccagaccttccctacgattatagcagcagtttggagagtgttgctgatgagacctcccccgaaagagaagggaggagagtcaacctcacgggaaaggcacccaacatcctcctctatgtgggctccgactcccaggaagccctcggccggttccacgaggtccggtctgtgctggccgactgtgtggacattgacagttatattctctaccacctgctggaggacagtgctctcagagacccgtggacggacaactgtctgctgttggtcattgctaccagggagtccattcccgaagacctgtaccagaagttcatggcctatctttctcagggagggaaggtgttgggcctgtcttcatccttcacctttggtggctttcaggtgacaagcaagggtgcactgcacaagacagtccagaacttggttttctccaaggctgaccagagcgaggtgaagctcagcgtcttgagcagtggctgcaggtaccaggaaggccccgtccggctcagccccggcaggctccagggccacctggagaatgaggacaaggacaggatgattgtgcatgtgccttttggaactcgcgggggagaagctgttctttgccaggtgcacttagaactacctcccagctccaacatagtgcaaactccagaagattttaacttgctcaagtcaagcaattttagaagatacgaagtccttagagagattctgacaacccttggcctcagctgtgacatgaaacaagttcctgccttaactcctctttacttgctgtcagctgcggaggaaatcagggatcctcttatgcagtggcttgggaaacatgtggactccgagggagaaataaaatccggccagctctctcttagatttgtttcatcctacgtgtctgaagtagaaataaccccatcttgtatacctgtggtgaccaacatggaggccttctcatcagaacatttcaacttagagatctatcgccaaaatctgcagaccaagcagttggggaaagtaattttgtttgccgaagtgacccccacaacgatgcgtctcctggatgggctgatgtttcagacaccgcaggaaatgggcttaatagtgatcgcggcccggcagaccgagggcaaaggacggggagggaatgtgtggctgagccctgtgggatgtgctctttctactctgctcatctccattccactgagatcccagctgggacagaggatcccgtttgtccagcatctgatgtccgtggctgtcgtggaagcagtgaggtccattcccgagtatcaggatatcaacttacgagtgaagtggcccaacgatatttattacagtgacctcatgaagatcggcggagttctggttaactcaacactcatgggagaaacattttatatacttattggctgtggatttaatgtgactaacagtaaccctaccatctgcatcaacgacctcatcacagaatacaataaacaacacaaggcagaactgaagcccttaagagccgattatctcatcgccagagtcgtgactgtgctggagaaactgatcaaagagtttcaggacaaagggcccaacagcgtccttcccctttattaccgatactgggtccacagtggtcagcaagtccatctgggcagcgcagagggaccaaaggtgtccatcgttggcctggacgattctggcttcctccaggttcaccaggagggcggcgaggttgtgactgtgcacccggacggcaactccttcgacatgctgagaaacctcatcctccccaaacggcggtaatgccgggcgtccccgagacgcggctgcctgtccgtgcccatgcatctggaaatctaatttagagttgtaggtgaattttcttttcctccaattcatttgttaagtctttgttctttttctgtgtttctgtttgtttttaggtttgttttgttgtcgttttctttggtgtttgaagaggctctgggatagatggttaagaagtagaaaatttagtttagggaaagccctcccacaggtgggaaattgctctcccctctgtggcttggacttacgtttattgtcaaggggagtttttacatggaaatgacaatgggaaaattcagatattttcttagtagtgcagacctttacccctagtctatgaaaaaacaaaccaaaatatgctcttgcgcccaggccagtggtgagttagaggtatgctatcactgtttgtaagcatctggggaggtactgaactgtaagaacatgcttggacacttagtcattgttctgtgtttttattaatgaagaaaagggaagacagacttccaagagttactgtccacccggtggtgtggccccatagcgaagtctaaatgcctgtagagatagagctagctggtgtggttgcagtgaccttgtagaggaaatcagttcattactttgacatcattcagtgagctctcctttcctaaggaagtttaaatgtccttagttagggactgactttcttaagtaagtttaaatttactacatattgtgaagagacaggatcaagttcagaatccttaaatgtctgattaggcatcacttggatgaggaggtgggcgatttggctctgacagctggagatgaaggcacactcataccacatacaagggaggatttggagcttttaagccagtttcagatttactctgaaatgtggagcattcctgcaagactgtgcagctcacggaatatagaagacatggcattttactcagaagtcataagtttttgcccccctcatttacctcgtattaccaagaaagaaaatgttatcgatactaaacaccatcagttcagagggaggatgtgtgtgtgtgcccgcatatgtgtgtgcgtgcgtgtgtgcgcacatagctttaaaagaagacattcaaaatttgatgtgctacaagcctcatgaaagaacaaaagaaatgaagccttttgatatgcattcgctattccagatgtacgccatgcttttcatgttcctctatttcggggacttgaatctacccttcttccggtttaaggccttggccggttctttccgggccggtagggagacatgggggctttgacacctttgggcacctttggctccgggccaannnn

SEQ ID NO: 21842 - DNA, 643 bp, Homo sapiens; identical to SEQ ID NO: 20678
  misc_feature 1, 2, 640, 641, 642, 643: n = A,T,C or G

SEQ ID NO: 21843 - DNA, 2012 bp, Homo sapiens; identical to SEQ ID NO: 20122

SEQ ID NO: 21844 - DNA, 2491 bp, Homo sapiens; identical to SEQ ID NO: 20436

SEQ ID NO: 21845 - DNA, 1839 bp, Homo sapiens
  misc_feature 1, 2, 3, 4, 1834, 1835, 1836, 1837, 1838, 1839: n = A,T,C or G
nnnnacgcgtccgcataaagaagaaagccctcctcagcttcccatagcgcaggagacttgctcgaccagagaacctacggtcagacgacacatccactgccacacccatacccaagccgggacgcggaaccgcttctacccgcccacaccggagaggttgctcgcgattggccgggcgggcacagaggcccgccttccgaaggtggcagagcagcctccccaactaagcctgggtcgccgcctcggtgaagggccgcggggccgagcgcgggaagtggcgtccagtcggtttttggcaggcgagagccagagcgtgagaaccctcccacggcgaggccaagccctgagactggactagcaaggtcgtgagtctctctgtcagctctccgcagcgaaggggcgcggggggcggggaccgtgcccgaccgtgccagctcccgccccggaagcggaagtgcaagcactgcggggtcctgtccagtgtgagcccgacccgagctccagtagttccgcccgctggtcatcgcgccctttcccctgccggtgtcctgctcgccgtccccgccatgctgtctctagactttttggacgatgtgcggcggatgaacaagcggcagctctattatcaagtcctaaattttggaatgattgtctcatcggcactaatgatctggaaggggttaatggtaataactggaagtgaaagtccgattgtagtggtgctcagtggcagcatggaacctgcatttcatagaggagatcttctctttctaacaaatcgagttgaagatcccatacgagtgggagaaattgttgtttttaggatagaaggaagagagattcctatagttcaccgagtcttgaagattcatgaaaagcaaaatgggcatatcaagtttttgaccaaaggagataataatgcggttgatgaccgaggcctctataaacaaggacaacattggctagagaaaaaagatgttgtggggagagccaggggatttgttccttatattggaattgtgacgatcctcatgaatgactatcctaaatttaagtatgcagttctctttttgctgggtttattcgtgctggttcatcgtgagtaagaagcctgccttgctgttcctgggaagatgccatagttttcgttactggatgtttggagtagatactggtctgtgattggtggaatggagaacacacgtgttggtgcttctgggtagcactggtttgcattagtttatgtttccatgccagagtttgtgtgggcgggcgcatgtgcaccacagagtgcactcgaggggactttcagtcacaggatttcataattgtcattgtcacactttcaaatttttgtacatcagtgaatttttttatattaaaaggttgagccaaagcccccagtgtttgtattttgaagccaagcttcacttctaaagtgcctacagagacttgtaaatgaaaatgcagctctgcacgagtttgaaaccgtcatacctccttctattaggaatggcatatactgaggtggtcgtaagtcttaacttctaaaattttaaataaaagactttgcacattgaacaaaaaaaataaaaaaaaaaaacacacgagcccacaacactctgggggcccccccccggggccccccaacacctttttgggcacacttgttggggggggccgggccccgtggtcgggggaaacggggcaccggcgtgtcccaggggaccccgggccctggcctgggtcggggtttctccccaaaaaaaacgcggggggaccggggttggaaacaccaaggggtcgggggcctcgcttacaggggcgggacggnnnnnn

SEQ ID NO: 21846 - DNA, 862 bp, Homo sapiens; identical to SEQ ID NO: 21330

SEQ ID NO: 21847 - DNA, 668 bp, Homo sapiens; identical to SEQ ID NO: 20192

SEQ ID NO: 21848 - DNA, 1001 bp, Homo sapiens; identical to SEQ ID NO: 21314
  misc_feature 681, 682, 683, 684, 685, 686, 687, 688, 689, 690, 691, 692,693, 694, 695, 696, 697, 698, 699, 700, 701, 702, 703, 704,705, 706, 707, 708, 709, 710, 711, 712, 713, 714, 715, 716,717, 718: n = A,T,C or G

SEQ ID NO: 21849 - DNA, 4333 bp, Homo sapiens
  misc_feature 4152, 4164, 4225, 4244, 4257, 4266, 4278, 4324, 4333: n = A,T,C or G
gcgtccggaaaaataaaaccgctagctccacgacaaaggagaaggagacaaaactacctttactttcccgtgttccaagtgctggttcctctctagtaccattaaatgctaaaaattgtgctcttccagtttctaaaaaagataaagagcgttcctcatctaaagaatgttctgggcattctacagaatccaccaaacacaaggaacacaaagcaaagactaataaggccgattctaatgtatcttcagggaaaatttctgggggacctttgcgctcagaatatggcactcctacaaagtctccccctgctgctttggaagttgtgccatgtatcccaagccctgcagcaccttcagataaagccccttcagaaggagagagttcaggaaattccaatgcaggtagcagtgcactgaaaagaaaactaaggggtgattttgatagtgatgaagaaagtttaggttacaacctagacagtgatgaggaagaggaaacattaaagtcactggaagaaataatggctttgaacttcaatcagactcctgcagctacaggaaagcctcctgctctttccaaggggcttagatctcagtcatcagactatacaggacatgttcatcctggaacttacacaaataccttagaacgtctagtgaaggaaatggaagacacacaaaggctagatgaactgcagaagcaactacaagaagacataaggcaaggccgaggcattaaatccccaatcagaattggagaagaagacagtacagatgatgaggatggcctcttagaagagcacaaggaatttctaaagaaattttcagttacaattgatgctattcctgatcatcatccaggtgaagaaatatttaatttcctcaattctggaaaaattttcaatcagtataccttggatttaagagactctggttttattggacaaagtgctgtagaaaaacttattcttaaatcgggaaaaacagatcagatttttttgacaacacaaggtttccttacgtctgcttatcactatgtccagtgtcctgtccctgtgttaaagtggctgtttcggatgatgtcagttcatacagactgtattgtgtcagtgcagattttaagtacattgatggaaataacaattagaaatgataccttcagtgactcaccagtttggccatggatcccatcattgtctgatgtagcagctgtgtttttcaatatggggattgattttagatctttgtttcccctggagaatcttcagccagactttaatgaagactatctagtttctgaaacacagacaacatcaagggggaaagaaagtgaagattcatcttataagccaattttttcaacacttcctgaaaccaacattttaaatgtggttaagtttctaggcttgtgtacatctatacatccagaaggttaccaggatcgtgaaataatgttgctgattttaatgttatttaaaatgagtttggaaaaacagctgaaacagattcctttagtagactttcaaagcctcctgataaacctgatgaaaaacatcagagattggaacacaaaggtgcctgaactctgtctgggcataaatgaactctccagtcatccccacaacctcctgtggttggtacagctggtccctaattggacatcacgtggaaggcaactgagacagtgcctcagtctagtgattatttcaaagcttttggatgagaaacacgaagatgttcctaatgccagtaatctgcaggtatcagtcctacatcgctatcttgtgcagatgaagccttctgatttgttaaagaaaatggtcttgaagaaaaaggctgaacaaccagatggcattattgatgacagtcttcatttagaacttgaaaagcaggcatattacctgacctacattcttcttcatttagtcggtgaagttagttgttctcattctttttcttctggacaacggaaacactttgtgctactctgtggggctttggaaaagcatgttaaatgtgatattagggaagatgcaagacttttttacagaactaaggtgaaagacttggtcgccaggatacatggaaaatggcaggaaataatccagaactgtcggcctactcaggggcagcttcatgacttctgggtaccagattcttaataggagttgcagcagcaaaaatatgaaccaagagaaattcaataagagcctttcatagaggagtagaaaggattattacagaatccaatgaatgccaagaaaatgtacagcaaatgtgccacttgaatatctagtatgaagctggtaatgaagaaattgccatttctgaagcagatatgaaatatgatctgcttaattgttaaggcaactgacctttcaaaagtgcagagtcttattaaaagaggggaggggtagaagcagaataatagtcatatgtctaacctgccccagttaactcctcttgttaaattataagccagttatcttttttagatagtatttttgtcacttggataatcacaggaaatatataagaaaagagcttggactaacttgagaagttggacatggaaagcaagaccaagttccagttgggtttaattttccctcttggttattttcggacacaaagggaatgcttaaaactgagtttagtaataaaaagcataaatctcttctgtaacttttataaaccacagggaggtttcaatccatgcattttccttcattactcaagattataaatctgtttttaaaatacatctaaacaaacagttgagaaacaaaagtttggcatgttgtcagatccccttaagaggaagaggttaagctgtaaagtagtggccctgttttgatgccagaacattcatatgctgtttgttctggatttcttttaaatgcatgtattttaaatactggttaaatcttagaatcttggctatatcttagaattctggctcttggtaaccatattacagaagtctatattgtaaaagcctaaagatctggacaagtttccaacaaccttgtttccatgagtatataattttggcagacacctgaattctttgggacactgtgtctgtgtatgtgtgtgtgtgtgtgtgtgtgtgtgtgcgcttgtatcttgaagttgttgcacttcaaaaccacagctgctgtaaattcttaaacactggagagccatcctttggtttaaatggtagagggttagtggaagtgcacacgttgtttttagcccaggggtagtaacaaactcttactagccaactagaaaattattttgttgacgagatgtcccttttaggagggtttgtttcctgaaagaatgccaactttttttgttgttctttcagtattggcttgagtgacctgttctcctgagtgctctagtgtctccagttgtgggggggaaagatgatggaggggaacagaaactggacttgatgtttgcggtttgagaggcaagaaaataaaataactttctacctctaaattgaggcttaggagtaaaaagcattttgtcctaaatttatcatttaaaatagcatcagtaacttttgagctcatgtcaatcaagcattggcagtcagagattttatagggaagactaagtaaatccagtttccaagaacctaaactgattgaggctccaagagtcagaccaacaaaagttttattctgtgttgtttactggtaagaatattattatcttgatactacctctcaagggtattgttacaaaatgccacttatggttaaagagatagatacaaagagttctatttgacagaagcttgaaactctggcatctatctgcccaacgatgggggctttcgttctgtaatttaatcctttgtagatacattatttgtgtgtaattttatacgtgttcatatttttctcattttgcattgtgtaaagtgtacaaaatctcaaagtataaaatactgcttatattgcttgtaatttacagtgtgtaaatattttctaattgtgtacattgatgggggggacaagtgggttattcaggtttttttttaatgacccttttgtattgcagtttcaacagataactgtccatcaaatttaaaaccactttgatacatttttatttaacagttccaataagaaaaaaatctctatttttaantatatttctccnttagaaaaaaaatacttcatgggccctctaaaataaatggccagacctcagtttaggcccntgtatttatgactctggtngagggtcttcagnctccagggncataggtccagncagtattttgcatttggggttctcatgaaaacttttgtgactctcntttaggcan

SEQ ID NO: 21850 - DNA, 7327 bp, Homo sapiens
cgacccacgcgtccgagtcactcatcattatcttgtacaagagtccactgataaagaaggaaaggatgagttattagaggatgttgttccacaatctatgcaagatttgctgggtatgaataatgactttcctccaagagcacattgcctggtaagatggtatgggctacgtgagttcgtggtgattgcccctgctgcacacagtgacgctgttctcagcgaatctaagtgcaaccttcttctgagttctgtttctattgccttgggaaacactggctgtcaggtgccactctttgtgcaaattcaccacaaatggcgaagaatgtatgtaggagaatgtcaaggtcctggtgtacgaactgatttcgaaatggttcatcttagaaaagtgccaaatcagtacactcacttatcaggtctgctggatatcttcaaatcaaagattggatgtcctttaactccattgcctccagttagtattgctattcgatttacctatgtacttcaagattggcagcagtatttttggcctcagcaacctccagacatagatgcccttgtaggaggagaagttggaggcttggagtttggcaagttaccatttggtgcctgcgaagatcctattagtgaactccatttagctactacatggcctcatctgaccgaagggatcattgtggataatgatgtttattctgatttggatcctattcaagctccacattggtctgttagagttcgaaaagctgagaatcctcagtgtttgctaggtgattttgtcactgaattttttaaaatttgccgtcgaaaggagtcaactgatgagattcttggacgatctgcatttgaggaagaaggcaaagaaactgctgatataactcatgctttgtcaaaattgacagagccggcatcagttccaattcataaattatcagtttcaaatatggtacacactgcaaagaagaaaatccgaaaacacagaggtgtagaggagtcaccgctaaataatgatgttcttaatactattctcctgttcttattccctgatgctgtttctgagaaaccattagatggaactacttcaacagataataataatcctccatcagagagtgaagactataatctctacaatcagttcaagtctgcaccatctgacagtttaacatacaaactggctttgtgtctctgtatgatcaatttttaccatggagggttgaaaggagtggcacacctctggcaggaatttgttcttgaaatgcgtttccgatgggaaaacaactttctgattccaggattagcaagtggacccccagatctgaggtgttgtttactgcatcagaaactacagatgttaaattgttgtattgaaagaaagaaggcacgtgatgaggggaaaaagacaagtgcttcagatgtcactaatatatatccaggggatgctggaaaagcaggagaccagttggtgccagataatctaaaagaaacagataaggaaaagggagaggtaggaaaatcttgggattcctggagtgacagcgaagaagaattttttgaatgcctaagtgatactgaagaacttaaaggaaatggacaagagagtggcaagaaaggaggacctaaggagatggcaaatttaaggccggaaggacggctctatcagcatgggaaacttacactgctgcataatggagaacctctctacattccagtaacccaggaaccagcacctatgacagaagatctgctagaagagcagtctgaagttttagctaaattaggtacatcggcagagggggctcaccttcgagcacgcatgcagagtgcctgtctgctctcagatatggagtcttttaaggcagctaatccaggttgctccctggaagattttgtgaggtggtattcaccccgggattatattgaagaggaggtgattgatgaaaagggcaatgtggtgctgaaaggagaactgagtgcccggatgaagattccaagcaatatgtgggtagaagcctgggaaacagctaagccaattcctgctagaaggcaaaggagactctttgatgatacacgggaagcagaaaaggtgctgcactatctggcaatccagaaacctgcagaccttgctcggcacctgttaccttgtgtgattcatgcagctgtactcaaggtaaaggaagaagaaagtctcgaaaacatttcttcagttaagaagatcataaagcagataatatcccattccagtaaagttttgcacttccccaatccagaagacaagaaattggaagaaatcattcaccagattactaatgtggaagctctcattgccagagctcggtcactaaaagccaagtttggaactgagaaatgtgaacaggaggaggaaaaggaagatcttgaaaggtttgtgagttgcctgctggagcagcctgaagtgttagtcaccggtgcaggaagaggacatgctggcaggatcattcacaagctgtttgtgaatgcccagagggctgcagctatgactccaccagaggaggaattgaagagaatgggctccccagaggaaagaaggcagaactccgtgtcagacttcccaccccctgctggccgggaattcattttgcgcaccactgtgccgcgccctgctccctactccaaagctctgcctcagcggatgtacagtgttctcaccaaagaggactttagacttgcaggtgccttttcatcagatacttccttcttctgattcttctagcattactcgttggtggcttcagagacagtgctgcctcctcctgagggagggaaggtaccagggagaacctgggaggtcctggagagggccctgtccagttgggtgatcaggaatcaaaccagcatcggaaagacttcccagcaccaagcttgagctgtgtcgtttcgtggagggggcagcgaggatgggcttgagctgttgagagatttctgccctagagatggcctttgtatatgggggggtggtggggggacacaaacacatcagacactccgtcctcacactggcaggacggtgttcatcgcattctcttctgtgaccagcctctaggctagcggctgcattcgtggtctgtgcaaacacttcgtggttctatatatcagcagcaagtgtgcaaaataaaggacctgttaactcagatttctggatattttggtggtagcttctagtcccagaatctgtgtttttaaaatactacatgacattctgtctattcaatcacctggtggtcatctttcttgtactattttttctagaaccatagagggatgacagtaactggcttcttagagcaattttgcctggtgtctggatcctgtgggaatttattagcctgctttgtggcccttggccaaccctggtaggacatctagagaagaattcaattctgctttttcccagaataattgttgactaactcggcaacaccaaagtgtcacaggcatctttgtgtcccccagagtccaatgatatgtggacccaagaccagcgagggtcatgtttctgggaatacagtgttggttcttagaatttatatattttttctcatgaacttataaaaatgtttaaaaacaaactcaacaaccctgattttaaagagaatgagcacacgccccacgacttccctctagaagcattttaagcattttgcttttcaaaaaacaatcatttctttttgatgaccatgacttcaaatgccctgcctgctgggccagttgtgactcatcaaatagcaactgatttcaataattcacccttagaatgggggtgcttgcaggagccctagtttataactggatgaaatgatacgcagccaagggcctttatttgagaaattaaatctaaacgcagacactaacagccatgtgtcttctgctcttaggagggtttactgtgaaagagccacacagagtgttcgacatgcctcttagcagccgaatgaccttcaaagttctttaaccttgtaactgcaaataggaaaatggtctcacatacgttagtctaccccctttcaatgtagatcaggtgttttttttttttttttggacatctcagatgtgactcttgctgccaggctagaatttaggctatgtgataattctcagctgtcctacaatgcctgcttcttgaaagaagtcggcactttctagaatagctaaataacctgggcttattttaaagaactatttgtagctcagattggttttcctatggctaaaataagtgcttcttgtgaaaattaaataaaacagttaattcaaagccttgatatatgttaccactaacaatcatactaaatatattttgaagtacaaagtttgacatgctctagaatgacaacccaaatgtgtcttacaaaacacgttcctaacaaggtatgctttacactaccaatgcagaaactgtgtttgttttcctctctaaaaaacaggatgtgtcaaaatgataaatattctaagattaaagtggcaatgctcagattcccaatcttaccagttctgggattcactctgccctcctagaagactgaggggaatatgctgtacttacatgtccatggaaccttccttcctcctagaatcccaagcgttatgcagattcattatagcacaacattcccgtcaggaagagaggtttgacacatgattaaggggaaacttgtggaaagagaaatgtttaaggtcctgcagaaagtcagtgactgtaatgacctttttcatttatattccagtgcctgtatttaaaccatgcagtggatttgggataatatacataaggcacctaacataacataggaactcgtaaatgattgtcgctcttgagctggcaatgaaaaccgacttcgtggatgctctgcctagaaattatgctaaggacaaaggaagaggcaaagtcctaaaaactaaacaaaaactgcctccctacacctcataaccagcggaccaaccaatcaagctaataccaacacagctaaggcaacaacactcagattgaaaatgtaccccatgggagggaggctgacgtctggaggtctaactctcccttctgtcacactgacatcacttccttggccccaacctgaaaggtggcacatatagcccctggtgggcagacagggaaagcaaattcctcttactccagggagctggttagtccttcttcctcccacttcccatctccctcagagtgaggtcagactttgttgtggatattgttttggagaacttccaccctcttctataaagtgggactgtatggtccaagatgagacctatgctgccagtgcccagctgaagttgtagatgcttttactgcatgcctgacatgcctcttacaaggttttggagaactccaaatagtcctaggatgaccagaaggcatagtcatgttatttgcatctttagttatcaactccaaatagtggctctgctaagattgccacctgtccaacaggaaatggaaagaaaacacttctcattcctgcataccacaccactagacaactggaaatacttctgggtcattaccatcctaggatacttttaagccgatgatctcaaaccgactacctgtgtgttccatgtctttcctctaattcatgccgctctttaaatgctatgttaagaatgcaaagctataaaaatgatcttttttcctgctgcaccataagaagccttttttggttgttctattagaaaagaattcaaaatgcaagcattcaacagatttcctttgcagggaacaagtaatacaaacaactgtgttatataatgaatagattgcttttttcctttatcctgtattaatcttaattggtttcccaaaaaggcaaataagagaccaagctacatcctgtggttgtaacctctaggtaaatttccaccaaaagcaatgaaagattttccagagaaaaagcagaagaatcagccccattgttctgcagctgacttaattctcctctttatgttttagaaatacctaaggattacagttttacaatgtatggagaaatagatatgctaacaacaatgaaattgttgtgggagccatatagagaaatatcagagaaattatttggatcagaatagctcatacaaggaagatttttttaaaatatggacattgaacagataaaggagacagtaatattttaataggatagtgaaaaatatagcagattgacagtgacagcagaaaaagagcaggaatacagatattttcagaagattaaaatggtactgtgtaccctcaaaccaggcaagtttttctgagaggtctctaaacatatctcctgcatagagtagatgatttttcttggagctgtcataaatgctttatagttctctacattaattcatgtcgaatattttccatggttggtcagactcagacttaaaatagatctgagaaaggtcttcaggtttactttcagtaccattattcacttcatagccagctgggtgacaacatggtgtgtggccaattaaagtttacaaggtaaccttgcctgaattatcctggtccatcgaatacaaatagtaaagtgaaggtgagagaatagaattgcaaggaacgtgggagaagcagttgtcaaaaagcaaagcaaacacaagaaaaaaaatctgtgagatcactcagaaatgatgctaataattgtgtgctctcaccctacagtctccacacacatggggttcctcgtgcttcacaatcagcccctgtagtcagtcagtaaaccttcaggtcccaatcatgtggtttctccaggtgaaacaatagccatgtacacctttatgtgcgtcctgccttttacatgttacttcgttatcctgtatactctaccacttgcctcagctgaggaaaacaaacttatgctttcatgggcaactggagatgtactcacttagttccttaagtaactggggagggagggtgggaatcaacctttaaagataattatccttctttccttatcccatttacttcattattactattattattattattattattattgagacagggtctcactatgttgctcaggctggtctccaactcccggcctcaagcagtcctcctacctcagcctcccaaagtgctaggattccaggcatgaaccaccatacccggccccatttactttaaataagttttctgaaatgagtttatatatgtaaaaacatctggcaaagaacctaatacataataagtgctcagtaattaagaccctctttcttacccacttcttactaaactatatacattccaacaatcctccgagtatcttctctgtga

SEQ ID NO: 21851 - DNA, 2538 bp, Homo sapiens; identical to SEQ ID NO: 20316
  misc_feature 2538: n = A,T,C or G

SEQ ID NO: 21852 - DNA, 2928 bp, Homo sapiens
  misc_feature 1, 2, 3, 2923, 2924, 2925, 2926, 2927, 2928: n = A,T,C or G
nnncgttgcgggtgtgcggcgtgtgggctgtgggcgtgccgcgcttggcttgtctcgtctctttgtgttgtggtcgtcgtgtcgtctctctctttcgctgtggttcgctttgcttgttgtgtggttcgtcgtgtgttatcctggtgcggtctgtgcgtgtttgtgttgctgtcgttccgttcgttggccttggctcctcgtctgcgtctgttgtcgctcgtctcttgctgtattggtcttcggtctgctgttctgtgtgtctttgcgctcgtctctgctgcggctgtggttgttctctttctgctcttttgtttggtgcggctgtcgctgactggtgttgtttcggtttggtgttctgtctgtgtgtctgcgtcttctgttcgtctttgattttggcggtttcctgtttttctcgcttggctgatcgcgcgctcgcgccttccagctgtccttgtctcgagcccgtcgctgctggctcccgtcgtctcctcgcgtctcctcctcgtcgcccgtggactcctgtggtgtcttggtctctcttgctgctcgctgagctcggtctgcgtgtccgcgcgcttcgccgtctcgtgtgtttgctttggcctggctctctcgtgcagcggtcgtcttcgcttgccttcctgtgttgtgtcgttgtccttgtctgctctggtgtcgtccgttttgttgctgttcgtgtacgtgtttgcgttcttttcttgttcgttctcgtcgttgttggctctgttcgtctctagtttcgtgcgtttcgctcctctgctcttcgttcgccgtgctgctttccttgtctctttcgcttgctgtgcgtctttcgtcgtgtcgtgctttgtttctcttttcgtgttttcttcggtcttcgctgtgtcgctgtgtggtcggtcgtctgtctggtctgactcttgttttgcttcgttgtttgtcgtctcgtcttctctctcgtgttctcgctcctgtctgtctgcggttgtcgcgcgtgttcgctggtttccagtaagataaaaaagagaagagaacaccgacggtgctgatggtaccgcttgtactttttacttatccctgtattcacgtcaccaattgtttattgcaacttcttactgctagtagggtcctattgtgctcgtacgcactctggtagattatcagcggctcctcgtgctgcatcgacgtatcgtcatccatcgctgggctgcctctctcttatatggacacaggcttgacgttgcactcgtaggatcatctgtctgctgtctttttggcgtacactcgtgtcattgcctctcgtttggggagttctgtgtgggtcattggcatgattacactgtgtcatggttatttggtggtcgcgtcgtgtggctcgatcactggttgggtatccccattgcttctgcctgcgagagtggtgtacgggcggccgtcgtttggtcttccttgcatcgttccatgggacgtggtcttggatgtgcgcatgtgttgtgtgttgtgtcctggtctgtgtagtccgcgggaacgttcggatgtttgcacgtggacgccaaaggattggtaccagccttgcacctgcgcatgctcgtgggctggagcatgtaagttggtgtaatttgtctgtggctggcaaaggtacaatggagtgatggagaatgcatatatgtatcatgtatgattgttatatgtcataattacaaaattgcagtagggcgacgagaatgatggtaaattgttgtatatagataagaattaaaaaaaaaaaaaaaaagggaaaaaggaagctgattgccttggtgagtcaacactgggtattttctgaccactatttgaaacaaaaaaggaaaccactgatattctatgcaaagatctgttcctggaaggcactctgcggagacaccaggagaacttttatcaatccttcattgatttgaagtaaaagtgctaaagcaatggttgtgggtggcaacccattagcagatcacaaaatcactgtagtgggtaactaaacaagaggaaacacaagacggcatcctgtgtaactggggttaagcattactctctgaaactcatggcatcagtttcctcttaggctcttccaacagagtataatcatgttcatttcagtttacaatccttgcagtcccatcgatttgtgagattatacccaggtcatccacagtggaggtctgaaaatgttcttagttgtactctaatttcactaactgccaaaaggttttccagaataatctcagttgcttcattcctttaaagatgaagcccaaagaacgcatggcgattactttagaggaacaattagcagcagaggcagggctgtgctgatcccatctggcatcgctgggagctaacattaaagacatggcactttgggtccgggtccaggtcctggttcagagcagctgccacaccgtggctactagaggatccttttccggctttggaaactgaggctgactgcaccatttacagaaatttcatcatgaagatccttacacttaacaccttaaggtgatgagttttcacatgactgttttcaaggccacagccaccacctttaatcatcatcactaaaggcctgagactgctcgccgtgctcaacaccgactggagtggccatgtcttccagccacgcggccgaccccgaaaagaagatcctggccacacggtctcatggccttgctgaggtaaggtgccacacacctccggtagtagcagctgcatccttggtctgtcagtctgaaaaatttactagaggctctcaacagcacaatggatcaagcagaggaaaatatcagtgagcttgaagacagtatatctaggggatccagcttcgccccggctcggcaccggctccacgctacttcctccctcggcctgctgggctacccggcagcctcannnnnn

SEQ ID NO: 21853 - DNA, 3966 bp, Homo sapiens
  misc_feature 1, 2, 3965, 3966: n = A,T,C or G
nnatagggagtcacccacgcgtccgctctcgcctgcctgtggggtttctgtcaactagtcgtggagggaaggagactctttaaagaataacatcttattgtggccatgccagaacccactaagaaagaggaaaatgaagtgccagccccagccccacccccggaagaaccaagtaaagagaaggaggccggaactacaccagcaaaagactggacccttgtcgaaactcctcctggggaggaacaagccaagcagaatgccaactcccagctgtccatcttgttcattgaaaaacctcaaggaggaacagtgaaagttggtgaagatatcaccttcatagccaaagtcaaggctgaagatcttctgagaaaacccactatcaaatggttcaaaggaaaatggatggacctggccagcaaagccgggaagcaccttcagctgaaggaaacctttgagaggcacagtcgggtgtacacatttgagatgcagatcatcaaggccaaagataactttgcaggaaattacagatgcgaggtcacctataaggataagtttgacagctgttcatttgatcttgaagtgcacgaatctactgggactactccaaacattgacatcagatctgctttcaagagaagtggagaaggtcaagaggatgcaggagaacttgactttagtggtctcctgaaacgtagggaggtgaagcagcaggaggaagaaccccaggtggacgtatgggagttgctgaagaacgcgaaacccagtgagtacgagaagatcgccttccagtatggaatcaccgacctgcgcggcatgctcaagcgactcaagcgcatgcgcagagaggagaagaagagcgcagcttttgcaaaaattcttgatcctgcatatcaggttgacaaaggaggcagagtgaggtttgttgtggagctggcagatccaaagttggaggtgaaatggtataaaaatggtcaagaaattcgacccagtaccaaatacatctttgaacacaaaggatgccagagaatcctgtttatcaataactgtcagatgacagatgattcagagtattatgtgacagccggtgatgagaaatgttccactgagctcttcgtaagagagcctccaattatggtgaccaaacagctggaagatacaactgcttattgtggggagagagtggaattagaatgtgaggtgtctgaagatgatgccaatgtaaaatggtttaagaatggtgaagagattatccctggtccaaaatcaagataccgaattagagttgagggtaaaaaacacatcttgatcatagagggagcaacaaaggctgatgctgcagaatattcagtaatgacaacaggaggacaatcatctgctaaacttagtgttgacttgaaacctctgaagattttgacacctctgactgatcagactgtaaatcttggaaaagaaatctgcctgaagtgtgaaatctctgaaaacataccaggaaaatggactaaaaatggcctacctgttcaggagagtgaccgtctaaaggtggttcacaagggaaggatccacaagttagtgatagccaatgccctcactgaagatgaaggtgattatgtatttgcacctgatgcctacaatgttactctgcctgccaaagttcatgttattgatcctcctaagatcatcctggatggtcttgatgctgacaacacagtgacagtgattgcaggaaacaagcttcgtcttgagatccccatcagcggagaaccacctcctaaagccatgtggagccggggagataaggctattatggaaggcagtggccggataagaacagaatcttaccctgatagcagcactctggtcattgatatagctgaaagagatgactctggtgtttaccacatcaatctgaaaaacgaagctggagaggcacatgcaagcatcaaggttaaagttgtggacttccctgatcctccagtggcaccgactgtgacagaggtgggagatgactggtgtatcatgaactgggagcctcctgcctacgacggaggctctccaatcctaggatattttattgagaggaagaagaaacaaagctccaggtggatgaggctgaattttgatctctgcaaagaaacaacttttgagcccaagaagatgattgaaggtgtggcctatgaggtccgcatctttgcagtcaatgccattggcatctccaagcccagtatgccctccaggccttttgttcctttggctgtaacaagccctcctactcttctgactgtggactctgtcactgacacgactgtcacgatgaggtggcgccccccagaccacattggtgcagcaggtttagatggctatgtgctagagtattgctttgaaggaactgaggactggatagttgcaaacaaagatctgattgacaagacgaagttcaccatcacaggtctgccaacagatgcaaagatctttgtgcgtgtgaaggctgttaatgcagctggtgccagcgagcccaagtactattctcagcccattctcgtgaaggaaatcatagaacctccaaagattcgcatcccaagacacctgaagcaaacctatatccgcagagttggagaagctgtcaatctggttatacctttccagggaaaaccaagaccagaattaacttggaagaaggatggtgcagaaattgataagaatcaaataaacattcgcaactctgagactgatacaatcatatttattagaaaagcagagaggagccactctgggaaatatgatctgcaagtcaaagtggacaaattcgtggagaccgcatcaattgacatccagatcattgaccgtccaggtccaccccaaattgtgaagattgaggatgtctggggagaaaatgtcgctctcacatggactccaccaaaggatgatggaaatgctgctatcacaggctataccattcagaaggctgacaagaagagcatggaatggtttactgtcattgagcattatcatcgaaccagtgccaccattactgaattggtcatagggaatgaatattacttccgggtcttttctgaaaacatgtgtggcctcagtgaggatgccaccatgactaaagagagtgcagtgatcgccagggatggtaaaatctacaaaaatccagtgtatgaagactttgatttctcagaggcacccatgtttactcagcctttggttaacacctatgccatagctggttacaatgccaccctaaactgcagtgtgagaggaaatcctaagcctaaaataacctggatgaaaaacaaagttgctattgtggatgatccaagatacaggatgttcagcaaccagggagtctgtaccctggaaattcgcaagcccagcccctatgatggaggcacttactgctgcaaagcagtcaatgaccttgggacagtggagattgaatgcaaactggaggtgaaagtcattgcacaataaggatttttgaatgtataatatcatctaaggtgggctctccttctgcagactcctcttgcaaggcgtacctccaaacataattgattcgtatctgcgagacttacactcaagcaatcctgaggaatactgagggagggcctggctactgtctctctgcactctgctgctttgaaatctggttgaaatgagaaaaagcattttctgttttcccaccaggcccccaagtgtggtctttttctttcctcctaatgttgaagagaaaaaaaaaaaaaaaagtttgcccagattgcttaattaaaaattgcaaacaaaatctcatttgaagtcaaaacattagtcattattatctctgctcactgtattatactttacaaaaatgcaagtcatagaataagcaaaagcagttatttttgtttacatagtaggctataaatgctttttttttcctctcagagtaaaaaacataacacaatgcaccacgactggann

SEQ ID NO: 21854 - DNA, 689 bp, Homo sapiens; identical to SEQ ID NO: 21367
  misc_feature 1, 2: n = A,T,C or G

SEQ ID NO: 21855 - DNA, 462 bp, Homo sapiens
  misc_feature 391, 415, 439, 456, 461, 462: n = A,T,C or G
actcttggcttgtccatattgtcggatgatctccagtggtggaggatgagtgtgctgattggattaattccgagttggaatataatgaatggttagtgtccttttactccgttgtgttttgaggtgtttgtccctgacagccatttggcaaataatctggttatccaaaaagatttttggttttttgatttaatgctttaaacttttcttattttttttttacttataatattaaacatgtaaaagcgattttaatgacttttcattgaagatatacccttctgcctccatctccccaaatgggcatgcgagaaacatcactactgaatagtctgggaagtaagtttggcaccaccaaaggttcagtgtggggttgtataaaaaaccgggnctgggaagcagccctcccaccccngatattaacggcatttccagagtncatgagtacacaaaccntcgann

SEQ ID NO: 21856 - DNA, 2538 bp, Homo sapiens; identical to SEQ ID NO: 20316
  misc_feature 2538: n = A,T,C or G

SEQ ID NO: 21857 - DNA, 837 bp, Homo sapiens
  misc_feature 1, 832, 833, 834, 835, 836, 837: n = A,T,C or G
nccatacttcaactactcatagactgctgaatgttcaaactgtgttcaaataagatggtgtcacaagaaggatctgaagtggagcttctagtatccccaggagcgcgaagtgaacacggaaggtacctgcaggatccaattgtgtccattgatctctcagagtggctgaggataatagagtttcttcttcaaggtctcaaggtgtatggctctgtgtatcacatcaatcacgggaaccccttcaacatggaggtgctggtggattcctggcctgaatatcagatggttattatccggcctcaaaagcaggagatgactgatgacatggattcatacacaaacgtatatcgtatgttctccaaagagcctcaaaaatcagaagaagttttgaaaaattgtgagatcgtaaactggaaacagagactccaaatccaaggtcttcaagaaagtttaggtgaggggataagagtgggctacattttcaaagtcagtgaaagtagagcattcgagagcactcctcctggttaccggaaggatattctgaagctcaatgcctccagtaaaagcaagcttgggaagctgggtgagaaggcaaccagatggatgatttgaagtgaactccattaagtttgccagtgatgtctttatacggggtggaatgacacgggggggagacgaaggagcggttataggcgataaaaggagagtgttttggccagagtcgggtggtaacggcctgggatgaagccgatgaaaaggagcggtggagggtaaacgcggaattcggtgaaggcgggtggcggtgaaaacgttgttatttattgaaattgannnnnn

SEQ ID NO: 21858 - DNA, 2538 bp, Homo sapiens; identical to SEQ ID NO: 20316
  misc_feature 2538: n = A,T,C or G

SEQ ID NO: 21859 - DNA, 3579 bp, Homo sapiens
tgtcgccgcgttgtcgcttgcgtgtcgttggtgcgctgtcggctctgtccctgctctcctctctgcctgtgctcgttcgcggctctcctcgttagtcctgttgtgttcgccttctctctccttctctcgtctttccgcctggtggcttcgttgctgtgtgcctcctctcctggcttgggccgtgtcgtctgtgcgcgtcgctccgtctgtccgcttctctactgctcttcttctgtgcccctccttccttctctcctctgtctggtgctgtctctctcctccttctctttctcttgcgtgcatctgttgttctgttcctctgctcgtcgctcttctagctgtttcgcttcgcccgcctcctctctcgtcgctgctcgtttgtcctcgccgtctctcgcgcttcggttgctttcgccgcttggcctctctgtccggcttcgcttggtgctgttcctctcggcttctccttcctctccgttttcgtgtgttgcgcttttgctctcgtgcgccgtcgctgcgttgggtctcctcatcgttttcttgtttctcgcgtctggtgccgcgtcctgtggtgttgcttgctctgctgcctgtgctctcttctcttgtcctccccggttctgtctctttcctcgctctcggctcgtttcgctctgcgtccctcctttgtctcttccctgcgtgcccccccctccggtctcctggctcgccccttccctcctcgtcgccaccgccacggcctcccgtagttggtggctctctcttcttcgcggcgttctctgccctctccgtgctgggtcgtctccgtgctccgtcgtctctcttgcgctctgcggtcgcggcgctggctcgccttcgtagtgagtgaggggcgtgctaggctgttgctgagtgtgttgtgttttgtgcttgtgctgactgttgttgtcggactgttgtggcgtgtcgtgataaaaaaaagaaaatagtgagaataagaactgggtagcaggggaacacgaagagatggtggagtaccgcgtggccctcctgtgtcagtgaggccgtggcaccggatacgtatggcctcgctgggaaggagtgccgagcagtggttcccgtgacggggatgttttcccccgacccttcgcgcgccccccgagttccagaccacttcgaccttttggctggatgaacactaccatctctgctttgacagggcttttctaacttccacagttgtggccattcacagtatggtatttctgaatgacaatcttatccacggagtcatggtcgtcaaaggttacaaaggcaaagccccttttcttgccactgcctcggtcagtcatgatttcaatcacttcaatttttccatactgttcaaaataatctcttaggtgatgttcttcagtgtcttctttaatgccaccaacaaatatctttttcacagttaagtgggcacctggtctttgagaatcttctctggagacagctctctttggttccacaactcttccatccaccttgtgtggccttgcattcatagctgcatccacctcctccacagtggcatatgtgacaaacccaaagcccctggagcgcttggtgtttggatctctcattaccacacagtccgtgagcgttccccattgctcaaaatggctcctcaggctctcatcagttgtttcaaagctcaaccctccaatgaagagcttcctcagctgttcgggctctttaggagactctgacttagacatgacggcagggtgaagagagactttaacgatgcttcttcggcggcgtccacgggcagagtctcctaaagagcccgaacagctgaggaagctcttcattggagggttgagctttgaaacaactgatgagagcctgaggagccattttgagcaatggggaacgctcacggactgtgtggtaatgagagatccaaacaccaagcgctccaggggctttgggtttgtcacatatgccactgtggaggaggtggatgcagctatgaatgcaaggccacacaaggtggatggaagagttgtggaaccaaagagagctgtctccagagaagattctcaaagaccaggtgcccacttaactgtgaaaaagatatttgttggtggcattaaagaagacactgaagaacatcacctaagagattattttgaacagtatgacagctataacaacggaggcggaggcggctttggcggtggtagtggaagcaattttggaggtggtggaagctacaatgattttgggaattacaacaatcagtcttcaaattttggacccatgaagggaggaaattttggaggcagaagctctggcccctttgtgccagagcaggagctgctgcgttccttgcgcctctgccccccacaccctaccgcccgccttctgttggctgctgaccctgggggcagcccagctcaacgtcgtcgcaccagctcccttccccgctctgaggagagtcgatactaacagctaccctctccctgccctgggagacctggggtgggcagggaacccctccctgagaacctcagacccactcttccattgcatcctgtaggacccagtggaacctgacagagcccataggattccctcttctactttcttagacagcagggatgtcagggtctcaaactgcctaacactttgtagattttcttaacacaaaagcaccccttctctcctaacttgggctctgaatactttcccaacaggaagtctgatctgttgccagacttcttggttagatggctcatacatttatctagagaagcacactcttgcttgctgtcaaactttagaacaccatggaaggtctaagggcatcctgtgccagggaaactttttaaggaattttatctatgggataaaccccatattccctctagtgtctactggtggctctaatactgctttgtgctgcctgccacacttgccctttgagcctgcgaatggccgctagtgagcaagctctgcttcagagcagtctagttaggtagaacagggacttaccagcttcccaaagggatctactcaccattgccaaactctccatctccacattttgtgtaggtgtcagggaaccccaaactggtgttgctttggggtctctaaaggagattggctgacaccaccatttcccccagatccagattctctgagggaggttgtttcttgagagtagatccagagtgtcaaggatctgttagatcctggaatcccttcttgcatccatccctccctggtagctaggtcccgatatactcctgtcttgtgagattgtcgagatgagatgggggaccactcttcctctgtccttcctctctcctttcctccatagcaaggacgaccttccctgctccatgcccagagtatagctagatcccttcccctccctaccctctgaatgtgtgctagatcaggtgccccactgtgtttcctgaaatccttggggagccggatctccccatctcccctactcactcttcccttttcttctctcagtgttgtctgaataaagtgtgaaatcttttgtgttttctaaattgacattttcaatgaaaaaaagaa

SEQ ID NO: 21860 - DNA, 370 bp, Homo sapiens; identical to SEQ ID NO: 20612

SEQ ID NO: 21861 - DNA, 1700 bp, Homo sapiens
  misc_feature 1, 1603, 1604, 1605, 1606, 1607, 1608, 1609, 1610, 1611,1612, 1613, 1614, 1615, 1616, 1617, 1618, 1619, 1620, 1621,1622, 1623, 1624, 1625, 1626, 1627, 1628, 1629, 1630, 1631,1632, 1633, 1634, 1635, 1636, 1637, 1638, 1639, 1640: n = A,T,C or G
  misc_feature 1641, 1642, 1643, 1644, 1645, 1700: n = A,T,C or G
nggcagaaaccgcgaggcaggcccggacccctcccgtgatgcccgggtgtctagagcaccgagaaccgggggcgccgaagatcgagcccgccacccgggagctgagaccccttcgaaccccgaggggggaaccccaagagccaccgggtctgtgcttgtcgacaggtttcttcctaaatgatacaaagccacagcccaccaagggtataataaacagacacaggataatcttccagttcttggtgtctcgggaaatctctccataccattgcttagaaagaaaattctggaccccaggctgggcgatgaaatgctggtctgtggcctccaccgccagctccagacacgttgcttccaccccaagcttcacaggaatagaccagcagctgttctgccaagtcttcatcgctgctgtaacactcagtgaacagctcaacagcccgggtctcgtactcattagccagctcctcggactccccagcagcattgatgtcgttcttcactttggccagagtcttcagaagcttgctggctcccagggctgccagagtgcagcccctggtctgctcccaaatgactttggagagttccttcttattctgaagaatggcccagatgaagagagcttgcagggggtgccgagtaataggagacacgtcgtggagttctatgtccatctcgtcccggccatttctgtcttccttccggaagcctcttcggaagttcgcaaccagtttccagacaaacgtgaggagggcatcattataggaattcttggcgatctgcagattccggtacacaagcgtgctgaagtggttggagaagagttcagtgaggacatcatgggtgagaaacttccgtaggttcaagccattctccagaaagaggcggacaaacttgggtctgtcctttatgagagccgtaaacatgacttcttgaaggtcagcagactcccatcggcggtcattggtgaaaatctcatcattggctaagtccagctggttccactccagcagaagcttcagctgcccattccagttatccttgtcttgctcactggtgctgaaggctttgtatagagcgtaggagatggcattgctcacaatttcatccccagcttcttccattttaataactgttaataggtgagaacattcgagaatttctttgagccatttgatccaactctcagtctcctcctcaggcagccgggacaccgtgcggggtaaaaagcgcaccagcttctccttgacggcagaagatgtcagggcatcctccacctccaccaggctagcgatcacatcagcgatctggcccgagccttccaccaccacacaaggaattttatttttgatggaggtattgatggctttcaaagtctcttttccacctccttgggcaaaacacacaatggggatcttgccaccatagttggaatcttgaatagtgcgctcagagatatacttctctagctgattccggagctttgcttcgacagtgggatgtccatgacagccattgtccacgagcagcaaatgtgtgtggttgttgtccaggatatacagtggatctcttgtgaagtcatccataaggtacctgcccnnnnnnnnnnnnnnnnnnnnnnnnnnnnnnnnnnnnnnnnnnngggaacaccgctggaccatgcttctggccgtccctttacaccaggaaacagctan

SEQ ID NO: 21862 - DNA, 3453 bp, Homo sapiens
gggtggagtgtaggccagggggttggcggtgccgtgtcatggaggctcagtctctgagcagccattgaaggggaaggaactgcgggtgtgtgtgtgtatgtgtgtgtgtatgtgtgtgcgcgcgtgcgtgcgtgtgtgtgcgcgcgctagtgtgtgggacaaggaggtgggggcagctgagttagagtcccaactcttggactccatttgctattctcttctttctcccccacacctatctggtggtggtagtgggcgtttatatttgcgttccttttcattcatttctaaatctcttaaaaattttgggttgggggtattggggaaggcaggaaagggaaaaggagagtagtagctgaagagcaagaggaggacatggagatgaagaagaagattaacctggagttaaggaacagatccccggaggaggtgacagagttagtccttgataattgcctgtgtgtcaatggggaaattgaaggcctgaatgatactttcaaagaactagaatttctgagtatggctaatgtggaactaagttcgctggcccggcttcccagcttaaataaacttcgaaaattggagcttagtgataatataatttctggaggcttggaagtcctggcagagaaatgtccaaatcttacctacctcaatctgagtggaaacaaaataaaagatctcagtacagtagaagctctgcaaaatcttaaaaatttgaaaagtcttgacctgtttaactgtgagatcacaaacctggaagattatagagaaagtatttttgaactactgcagcaaatcacatacttagatggatttgatcaggaggataatgaagcgccggactctgaagaggaggatgatgaggatggagatgaagatgatgaagaggaagaggaaaatgaagctggtccaccggaaggatatgaggaagaggaggaggaagaggaagaggaggatgaggatgaggatgaagatgaagatgaagcaggttcagagttgggagagggagaagaggaagtgggcctctcatacttaatgaaagaagaaattcaggatgaagaagatgatgatgactatgttgaagaaggggaagaagaggaagaagaggaagaaggaggtcttcgaggggagaagaggaaacgagatgctgaagacgatggagaggaagaagatgactagatcattctaagaccagattctctaatgtttctgggtgtgcaatagagtgatcacatctttgtttcttcatgtacgatagctatccctacagaagataatgtgtaactttttataggaaaagtgtggttttactatttttgccttatcattccaaataagaactagtctgttaatgatcatattgtatgtagagaaaaattttcattgactcccattgtggaattccctagcaatttatttagacttaattttttaaattcaagcttactgtattagtcatttttagcccataattaaaacatgatcacttttacacaggtgtagtatggtgcatttcattccttatttataaattaactgaaattacagtttgctataatataaaatgacaatagtctcttgagtggtaagttggttatttttttagaggtgatccaggaatctttagtttgaaggcagttaccttttttttttttttttttttttgactaagagtgtttggttgcttttttgtcacaagtaacttggaaaatagaagcagaatagtaaaggttctattcagcaacatagttcatggattttgtggaggttctattcagtaatatggttcatggatttagtggtgactgataagattttatttttgaaggaaaaattgcttatactaagtccagagacatgcaggtgagcccttttgtcaggctgcaaatcatgacatgccgatggttgtttattttgtttttaggtgtgcattctttttcttcttagcaattcctttatgatcaccttcccttcttgtttcactccctcccgctctctcaaaaggaacttgggaaacttgtgaaacccaggaaaacctttagtcttatacctcaactacctttcagtcctgtctgggttttaaataagtgaagtagaagaaattgagtattttctgacataagaatatattatcaatacagttttatgcagtaagctctccttaccataaatgtttcttggttgacaacatctaagacaatattagtgggatgaagaaagaaaagcaggggtgcttttggaagcagtgttagtgttcctcaaaagtcggaacaattgcctgttgatatattaataagacattaaagtcaaattttaatgttggcctctcaaatgatttggataccactctgcaaagtatttctaacctttaattcccagttttaaaacagatataataatagcatttaattggaatatactaggcagctggaaaagtatttgaaactaaattgacattaaaattaagatttgttttcaagtggatgtccattaaaagtagaaaaatatttgggataagtgagtgtgtgtttccttacatggctactaaataaaatataatgagtatacaagtatatctcctcttttgctatggaggctccatgttcaaggcaatggctttttaaatcttggctatctaaaattttttccctttgttttgaatatttgtaagtttttaagaagttagtgtcagcaaattaattgaagttatgcttctatactgggacatatttaaatactgagtatagtactgctgctactgcttctacaatgtaaaatgtatgacttggtgttttaaagtaaaaattatgatgttacttgtggagaaactaaaaatgttgtacaactgaccgaaagaaaacccttggggataagtttagtgaggggattggaatccccaaaaagataacatttttcttctgcttttaaaaactgaaattccctgttctagttcctaacaattctcattacatactatgccagattacaaaatacttatttttaaaatgaaatctatatattgactttcttatcaatcatcttactgtgcaatcaaaattagagtactttggtttgaaaacaacacttagagcctccagataacttttaagacttatttagctttgtgggtggtattttcatgcaaataagtaagggtgggttttatattttgtagaagttttcggtcctattttaatgctctttgtatggcagtatgtatatattgtgttaagttcctcaagaatctccttaaaaactttgaagttaatacttttgtgcaactgtgttttgaataaagccatgacagtgttaaaaacaaacaaaaaaatttgcagtactcctgattattcttttattgtttttgactgttccctgtttttttctgtgactgctgtaacttaaagtttttgaaactgaattgcttcaaataaattgaagatttgttataat

SEQ ID NO: 21863 - DNA, 683 bp, Homo sapiens
  misc_feature 679, 680, 681, 682, 683: n = A,T,C or G
acagacgggatttcactatgttggccaggctgttctcaaactcctggccttgtgatctaccctcctcaatctcccaaagtgctgagattacaagcgtgatccactgcacccggccagttgttttttttggtttttttgtttttttaggttttttttacgaaaatgtttgggaacagaaatgttgtggatttgagattttgttggattttggaatatttgtattatacctactgtttgaacatcccacgtttgaaaatctgaaaccttaagtgttaacatgagcaccttaataaagtttggacagtatttcttttataaacaatattattgatattgctaactattaacattagaaatgaaagtcgagaaagataattacctggaacgttagtacccagaaatacccaattgtgttggtatttgttttaagttttcatttttatgcatctccacctcagatccataatctaaatttacagttgaattcatttcaatacctcagtggtgtaccattgagtcctaaaattctagaatgttaatcccagtcatgtgtgtacactaacatgccttttttgaagtcttttgaaacctatcagatacagtgtggagtccattttgctgaagagtatctagaatatctgctaccctaagaagcagtcatagtcccttccatagtagnnnnn

SEQ ID NO: 21864 - DNA, 689 bp, Homo sapiens; identical to SEQ ID NO: 21367
  misc_feature 1, 2: n = A,T,C or G

SEQ ID NO: 21865 - DNA, 4219 bp, Homo sapiens
  misc_feature 1, 2, 4211, 4212, 4213, 4214, 4215, 4216, 4217, 4218, 4219: n = A,T,C or G
nncgctttccaatactcgggactggggaacccgggagaatagaagcaggcaaggaccgccgtgggcacggggtcagtgagacagggtcctgctcgcggcgtcaaggaggagcgctgtgggtgggtagggtaggcgcgccccctcggccttgcctttccaaccactcttttttgcacgccaccgggtgtccccagcgcagccaatcggcttccgaagtaggtgagttgctgcctgaagagaaaagacaaactccagtatctttcattccattggccagacgcgccattccccaagtgagttctgttctccaaccaaagtgctggattccaagggactggaagggaaagtccctaaaaatcacgagttcaggcgtctgagacttggtgggaacggaccctcctcttagtgcccaagcctgttctaatttttaaaaactgatgtctattaagacccaatgttaactttatgaaaatggttcctaaggagattcacatctctgtgtccgaattctgtgtgcagcaaacatcatctcaagtgcgttttcccaactacgcttctttccaggataaaatactctaagtgacaaatgttgagtacattatcagctggagctctggagcctttgcttcctcaaatacgagcgggaactgcgttgagcgctggattccaggccgagtgctggcgaggcgcgcagttctctgctgtttaaaaagtatccctgtgctttgaagatactgctataatttgaaaatttgaaattagtgtttcagctgaaccatccgttcatcttcaagccatcatgagctgtaagaagcagaggtcacggaagcactcagtcaatgaaaaatgtaatatgaaaatcgagcactatttttctccggtctctaaagagcaacagaataattgcagtacttctctaatgaggatggagtctagaggagacccaagagccacaactaatacccaggctcaaagattccattcacctaagaaaaatccagaagaccagaccatgccccaaaataggacaatatatgttaccttgaaggtaaaccacaggagaaaccaagatatgaaacttaagctcacacatagtgagaatagtagcttatatatggctctcaacactctccaggctgtcagaaaagagatagaaactcaccaaggccaagaaatgcttgtgcgtggcacagaaggaatcaaagagtacataaaccttggaatgcccctcagttgtttccctgaaggtggccaggtggtcattacattttcccaaagtaaaagtaagcagaaggaagataaccacatatttggcaggcaggacaaagcatcgactgaatgtgtcaaattttacattcatgcaattggaattgggaagtgtaaaagaaggattgttaaatgtgggaagcttcacaaaaaggggcgcaaactctgtgtttatgctttcaaaggagaaaccatcaaggatgcactgtgcaaggatggcagatttctttcctttctggagaatgatgattggaaactcattgaaaacaatgacaccattttagaaagcacccagccagttgatgaattagaaggcagatactttcaggttgaggttgagaaaagaatggtccccagtgcagcagcttctcagaatcctgagtcagagaaaagaaacacctgtgtgttgagagaacaaatcgtggctcagtaccccagtttgaaaagagaaagtgaaaaaatcattgaaaacttcaagaaaaaaatgaaagtaaaaaatggggaaacattatttgaattgcatagaacaacgtttgggaaagtaacaaaaaattcttcttcgattaaagtagtgaaacttcttgtacgtctcagtgactcagttgggtacttattctgggacagtgcaactacgggttacgccacctgctttgtttttaaaggattgttcattttaacttgtcggcatgtaatagatagcattgtgggagacggaatagagccaagtaagtgggcaaccataattggtcaatgtgtaagggtgacatttggttatgaagagctaaaagacaaggaaacaaactacttttttgttgaaccttggtttgagatacataatgaagagcttgactatgctgtcctgaaactgaaggaaaatggacaacaagtacctatggaactatataatggaattactcctgtgccacttagtgggttgatacatattattggccatccatatggagaaaaaaagcagattgatgcttgtgctgtgatccctcagggtcagcgagcaaagaaatgtcaggaacgtgttcagtctaaaaaagcagaaagtccagagtatgtccatatgtatactcaaagaagtttccagaaaatagttcacaaccctgatgtgattacctatgacactgaatttttctttggggcttccggctcccctgtgtttgattcaaaaggttcattggtggccatgcatgctgctggctttgcttatacttaccaaaatgagactcgtagtatcattgagtttggctctaccatggaatccatcctccttgatattaagcaaagacataaaccatggtatgaagaagtatttgtaaatcagcaggatgtagaaatgatgagtgatgaggacttgtgagaattcagtctactggatttaagggaatggcttatggagttgttatttcataggcattgaaaatggttttctaaactccaaaatggtcatcttatcaataataataatattgaccatttcctatctgccaggcatttttctaagcacatgaagaaattagtcctaacaacactatgagatggactataacttgcccaaattttttttttttttttgagactgagtctcactctgtcgcctgggctggagtacagtggtgcgatctcagctcactgcaacttccacctcccaggttcaagcgattcttatgcctcagtctcctgagcagctgggattacaggcaaacgccaccacacccagctaaattttttttttttttttgtatttttagtagagacagggtttcaccatgttggtcaggcgggtctcgaactcctgacctcgtgatccacctgcctcggccttccaaagtgctgggattacaagtttgagccactgcacctggctaacttgccctattttaaagtcaagcaatgggaagaataacaagattatatagtaatcagtttcatgacactaaaagtcatatagtcatagggttttttcatctttcatatctttgcctaaattcatttgctacagtgcaggaaccaaaacttgttcatctcatgattccctacatctgacataaggaaagtaagtgctcagaaaaatgtgcaggtcaataagttgcaaaagttggggctgcaattaatgctaacataagagctaaatgcttgattagaaatgatctcaaaaccttttagaatttccaaaatcttcatattactgaaactgtcggaatatatgggtcttgaaattcagaagatgatagtcactcttcccatatttataggctattaaggcaagggatatcttaaacatcatattactttatttagatttctactactccaattattaatgttatgtatttctcattgttttacttcttcatggtattatgaagactatatagatgattcaaccaagcctgcaaatctccctcttgtggaattccactggacccaatctgttttccatttccattgcaatactactaaagccatacaatatcaagcaccctccctctaggtccagggactatcacagaagaagcaggcatgtaagattttaaggactggtttcgaggggtcgagtgtaggaaaacagcctgttgcattgtaagagtgatgtcatcttgaagagcagctggcatgatgactgctgtttgactcctgcataccaagatattctgcagcaatgtctttaaacagtgccggtagtacagataacccctcataaagatgcttatctaacctccccagtgttcaggtgtttcacaagaaagtctgagatatgactagctacacgttttgccaaaaatgcttgttatataaagggtacttttgggagggtgagtgccgccatttagtggctgctagaaacattgcttctgtttgtaagttcctattaaatgtttctttctgagaaaaaaaaaaaaaaaaaaacctcgtgccgaattcttggcctcgannnnnnnnn

SEQ ID NO: 21866 - DNA, 941 bp, Homo sapiens
cgtccggtagggtgagctgtgtgactctatggtacagactggtccaggttcctggaggtcacactctggggctgccagccaaagggtgcccttaagttggagtgtgggtgacttcctgaacagagctggcactggggagggggtgctcggggtcctttctcttctaacaggccccagttttgtctcaatgacagtgtttctacacctgtgggttatgacaaagacaactgccaaagaatcttcaagaaggaggactgcaagtatatcgtggtggagaagaaggacccaaaaaaagacctgttctgtcagtgaatggataatctaatgtgcttctagtaggcacagggctcccaggccaggcctcattctcctctggcctctaatagtcaatgattgtgtagccatgcctatcagtaaaaagatttttgagcaaaaaaaaaaaaaaaaacacaaaaaaaaaacaatgtgtgtgggcgccgcgcctcggggccccctaagaaaaagttttatgaaaccatttgggtgggggggcgggggcccccttggttggggaccgtgggccaaacggggtcccaaagaaaacccggggccacgagcaagggggtgggtttccccccaaaaaaaaagcccggggggccacgggggttttggaacacaacccaaggtgggaggtgggagggcgaagcggggcttcacaacgaggggcccacggaagcggaaataacatcccggccgagagggggagagaccggacgagtgacgcagcagactacagcaacagcacgaccagacaccacgtgacgtgcacggcagtataatattgcacaagctaggtgctacacgcctccacaagaccgaagagcccacggcacgagaacataagtgtgaaactgatacatccgaccgaaaacgggggacacagacgctaagcaccaccacac

SEQ ID NO: 21867 - DNA, 801 bp, Homo sapiens; identical to SEQ ID NO: 21839
  misc_feature 528, 532, 587, 624, 635, 651, 657, 666, 669, 678, 689, 696,699, 714, 720, 732, 733, 743, 744, 774, 796, 797, 798, 799,800, 801: n = A,T,C or G

SEQ ID NO: 21868 - DNA, 1262 bp, Homo sapiens
  misc_feature 1, 2, 1261, 1262: n = A,T,C or G
nncagattcggcatatgtaggacagggtacaaaggatgttgagacagccttaattaaataacgcatgcatgatcagttaaaccagctgttaatttgttaaaccaaacggtgagaaaacaaatttcccattttaatattactcaattcgagcgcatattaatttaccagggcctttaactaaagcaaatgaacaagctgacttgctagtatcatctgcattcatggaagcacaagaacttcatgccttgactcatgtaaatgcaataggattaaaaaataaatttgatatcacatggaaacagacaaaaaatattgtacaacattgcacccagtgtcagattctacacctggccactcaggaggcaagagttaatcccagaggtctatgtcctaatgtgttatggcaaatggatgtcatgcacgtaccttcatttggaaaattgtcatttgtccatgtgacagttgatacttattcacatttcatatgggcaacctgccagacaggagaaagtacttcccatgttaaaagacatttattatcttgttttcctgtcatgggagttccagaaaaagttaaaacagacaatgggccaggttactgtagtaaagcagttcaaaaattcttaaatcagtggaaaattacacatacaataggaattctctataattcccaaggacaggccataattgaaagaactaatagaacactcaaagctcaattggttaaacaaaaaaaaggaaaagacaggagtataacactccccagatgcaacttaatctagcactctatactttaaatgttttaaacatttatagaaatcagaccactacctctgcagaacaacatcttactggtaaaaggaacagcccacatgaaggaaaactgatttggtggaaagataataaaaataaaacatgggaaatggggaaggtgataacgtgggggagaggttttgcttgtgtttcaccaggagaaaatcagcttcctgtttggatacccactagacatttaaagttctacaatgaactcactggagatgcaaagaaaagtgtggagatggagacaccccaatcgactcgccagtctacaggtgtatccagcagctccaaagagacagcaaccagcaagaatgggccatagtgacgatggtggttttgtcaaaaagaaaagggggggatatgtaaggaaaagagagatcagactttcactgtgtctatgtagaaaaggaagacataagaaactccattttgatctgtaccnn

SEQ ID NO: 21869 - DNA, 2538 bp, Homo sapiens; identical to SEQ ID NO: 20316
  misc_feature 2538: n = A,T,C or G

SEQ ID NO: 21870 - DNA, 1268 bp, Homo sapiens; identical to SEQ ID NO: 21760
  misc_feature 1, 2, 3, 4, 5, 6, 7, 8, 1266, 1267, 1268: n = A,T,C or G

SEQ ID NO: 21871 - DNA, 516 bp, Homo sapiens; identical to SEQ ID NO: 21320

SEQ ID NO: 21872 - DNA, 2376 bp, Homo sapiens; identical to SEQ ID NO: 21284

SEQ ID NO: 21873 - DNA, 3855 bp, Homo sapiens; identical to SEQ ID NO: 20695
  misc_feature 1, 2, 3854, 3855: n = A,T,C or G

SEQ ID NO: 21874 - DNA, 469 bp, Homo sapiens
  misc_feature 1, 2, 3, 4, 5: n = A,T,C or G
nnnnncaccgcggtccgcccgggcagtacgcgggggggcaaaaaaatcaaggtatttggtcccggaacaaagcttatcattacaggtaagttttctttaaattttgcaatgtaaagaagggatgggaggctggcaggcaggagctggctcagaattctaggattccctccttggtcactaatcatggtgaaatctccagagaggtcaggtgacttggttcatgccttaggagtcagaacttttcctgccctagcatgggagacattactaaggagcttagaccaactgcaaatctctaaaggatggaggccttatgttgttccattggtatctctctgttgaaagttttgtgaacaagtttagttttgagattttatttcttcagttctaaaaataaccaatggaaaaaacaagacataaaaaaaaaatcagctaccctccttatttggtcaccaaaagatgaaatatt

SEQ ID NO: 21875 - DNA, 417 bp, Homo sapiens
ggtggcggccgaggtacccttccactcctactccactttgagatatcccacctttttaggttaaaccaatatgtagcctcatgtattgatttatgactttgcctgtaacctctgccacgctgcctttaaaaacccttacctgtgtaagccatctgggagttcaaggtcttaaccatgacctccctgatcctccttgcttggtgccctgcaacaaatgccccactttctctccctgcaatcccgatgtcagtgtgtggctttgctgctctgggtgggcagacccaagttcagcaagtaaccattctaaggagggtgtttacaccttcttcatgatcccttgtcactgtttcatcctaaatcctgattccaacccaattatctgttccttctcatcatctcccctctctttatttcact

SEQ ID NO: 21876 - DNA, 2538 bp, Homo sapiens; identical to SEQ ID NO: 20316
  misc_feature 2538: n = A,T,C or G

SEQ ID NO: 21877 - DNA, 758 bp, Homo sapiens; identical to SEQ ID NO: 21402
  misc_feature 1, 2, 756, 757, 758: n = A,T,C or G

SEQ ID NO: 21878 - DNA, 2360 bp, Homo sapiens
gcggccgaggtacttcccggttcctttgcgtctgagggccttatgccggaggggatagaaagcccaacagaaactcaagatagaagaaggagaatctgcgagtgtctgtctcctgtcaagcttccctaatacggccctggtagaacttcatcaacagtggaaggcatttgcaaagccggttcggaggaagagtgaaatccccgagatcagcagggcaaaatgctggaagttgtcgaggatgcagagagtagcaggaagacacctctgagaactcactcacacaccctgcccctgtgtagagatgtcatcctggggatgagaaggaggaagacagagaaacgcagaaaagcctaagcaggcaccacaaagagaccgagcccgtctgaaagaggctgctctaacctggtggaaactattttaagttggtaagtttagtgcctccccactaatatcagaacgagcaagagacgacaggtataggttgtgtacattcccctctgcgttgaatgatagcgtgtgcgtgttccaccactgtgccctgctcaaagttagctgggtggctgtgccctgctcaaagtcacttgggtgaggggcgcccgtgggagccaaaaatcccatcttacacccaccccctgcacactctggagttgggctgtgacatgctggagaaaggtgtctttgtctaattattctgcctaagggcatgccttttgttaattagtaaaaggaagccttatttgtgctctgcagagtgggggtgctgtttaggaggtaattcgtgatagaaccacacagacaagatagattcaatttaaataaattgaatctatgaagcttcctaaccccatggaaacacaaaattagtttacacaaaaataatcattaaagaactaatgaaaataatgtttgaattcagccaccagacattacattccagagccttgagaaaaactgatgaaaaaaaagtcatgaaaaaaagtcattcgcacaagtgacaccatggtgtgaagtcaaggagcacagactctggagtcagagggcttgagtcaacctgagcatcttcagctttgactgtgaagacacagctttgactctctgtgttgcagagatggtagtgcccactccagtgacgcttgtgaggattagttgagataataaatacaaaatgctgagcatcaaacctagagtagagaaaggtctcaagtaagtactcattaccagtatttgttatttaatttcacttttgtctacattcccttgtgtgaaatggtttggataattaattaaggaaaactttccctcagggacattgctgatattgcaatcttcactagatacacttatctctacctccgcctccacctccaccttcacctccatctcttctctgtctctatctctatcttcctgttgtttatctatctaattatttataaatgaactggtgggtttgttgttgttgcagcctggctaatgttatccagacatatctgaaacctcatgagtggcatggaatggcagtccctgcttgaaccatttacctcctttcctaacaccaacaatcacacacacctgacactgacctgaagcctctggcctgtcctcggaggcaaagactgggtagacaagatgcctggttaccagcaatcttctgcaatttcctctgagctattgagattgcttttctctttgctcaaattatgtgagaaacttttaaaaaagaatttaatgtgctcttttgatatttcaggtgttcattcaaaagcctatgttattctctgtctctctctctcttttcctagttgggtaatcaaaatggcacaatcagaaatatttatatctgcaacagaaaagaagaataaatttattcatgcacaagtacattatgtacatatatatgtttgtgtatacatatatctgtataattgatatatttgggagaaataaaaggtttcattaagcacacaagttctagagttagaccctctgtcgcaaattactgtcctgtcacttaactcctgccagaacaaagtgcatacttgaacaaaatgcctgctctgtaaaaatgccttgatcttgaataaaatgcctgctaggtcaaagcttctattttcccacctagaaaatgggaacaataataagaatcctcacttaatagataatggaaaaagttgcttgcagcacagagcctgctacagacaatgccttcaattaatgcaaactattaatattatgaaaagtgagtatctgttttctgacaatgttttcaataatataaattctgcctttgttcactttatttgtttgaaaaaacaaataaaaaaccaaacaaaaaagtgaaaaaaaaaaaagaaaaaaaa

SEQ ID NO: 21879 - DNA, 2200 bp, Homo sapiens
  misc_feature 2020, 2038, 2086, 2165, 2184: n = A,T,C or G
acgcgtccgcttgctgaggggtgggggtgagcaaggcgaggttgcctcatgtcttctccaaagggtctgagggcaggcgcttccaggctatttagataagagcagccgttgagggtgttcttcaggaacaggctgctgcccaatcctctgcgacctgcccaggccctggtcttgcagaggagtagggggctccccttcaagcacagcccacctgtgtccacgaggctggaggtcaggccggtgcttcttaccacccctgtctgcctcgtaggtggacagcgccatgtccctgatccaggcagccaagaacttgatgaatgctgtggtgcagacagtgaaggcatcctacgtcgcctctaccaaataccaaaagtcacagggtatggcttccctcaaccttcctgctgtgtcatggaagatgaaggcaccagagaaaaagccattggtgaagagagagaaacaggatgagacacagaccaagattaaacgggcatctcagaagaagcacgtgaacccggtgcaggccctcagcgagttcaaagctatggacagcatctaagtctgcccaggccggccgcccccacccctcggggctcctgaatatcagtcactgttcgtcactcaaatgaatttgctaaatacaacactgatactagattccacagggaaatgggcagactgaaccagtccaggtggtgaattttccaagaacatagtttaagttgattaaaaatgcttttagaatgcaggagcctacttctagctgtatttttttgtatgcttaaataaaaataaaaattcataaccaaagagaatcccacattagcttgttagtaatgctctgaccaagccgagatgcccattctcttagtgatggcggcgttagggtttgagagaagggaatttggctcaacttcagttgagagggtgcagtccagacagcttgactgcttttaaatgaccaaagatgacctgtggtaagcaacctgggcatcttaggaagcagtccctggagaaggcatgttcccagaaaggtctctggagggacaaactcactcagtaaaacataatgtatcatcatgaagaaaactgattctctatgacatgaaatgaaaattttaatgcattgttataattactaatgtacgctgctgcaggacattaataaagttgcttttttaggctacagtgtctcgatgccataatcagaacacactttttttcctctttctcccagcttcaaatgcaaattcatcattgggctcacttctaataactgcagtgtttcccgccttgggcttgcagcagaaaaacctgacaacatagagtttgctaaggcagtaatttagactttaccttatttgtgattactgtagtgattgattgattactattaactacaaggtataatttactatcaccttatttaaattttatgaattaatttgaatgttttttacactaactaacttttcccaataaagtccactatgaaaccacgacatccaagaggccaaagtcgtcttctctgccttcaagtcatagatttgcccgcagtatctgtggtgctctgggccctcccggtgtccgtctcttccaggatggggatgcccgggagggaaactgtctgtggctctaggctgcacggctcgtgccaacccatcagggagggccatgcccgttgtcctattgagtgccccaccctgcacccccaccttgggaattcacatgtccattccttgaggttcatgtcaacctcggaggcatccctgtcttcattatagctgacccctctcctgcgtccttctgtcagcatatcccttctgcatccttcccgtcacacatacataccaagctatgatgattgattgatagtggccttcgagatgaaaaccatccttaaccccatgatccttcccagctggcatccccaccctaagcaaggttccctaaagagaagcttgttgacattttctccccttcctacttacagtcagctgtcaccttgctccttcacctncctcgtcaaggtgactgncttcactgcagcacactggcaattgcttgagacctaccgggcaaccgnctgggggcttgcggggaagaagaggaggacaaggctctgacctgttacttggtttcaggaaaccccgttaggttttgcngcttatgggggctcctttnctttccgggctaaaag

SEQ ID NO: 21880 - DNA, 2538 bp, Homo sapiens; identical to SEQ ID NO: 20316
  misc_feature 2538: n = A,T,C or G

SEQ ID NO: 21881 - DNA, 886 bp, Homo sapiens
  misc_feature 1, 2, 3, 4, 5, 6, 886: n = A,T,C or G
nnnnnngggcctttgcaatctccacgttgcgatggatccttggacccacttttgttaactcttaaactttgtgtctttgtctttatttcttttctcattccctcgtctccaccgggaaggggagagcctgcgggtggtgtatcaggcaggttcccctacatctttggcacccaacacggtctccttgaacccaggtgaagttacacctgagcgtggtcgttgtgaagaacggtctgtccaggaactcccgagaacgtgtggtcggccttgcggtaagcttgtgcactcggagcattccagggacaccatgggacaatccaaaagtaaacattctgcatatttacattttattaagctcctcttaaagagggcaggaattaaggctagcacagaaaatttgattactctgtttccaacagtagagcaatatcgtccttggtttcctgaacatggtaccatggacttcaaagattggaacaggtgggaatggccttaaaacaagttgtcaggaaggaaaatttatccccctaacagcctggtcaaactgggctatagttaaagcagcctcggaaccgtttcaatcggaaaatgaggcttatcctccagcagaagaatttctgcagaggaaggtgggatgctgctgaagaggaaaggactagggaacgcagcatttgagggaacatccgaccaacctgagatgagtaattccttgaggaccccgggaccttcagcggctaaaaagaagccttatgcacagagttaaccagacgcctgggagcgcggcccaggacaccggggcccaaaagagagggccggggggcaccacgccccaaaatggcccccacgcgggggcccaaggcgccgtgaccaaaggggagcgcgcgan

SEQ ID NO: 21882 - DNA, 862 bp, Homo sapiens; identical to SEQ ID NO: 21330

SEQ ID NO: 21883 - DNA, 728 bp, Homo sapiens; identical to SEQ ID NO: 21701
  misc_feature 1, 2, 727, 728: n = A,T,C or G

SEQ ID NO: 21884 - DNA, 1702 bp, Homo sapiens
cggaatacttctagaattaattaacgcgggggagtcagttccgcggtagaggtgactctgactctctgaggctcattttgcagttgttgaaattgtccccgcagttttcaatcatgtctgaaccaatcagagtccttgtgactggagcagctggtcaaattgcatattcactgctgtacagtattggaaatggatctgtctttggtaaagatcagcctataattcttgtgctgttggatatcacccccatgatgggtgtcctggacggtgtcctaatggaactgcaagactgtgcccttcccctcctgaaagatgtcatcgcaacagataaagaagacgttgccttcaaagacctggatgtggccattcttgtgggctccatgccaagaagggaaggcatggagagaaaagatttactgaaagcaaatgtgaaaatcttcaaatcccagggtgcagccttagataaatacgccaagaagtcagttaaggttattgttgtgggtaatccagccaataccaactgcctgactgcttccaagtcagctccatccatccccaaggagaacttcagttgcttgactcgtttggatcacaaccgagctaaagctcaaattgctcttaaacttggtgtgactgctaatgatgtaaagaatgtcattatctggggaaaccattcctcgactcagtatccagatgtcaaccatgccaaggtgaaattgcaaggaaaggaagttggtgtttatgaagctctgaaagatgacagctggctcaagggagaatttgtcacgactgtgcagcagcgtggcgctgctgtcatcaaggctcgaaaactatccagtgccatgtctgctgcaaaagccatctgtgaccacgtcagggacatctggtttggaaccccagagggagagtttgtgtccatgggtgttatctctgatggcaactcctatggtgttcctgatgatctgctctactcattccctgttgtaatcaagaataagacctggaagtttgttgaaggtctccctattaatgatttctcacgtgagaagatggatcttactgcaaaggaactgacagaagaaaaagaaagtgcttttgaatttctttcctctgcctgactagacaatgatgttactaaatgcttcaaagctgaagaatctaaatgtcgtctttgactcaagtaccaaataataataatgctatacttaaattacttgtgaaaaacaacacattttaaagattacgtgcttcttggtacaggtttgtgaatgacagtttatcgtcatgctgttagtgtgcattctaaataaatatatattcaaatgaaaaaaaaaaaaaaaaaaaaaaaaaaaaaaaaaaaaaaaaaaaaaaaacaaacaaaaaaaaaaaaaaaaaaaaaaaaaaaaaaaaaaaaaaagggggggggggggattaaatattcccggggggggacgacaaataatgaaagacaacacacgtctttttgtagaaaaagcagccacccataatggagggtgtttataaaaggaaggccggggaggttttaaaaagctgtgcgagagagaaaaattgtcgtgagtttttgaagaagacacatcctttgtgtgggtctagacgggaaccacaccgaaaagataaggacggggaaaatacaatgggtatagtggaacaggcttttgtggcaaatgtcgtgtgttatata

SEQ ID NO: 21885 - DNA, 11420 bp, Homo sapiens
  misc_feature 1, 2, 3, 4, 5, 6, 7, 8, 9, 10, 11, 12, 13, 14, 11418, 11419,11420: n = A,T,C or G
nnnnnnnnnnnnnngatttagctcctctttaatttccttcaacagtgttctgtagtttccagtctacaagtcttacacttttgggttaaatttattcataattattttattatgtttgataatattataaatggaattgtttacttaattttacttgaattgttccttgctggtgtataagtagacatctcatttttttagttgacctcgtatggtacaatctctttgaactcatttattatcactgatagtttaggtctttttttttcgaggtttcattaaggttttctatagataagatcatgtcaagacaccctcagaccacagggcggcgccacgagcccggccgagtgcagctggagcgccgacgtctgccgaggatacacagctgctgaggcagaacgcaggttcgtcacagtgggcctccgtgggcggcgccgcacgctcgtcacagtgggcctccgccggctacgccgctgcttcagtggcttgcaggcactttcctcttggaagtggcgactgctgcggggctgagcggtgctcgcacgcgtctcgggagccaggttggcggcgcgatgaggcgcagcaaggccgatgtggagcggtacgtcgcctcggtgctgggtctcaccccgtcgcctcgacagaagtcaatgaaaggattctattttgcaaagctgtattatgaagctaaagaatatgatcttgctaaaaaatacatatgtacttacattaatgtgcaagagagggatcccaaagctcacagatttctgggtcttctttatgaattggaagaaaacacagagaaagccgttgaatgttacaggcgttcagtggaattaaacccaacacaaaaagatcttgtgttgaagattgcagaattgctttgtaaaaatgatgttactgatggaagagcaaaatactgggtcgaaagagcagcaaaacttttcccaggaagtcctgcaatttataaactaaaggaacagcttctagattgtgaaggtgaagatggatggaataaactttttgacttgattcagtcagaactttatgtaagacctgatgacgtccatgtgaacatccggctagtggaggtgtatcgctcaactaaaagattgaaggatgctgtggcccactgccatgaggcagagaggaacatagctttgcgttcaagtttagaatggaattcgtgtgttgtacagacccttaaggaatatctggagtctttacagtgtttggagtctgataaaagtgactggcgagcaaccaatacagacttactgctggcctatgctaatcttatgcttcttacgctttccactagagatgtgcaggaaagtagagaattactgcaaagttttgatagtgctcttcagtctgtgaaatctttgggtggaaatgatgaactgtcagctactttcttagaaatgaaaggacatttctacatgcatgctggttctctgcttttgaagatgggtcagcatagtagtaatgttcaatggcgagctctttctgagctggctgcattgtgctatctcatagcatttcaggttccaagaccaaagattaaattaataaaaggtgaagctggacaaaatctgctggaaatgatggcctgtgaccgactgagccaatcagggcacatgttgctaaacttaagtcgtggcaagcaagattttttaaaagaggttgttgaaacttttgccaacaaaagcgggcagtctgcattatatgatgctctgttttctagtcagtcacctaaggatacatcttttcttggtagcgatgatattggaaacattgatgtacaagaaccagagcttgaagatttggctagatacgatgttggtgctattcgagcacataatggtagtcttcagcatcttacttggcttggcttacagtggaattcattgcctgctttacctggaatccgaaaatggctaaaacagcttttccatcatttgccccatgaaacctcaaggcttgaaacaaatgcgcctgaatcaatatgtattttagatcttgaagtatttctccttggagtagtatataccagccacttacaattaaaggagaaatgtaattctcaccacagctcctatcagccgttatgcctgccccttcctgtgtgtaaacagctttgtacagaaagacaaaaatcttggtgggatgcggtttgtactctgattcacagaaaagcagtacctggaaacgtagcaaaattgagacttctagttcagcatgaaataaacactctaagagcccaggaaaaacatggccttcaacctgctctgcttgtacattgggcagaatgccttcagaaaacgggcagcggtcttaattctttttatggtcaactagaatacatagggagaagtgttcattattggaagaaagttttgccattgttgaagataataaaaaagaagaacagtattcctgaacctattgatcctctgtttaaacattttcatagtgtagacattcaggcatcagaaattgttgaatatgaagaagacgcacacataacttttgctatattggatgcagtaaatggaaatatagaagatgctgtgactgcttttgaatctataaaaagtgttgtttcttattggaatcttgcactgatttttcacaggaaggcagaagacattgaaaatgatgccctttctcctgaagaacaagaagaatgcaaaaattatctgagaaagaccagggactacctaataaagattatagatgacagtgattcaaatctttcagtggtcaagaaattgcctgtgcccctggagtctgtaaaacagatgcttaattcagtcatgcaggaactcgaagactatagtgaaggaggtcctctctataaaaatggttctttgcgaaatgcagattcagaaataaaacattctacaccgtctcctaccaaatattcactatcaccaagtaaaagttacaagtattctcccgaaacaccacctcgatggacagaagatcggaattctttactgaaaatgatttgccaacaagtagaggccattaagaaagaaatgcaggagttgaaactaaatagcagtaagtcagcatcccgtcatcgttggcccacagagaattatggaccagactcggtgcctgatggatatcaggggtcacagacatttcatggggctccactaacagttgcaactactggcccttcagtatattatagtcagtcaccagcatataattcccagtatcttctcagaccagcagctaatgttactcccacaaagggcccagtctatggcatgaataggcttccaccccaacagcatatttatgcctatccgcaacagatgcacacaccgccagtgcaaagctcatctgcttgtatgttctctcaggagatgtatggtcctcctgcattgcgttttgagtctcctgcaacgggaattctatcgcccaggggtgatgattactttaattacaatgttcaacagacaagcacaaatccacctttgccagaaccaggatatttcacaaaacctccgattgcagctcatgcttcaagatctgcagaatctaagactatagaatttgggaaaactaattttgttcagcccatgccgggtgaaggattaaggccatctttgccaacacaagcacacacaacacagccaactccttttaaatttaactcaaatttcaaatcaaatgatggtgacttcacgttttcctcaccacaggttgtgacacagccccctcctgcagcttacagtaacagtgaaagccttttaggtctcctgacttcagataaacccttgcaaggagatggctatagtggagccaaaccaattcctggtggtcaaaccattgggcctcgaaatacattcaattttggaagcaaaaatgtgtctggaatttcatttacagaaaacatggggtcgagtcagcaaaagaattctggttttcggcgaagtgatgatatgtttactttccatggtccagggaaatcagtatttggaacacccactttagagacagcaaacaagaatcatgagacagatggaggaagtgcccatggggatgatgatgatgacggtcctcactttgagcctgtagtacctcttcctgataagattgaagtaaaaactggtgaggaagatgaagaagaattcttttgcaaccgcgcgaaattgtttcgtttcgatgtagaatccaaagaatggaaagaacgtgggattggcaatgtaaaaatactgaggcataaaacatctggtaaaattcgccttctaatgagacgagagcaagtattgaaaatctgtgcaaatcattacatcagtccagatatgaaattgacaccaaatgctggatcagacagatcttttgtatggcatgcccttgattatgcagatgagttgccaaaaccagaacaacttgctattaggttcaaaactcctgaggaagcagcactttttaaatgcaagtttgaagaagcccagagcattttaaaagccccaggaacaaatgtagccatggcgtcaaatcaggctgtcagaattgtaaaagaacccacaagtcatgataacaaggatatttgcaaatctgatgctggaaacctgaattttgaatttcaggttgcaaagaaagaagggtcttggtggcattgtaacagctgctcattaaagaatgcttcaactgctaagaaatgtgtatcatgccaaaatctaaacccaagcaataaagagctcgttggcccaccattagctgaaactgtttttactcctaaaaccagcccagagaatgttcaagatcgatttgcattggtgactccaaagaaagaaggtcactgggattgtagtatttgtttagtaagaaatgaacctactgtatctaggtgcattgcgtgtcagaatacaaaatctgctaacaaaagtggatcttcatttgttcatcaagcttcatttaaatttggccagggagatcttcctaaacctattaacagtgatttcagatctgttttttctacaaaggaaggacagtgggattgcagtgcatgtttggtacaaaatgaggggagctctacaaaatgtgctgcttgtcagaatccgagaaaacagagtctacctgctacttctattccaacacctgcctcttttaagtttggtacttcagagacaagtaaaactctaaaaagtggatttgaagacatgtttgctaagaaggaaggacagtgggattgcagttcatgcttagtgcgaaatgaagcaaatgctacaagatgtgttgcttgtcagaatccggataaaccaagtccatctacttctgttccagctcctgcctcttttaagtttggtacttcagagacaagcaaggctccaaagagcggatttgagggaatgttcactaagaaggagggacagtgggattgcagtgtgtgcttagtaagaaatgaagccagtgctaccaaatgtattgcttgtcagaatccaggtaaacaaaatcaaactacttctgcagtttcaacacctgcctcttcagagacaagcaaggctccaaagagcggatttgagggaatgttcactaagaaggagggacagtgggattgcagtgtgtgcttagtaagaaatgaagccagtgctaccaaatgtattgcttgtcagaatccaggtaaacaaaatcaaactacttctgcagtttcaacacctgcctcttcagagacaagcaaggctccaaagagcggatttgagggaatgttcactaagaaggaaggacagtgggattgcagtgtgtgcttagtaagaaatgaagccagtgctaccaaatgtattgcttgtcagtgtccaagtaaacaaaatcaaacaactgcaatttcaacacctgcctcttcggagataagcaaggctccaaagagtggatttgaaggaatgttcatcaggaaaggacagtgggattgtagtgtttgctgtgtacaaaatgagagttcttccttaaaatgtgtggcttgtgatgcctctaaaccaactcataaacctattgcagaagctccttcagctttcacactgggctcagaaatgaagttgcatgactcttctggaagtcaggtgggaacaggatttaaaagtaatttctcagaaaaagcttctaagtttggcaatacagagcaaggattcaaatttgggcatgtggatcaagaaaattcaccttcatttatgtttcagggttcttctaatacagaatttaagtcaaccaaagaaggattttccatccctgtgtctgctgatggatttaaatttggcatttcggaaccaggaaatcaagaaaagaaaagtgaaaagcctcttgaaaatggtactggcttccaggctcaggatattagtggccagaagaatggccgtggtgtgatttttggccaaacaagtagcacttttacatttgcagatcttgcaaaatcaacttcaggagaaggatttcagtttggcaaaaaagaccccaatttcaagggattttcaggtgctggagaaaaattattctcatcacaatacggtaaaatggccaataaagcaaacacttccggtgactttgagaaagatgatgatgcctataagactgaggacagcgatgacatccattttgaaccagtagttcaaatgcctgaaaaagtagaacttgtaacaggagaagaaggtgaaaaagttctgtattcacagggggtaaaactatttagatttgatgctgaggtaagtcagtggaaagaaaggggcttggggaacttaaaaattctcaaaaacgaggtcaatggcaaactaagaatgctgatgcgaagagaacaagtactaaaagtgtgtgctaatcattggataacgactacgatgaacctgaagcctctctctggatcagatagagcatggatgtggttagccagtgatttctctgatggtgatgccaaactagagcagttggcagcaaaatttaaaacaccagagctggctgaagaattcaagcagaaatttgaggaatgccagcggcttctgttagacataccacttcaaactccccataaacttgtagatactggcagagctgccaagttaatacagagagctgaagaaatgaagagtggactgaaagatttcaaaacatttttgacaaatgatcaaacaaaagtcactgaggaagaaaataagggttcaggtacaggtgcggccggtgcctcagacacaacaataaaacccaatcctgaaaacactgggcccacattagaatgggataactatgatttaagggaagatgctttggatgatagtgtcagtagtagctcagtacatgcttctccattggcaagtagccctgtgagaaaaaatcttttccgctttgatgagtcaacaacaggatttaacttcagttttaaatctgctttgagtctatctaagtctcctgccaagttgaatcagagtgggacttcagttggcactgatgaagaatctgatgttactcaagaagaagagagagatggacagtactttgaacctgttgttcctttacctgatctagttgaagtatccagtggtgaggaaaatgaacaagttgtttttagtcacagggcaaaactctacagatatgataaagatgttggtcaatggaaagaaaggggcattggtgatataaagattttacagaattatgataataagcaagttcgtatagtgatgagaagggaccaagtattaaaactttgtgccaatcacagaataactccagacatgagtttgcaaaatatgaaagggacagaaagagtatgggtgtggactgcatgtgattttgcagatggagaaagaaaagtagagcatttagctgttcgttttaaactacaggatgttgcagactcgtttaagaaaatttttgatgaagcaaaaacagcccaggaaaaagattctttgataacacctcatgtttctcggtcaagcactcccagagagtcaccatgtggcaaaattgctgtagctgtattagaagaaaccacaagagagaggacagatgttattcagggtgatgatgtagcagatgcaacttcagaagttgaagtgtctagcacatctgaaacaacaccaaaagcagtggtttctcctccaaagtttgtatttggttcagagtctgttaaaagcatttttagtagtgaaaaatcaaaaccatttgcattcggcaacagttcagccactgggtctttgtttggatttagttttaatgcacctttgaaaagtaacaatagtgaaactagttcagtagcccagagtggatctgaaagcaaagtggaacctaaaaaatgtgaactgtcaaagaactctgatatcgaacagtcttcagatagcaaagtcaaaaatctctttgcttcctttccaacggaagaatcttcaatcaactacacatttaaaacaccagaaaaggcaaaagagaagaaaaaacctgaagattctccctcagatgatgatgttctcattgtatatgaactaactccaaccgctgagcagaaagcccttgcaaccaaacttaaacttcctccaactttcttctgctacaagaatagaccagattatgttagtgaagaagaggaggatgatgaagatttcgaaacagctgtcaagaaacttaatggaaaactatatttggatggctcagaaaaatgtagacccttggaagaaaatacagcagataatgagaaagaatgtattattgtttgggaaaagaaaccaacagttgaagagaaggcaaaagcagatacgttaaaacttccacctacatttttttgtggagtctgtagtgatactgatgaagacaatggaaatggggaagactttcaatcagagcttcaaaaagttcaggaagctcaaaaatctcagacagaagaaataactagcacaactgacagtgtatatacaggtgggactgaagtgatggtaccttctttctgtaaatctgaagaacctgattctattaccaaatccattagttcaccatctgtttcctctgaaactatggacaaacctgtagatttgtcaactagaaaggaaattgatacagattctacaagccaaggggaaagcaagatagtttcatttggatttggaagtagcacagggctctcatttgcagacttggcttccagtaattctggagattttgcttttggttctaaagataaaaatttccaatgggcaaatactggagcagctgtgtttggaacacagtcagtcggaacccagtcagccggtaaagttggtgaagatgaagatggtagtgatgaagaagtagttcataatgaagatatccattttgaaccaatagtgtcactaccagaggtagaagtaaaatctggagaagaagatgaagaaattttgtttaaagagagagccaaactttatagatgggatcgggatgtcagtcagtggaaggagcgcggtgttggagatataaagattctttggcatacaatgaagaattattaccggatcctaatgagaagagaccaggtttttaaagtgtgtgcaaaccacgttattactaaaacaatggaattaaagcccttaaatgtttcaaataatgctttagtttggactgcctcagattatgctgatggagaagcaaaagtagaacagcttgcagtgagatttaaaactaaagaagtagctgattgtttcaagaaaacatttgaagaatgtcagcagaatttaatgaaactccagaaaggacatgtatcactggcagcagaattatcaaaggagaccaatcctgtggtgttttttgatgtttgtgcggacggtgaacctctagggcggataactatggaattattttcaaacattgttcctcggactgctgagaacttcagagcactatgcactggagagaaaggctttggtttcaagaattccatttttcacagagtaattccagattttgtttgccaaggaggagatatcaccaaacatgatggaacaggcggacagtccatttatggagacaaatttgaagatgaaaattttgatgtgaaacatactggtcctggtttactatccatggccaatcaaggccagaataccaataattctcaatttgttataacactgaagaaagcagaacatttggactttaagcatgtagtatttgggtttgttaaggatggcatggatactgtgaaaaagattgaatcatttggttctcccaaagggtctgtttgtcgaagaataactatcacagaatgtggacagatataaaatcattgttgttcatagaaaatttcatctgtataagcagttggattgaagcttagctattacaatttgatagttatgttcagcttttgaaaatggacgtttccgatttacaaatgtaaaattgcagcttatagctgttgtcactttttaatgtgttataattgaccttgcatggtgtgaaataaaagtttaaacactggtgtatttcaggtgtacttgtgtttatgtactcctgacgtattaaaatggaataatactaatcttgttaaaagcaatagacctcaaactattgaaggaatatgatatatgcaatttaattttaattccttttaagatatttggacttcctgcatggatatacttaccatttgaataaagggaccacaacttggataatttaattttaggtttgaaatatatttggtaatcttaactattggtgtactcatttatgcatagagactcgtttatgaatgggtagagccacagaacgtatagagttaaccaaagtgctcttctctagaatctttacacctcctgtgtggttacaagttaactttgtaagtagcgtaccttccttccttaaaatatctagcttcctgtgccctttcatagatattcgattaatttttacattttaaacaagttgactatttcctttaggggttttgtttcaaacttttctgtcatctgtctctactacctcagaaactgcagcttggttctgatgatagaaattgaatttttccttgtagttattgtgataaagtatgaatatttttagaaagtctataccatgttctttcgttaaagatttgctttatacaagattgttgcagtacctttttctggtaaattttgtagcagaaataaaatgacaattcctaagagccactgacatccaaaaaaaattcatttacttacgcttcggggtcatctaaagtaaggagaccatttaaggccgtaattcaactgtgctaatttcagagtcctaattctcagtgtgtacacaccaaaagtttggacagcttgttccactgtcggccatgtagaaaaggggtttgggcaacaatgggtaagatcggggaacacattgtttggttgctttggggtccccttggtctcggaccttttgggcaagccgccggggggctacaagcgcccccannn

SEQ ID NO: 21886 - DNA, 862 bp, Homo sapiens; identical to SEQ ID NO: 21330

SEQ ID NO: 21887 - DNA, 784 bp, Homo sapiens
cctccaagagtgtgtcctatttcgccatcatcacctgctgtctgcctagcaagaacggcttctgcctgcaatggagagaatccataacagacggtggcacaaggagcccatcttttcctcatcggttattgtccctagaagcgtcttctgaggatctagttgggccttctttctgggtttgggccatttcagttctcatgtgtgtactattctatcattattgtataacggttttcaaaccagtgggcacacagagaacctcactctgtaataacaatgaggaatagccacggcgatctccagcaccaatctctccatgttttccacagctcctccagccaacccaaatagcgcctgctatagtgtagacatctcgcggcttctagccttgtccctctcttagtgttctttaatcagataactgcctggaagcctttcattttacacgccctgaagcagtcttctttgctagttgaattattttgcttattacggaaaaacacaccacataattcaactagcaaagaagactgcttcagggcgtgtaaaatgaaaggcttccaggcagttatctgattaaggaacactaagagagggacaaggctagaagccgcaggatgtctacactatagcaggcgctatttgggttggctggaggagctgtggaaaacatggagagattggtgctggagatcgccgtggctattcctcattgttattacagagtgaggttctctgtgtgcccactggtttgaaaaccgttatacaataatgatagaatagt

SEQ ID NO: 21888 - DNA, 420 bp, Homo sapiens; identical to SEQ ID NO: 21659
  misc_feature 1, 2, 3, 4: n = A,T,C or G

SEQ ID NO: 21889 - DNA, 1185 bp, Homo sapiens; identical to SEQ ID NO: 21532
  misc_feature 1, 2, 3, 4, 5, 6, 7, 8, 9, 10, 11, 12, 13, 14, 15, 16, 17,18, 19, 20, 21, 22: n = A,T,C or G

SEQ ID NO: 21890 - DNA, 2538 bp, Homo sapiens; identical to SEQ ID NO: 20316
  misc_feature 2538: n = A,T,C or G

SEQ ID NO: 21891 - DNA, 658 bp, Homo sapiens
acactagacctagagctctgggaacaagtgggaagaaatcttaaacgacgtgcgcaagggcagtaggtcccagtaacatcttaatgttatggtcctaatagggttgctttggccctgctcttcatagaagagcccaaaaagataagggaaggggaaccactacccactttaatgcctcagcctccctcagccttgccgtcactggctaaagataccaaagaggagacggaggttttcctccccctccccccaatgaactgggaagaagacaagcgatatactacagttatgggaccctgccttaggcaagcagcattggaaggggaactcttggcctgcccagtgatgcaagatcaacaaggcaattgggtgcatgagcccattacattgaacacttctaaggaaataagaaaaagcattagagaaaatggggccactagcccattcacaagaggattaattgaggcaatagcagataactaccatatgactccatgggactggtcagtgctagctaaaacaactttaggaggcgagtcaataccccctctggagggcagaatatgatgaattgtgtgaacaacaggctaaccagaatcaattgcctggacaaaacatcggctgctatgctccaggggaggggtccctatgttaatgt

SEQ ID NO: 21892 - DNA, 2538 bp, Homo sapiens; identical to SEQ ID NO: 20316
  misc_feature 2538: n = A,T,C or G

SEQ ID NO: 21893 - DNA, 2538 bp, Homo sapiens; identical to SEQ ID NO: 20316
  misc_feature 2538: n = A,T,C or G

SEQ ID NO: 21894 - DNA, 1380 bp, Homo sapiens; identical to SEQ ID NO: 20118
  misc_feature 1380: n = A,T,C or G

SEQ ID NO: 21895 - DNA, 446 bp, Homo sapiens; identical to SEQ ID NO: 20632
  misc_feature 441, 442, 443, 444, 445, 446: n = A,T,C or G

SEQ ID NO: 21896 - DNA, 2187 bp, Homo sapiens; identical to SEQ ID NO: 21516

SEQ ID NO: 21897 - DNA, 1297 bp, Homo sapiens
  misc_feature 1280, 1281, 1282, 1283, 1284, 1285, 1286, 1287, 1288, 1289,1290, 1291, 1292, 1293, 1294, 1295, 1296, 1297: n = A,T,C or G
actatcaggacactttgagtttccctgcagaggggaaggtgattgagtagataggaaagatgacaaagctattctcttcaaccatggacacatctgcacatgtaatcccagggccaaggccacacttggcttgcttcgctgatctctcttttacataaattccatttagcattttggctaccagataaatttctttccatttaaatataaaaagtcctatcagaggaatgaaggattgcaattttataaaaggtcataaggagaggttataacaatctttaacaggaatatgaaaaagcctgagtttgggggaaattttctgaacctgaaaaaggaagaaacagtagccataaggggaaatggcttttgaattttaacaaaatgaacttcgtatgttgctaaaaaatatgagctgaaaatatactgctttttttccctgagttatacctatctcctgaaggaccaagagtggcccgtgtgatgtcacttgccaacactaatcgatgagatgtctcgatctaaggcatcttagcaccaataacaaaaacattttaaaatcaatgattatataacctattcctattttctttgagagaagagctcttcctaaaaataccaccaaccatattctctttcagctacaaatgaattcaaatgtaatttttttctataacattaatgtcaggttttatgacccactgcagagaaataaatagtttaaagtgtttttggactactggcatttaaatggaaagccagccttaaggtcgtgtgttaggtcatgtaaagcctgaagctgtcctaggtcagcgtcagattccgagtcatgtttgcctagtccgcacatgactgcagtacttgaataagtgcctacagcagacatttctcattttcccagaactatgatttgtaggtaaagaaatggaactgtggtgtatccaacatcatgtcatatatgctaaggtaaaatctggcactaaataagaaaaatggtttaactcttaaatggaatgaaacttttaaaaaatctgattttttcagctcttaaatagggaagttaggctggagacagtaggctcagtcatctcttaagcattcatggaaaaacctactatgtgtagtcattttgctagggtcatggggcctacagagacatatcagacagtagtaggagatgataggttcataaacaataacaataacagcaccatggcacatgtatacctctgtaacaaacctgcacgttctgcacatgtatcccagaacttaaagcaaagtannnnnnnnnnnnnnnnnn

SEQ ID NO: 21898 - DNA, 1651 bp, Homo sapiens
  misc_feature 1, 2: n = A,T,C or G
nncacaccgacctgcaccatctctcgcctgcctgtggggtttctgtcaactagtcgtggagggaaggagactctttaaagaataacatcttattgtggccatgccagaacccactaagaaagaggactggacccttgtcgaaactcctcctggggaggaacaagccaagcagaatgccaactcccagctgtccatcttgttcattgaaaaacctcaaggaggaacagtgaaagttggtgaagatatcaccttcatagccaaagtcaaggctgaagatcttctgagaaaacccactatcaaatggttcaaaggaacaatggatggacctggccagcaaagccgggaagcaccttcagctgaaggaaacctttgagaggcacagtcgggtgtacacatttgagatgcagatcatcaaggccaaagataactttgcaggaaattacagatgcgaggtcacctataaggataagtttgacagctgttcatttgatcttgaagtgcacgaatctactgggactactccaaacattgacatcagatctgctttcaagagaagtggagaaggtcaagaggatgcaggagaacttgactttagtggtctcctgaaacgtaggtgagaacaaagtgatggagtgagacattgtggcctggaagtctttcagacacccactcagagaagtcaagtttaaagtggatgttcttcagagaatttttcatttctgaaaatgtgttttgcttatagaatataacagagttgactagaaagagagaaacaactgcatactaatcttttaaagcctttaacagttgcttttaaactttctttttaaatgtttcatgactcttcacctattttttttttaaatggggacgaagagatatgaaaactgagacataagacaaatacctagaaacctctaagactgcacatatgattccgtctcatgactgaataaatgaagccttcattctcttacctttgatatttagtcaaaaaatcagttttacgattttggtagaagtctgaaggtatacacattgtaagaggctgacctactttaatgtattatttatgatgtactgtatttctgcaagtctaagacaccactgctattaagatacaccagcactttataaatcactaagcaatgaaaaaattgttccaaatggtttgacacaccattgattataagatgcattgtcatttcagaggtctttaaaatgcctcaaaaatgtgttttagaagtgacaaaatggaaataaaagtttagtatcatcacacactgacacttttcattgttctctcctgcaataaaatttataggatttcattatggatacttagaacataaccattttataagatttctctccatatatatttctataactgctatactcttcactaggattccctatatatataactatattatatgcctgttatagatatctagatatttactatagtgcagaagcaacaaaaagaaacactttttttctgagattatgttttatctagcaaatttgtaaataaacagagtaaaactataattttaaattaattgtatataatatcagttttcatttaactttccaggcttttaaaattacttttagtgctttctatggttattaaaagactacaagt

SEQ ID NO: 21899 - DNA, 436 bp, Homo sapiens; identical to SEQ ID NO: 21377

SEQ ID NO: 21900 - DNA, 724 bp, Homo sapiens
  misc_feature 664, 700, 701, 702, 703, 704, 705, 706, 707, 708, 709, 710,711, 712, 713, 714, 715, 716, 717, 718, 719, 720, 721, 722,723, 724: n = A,T,C or G
accttttctagaatgtggtcaaagagctgcctgcatccatcacattggggcttgttaccatagaagtgccctgggctcccctccagaacctgcaacttgaatctctataacgtgaagtatggggatcttcatttgtagcagccttgtccaaaaattaatctgcacactaacgcataagaaccactgcatactctctgcagggactgccttaaatattaggttaaaatcctagtgttaaagttgtttgattaacaacattggcaatatcacacaatttgtttataaaatcctaatgaataggtctgtgttcaagttattatgatcgtatggaatattgccctttgcatgtttccatcccctacagaaactacagaaatggatctgctcgtgactcggcctttaaaataaattactatattgtttttaaacgtctccctcctgtcagctattaacgtatgttatgacctgaagaaaatatgtaaaacatcaaaagaaaagtcagcattgaaattggaatttcgtaattaaatgatatgtaaaatttgaatattatttgttcagtcttattcttccagaacctcagttactttcttttattaattcagacagttaccacagtactagtcagctattactcagttctgatcaaattctaataaaaacntggattaaacagaattggaagactttagtttctgcnnnnnnnnnnnnnnnnnnnnnnnnn

SEQ ID NO: 21901 - DNA, 670 bp, Homo sapiens; identical to SEQ ID NO: 21478
  misc_feature 623, 625, 670: n = A,T,C or G

SEQ ID NO: 21902 - DNA, 1380 bp, Homo sapiens; identical to SEQ ID NO: 20118
  misc_feature 1380: n = A,T,C or G

SEQ ID NO: 21903 - DNA, 1221 bp, Homo sapiens
  misc_feature 1, 2, 3, 4, 5, 6, 7, 8, 9, 53: n = A,T,C or G
nnnnnnnnncaaaatcagccaaagtttataacccagggcatgtaataagcaanccaccatggaatgcaataaacagaaaggcaagaaaagtagtttaattcccctcccatcatttctatttttgaagcaagttgatctctgcaattttataaaagtactaaatttagtacagcaatatcatgaggaccagaatctatctaaccatctcatcctttccatgtcaaatacatggcctttgccatgtattttcatcagtatcttcagggcagtgaccttggtaagtcattaaggtggtaagtggagcagcaaagccgatatgtcactaggtagtcagcagacccagactgaagcctgaagagtgaaacaactttcctgctgggtggccctctgttcgttctattcctattttatcctgatggggagaagtgctttttaaaaatgatctttaatatttccagagtggctaacttccaaaaaacataacctaaagagtaaaaacattcttttctaaagaatgagaatcatgatatgctcttgacaagtatatgagccatcaactacagaagacttaaacaggttccaccgccctccctcctgggcactgggttcactgatgtaattcatatttggaactgtcttgccatgtatattacaggtagctatgacccctgaccttagattgtacttgggagctacaaacaacatagcttatattggttcttgctagaatgcttttctcccagaaatctcgagtactttacgcggcttcctttagaacagtggttctcaaattttacatgagaaattattgaggagcccaaagaacttttgtttatatgggttacagccgtcagtttttatgatatttaaaattaaaactaaaaaaattttcaactactggttaattcatttaaaatgcaaggacaggccaggcaacatggctcacacctgtaatcccagtactttgggaggccgaggcgggtggatcacgaagtcgggagttcaagaccagcctggccaatatggtgaaaccctgtctctactaaaaatacaaaaatcagctgggcatggtggcatgcgcctgtagtcccagctactcgggaggctgaggcagaagaatcacttgaacccgggaggcggaggctgcagtgagctgagactgtgccactgcactccagcctgggtaacagagcgagactctgttgcaaaaaaaaaaaaaaa

SEQ ID NO: 21904 - DNA, 2071 bp, Homo sapiens; identical to SEQ ID NO: 21824

SEQ ID NO: 21905 - DNA, 538 bp, Homo sapiens; identical to SEQ ID NO: 20391
  misc_feature 1, 2, 3, 4, 5, 6, 7, 8, 9, 10, 11, 12, 13, 536, 537, 538: n = A,T,C or G

SEQ ID NO: 21906 - DNA, 1272 bp, Homo sapiens
  misc_feature 1133, 1197, 1215, 1223, 1231: n = A,T,C or G
tcactatagggagtcgacccacgcgtccggatggcctttagtgggtaaatgatgaaagctggatgatggattcgtgtacgttaataatactatttgatttgttatttgatccatttgaaattatatttaaggaaagttaataaacaaatttgtcagaaattatacaaatgttcaataaattaaatttgaaaatgtggccacaatgaaaggaaaaagaaacacttgaacattatttatcacctttggtgtcctttgtgtgtgatgaaattgcattggctgatgtagaagaaagccatatctcatatgtttttattttatgttctttcttggccttttgtttgaccttctatgtcaccatcagaaaagctaagtttgctgtatagtgaggatcaggagatctgatcctgattgcagaaccttccctgattacagaatcttgggattgttgagaggattacatgtaaagtaccaggacagtgcatggcacatgttgtatctcccacttcacccttctagaccatcccagaagatctataagatttcatctgggaaatcactaggagttcttggaagggaaagaaggaagattgttggttggaataaaaacagggttgaatgagttccagaaagcagggttctcaacctcgtggacagcaatctgcagaagaagagaacttcaaaaaaccaactagaagcaacatgcagagaagtaaaatgagaggggcctcctcaggaaagaagacagctggtccacagcagaaaaatcttgaaccagctctcccaggaagatggggtggtcgctctgcagagaaccccccttcaggatccgtgaggaagaccagaaagaacaagcagaagactcctggaaacggagatggtggcagtaccagcgaagcacctcagccccctcggaagaaaagggcccgggcagaccccactgttgaaagtgaggaggcgtttaagaatagaatgggaggttaaagtgaagattcctgaagaattaaaaccatggcttgttgaggactgggacttagttaccagggcagaaagcagctgtttcaactccctgccaagaaaaaatgttgatgcaattctgggaagagtatgcaaattgcaagaaaatccgcaggggnaaattgtttgataataagggaatatgcgggttaaatgaaatttgttgggccgggaattaaaaanaaatattttccaatgttnaatgtttnggggcacntccagcttgctcttaccaaatttttgaaaaaaggcccccaa

SEQ ID NO: 21907 - DNA, 1380 bp, Homo sapiens; identical to SEQ ID NO: 20118
  misc_feature 1380: n = A,T,C or G

SEQ ID NO: 21908 - DNA, 594 bp, Homo sapiens; identical to SEQ ID NO: 20446
  misc_feature 586, 587, 588, 589, 590, 591, 592, 593, 594: n = A,T,C or G

SEQ ID NO: 21909 - DNA, 764 bp, Homo sapiens
acaagaccccaaatgtgagagggtgtttgtttcagtgttttatagagttcctaatatgccatcatatatacattcagttgttttcaaaatacagtttagtatttggctactcacaaagtaataaaacatttaaatcacttaaccatacaattcttggtaaccaaaaggcttttctttctattcagtagtttaacatccagctttcttttttagggcaaaggagatagaagtggatgaaatgagagagtatttttttaattgaactctgattaatgccaaaagtgttcaatcactatgtgtggggaagtttcctggtacaaggaaaaaaaacagacctaagtcagtgttagtctaccactgtacatctggtaacctcaatccctgcaaccggggcaaaatgggtttccaggtcttggcaacctttgaaattccaattccatttgagagagctttgacgaggccatatgctgatttcaccaccagcaacttcagaacccagtactggaatgccatcagccagcaggcccctgccatcatctatgacttctatctgtggctcactggaaggaaacccaggcaaggccaagatggctcaaagagcaaccagccacctctgcagcctgccacctcctgctggcaagatttgtttttgcatcctgtgaagagccaaggaggcaccagggcataagtctactcacttatatctgtttgtctggaacataacgcttgtttgtttttacaacaaataaaattgatctacgaaa

SEQ ID NO: 21910 - DNA, 4345 bp, Homo sapiens
  misc_feature 1, 2, 3, 4, 5, 6, 7, 8, 9, 10, 11, 12, 13, 14, 15, 16, 17,18, 19, 20, 21, 22, 23, 24, 25, 26, 27, 28, 29, 30: n = A,T,C or G
nnnnnnnnnnnnnnnnnnnnnnnnnnnnnnctttttaattttttattaaaaatgaaagaaacacagctaaacaatttatttacaattgcacaaggtttgaaacagctatcctattcctgttaaagcttcacatttaaaaatgtctacatgatatgtgcttgtacaaggcttgagtatcaaccacaaatgtgactttagcagctttattgcataatgatccacataacgctgcattatttgcttagtttagcctacatcataaagtgctattcatagatgggaaattaacagcctgctaaacactgaagttctccatgatatttgctacttgagttgagggtaaaaagctaatttaatgctaccagcctgagtaacagatttccattaaaaatataacaacaaggacaaccaaaaaaaacaggcctaaaagttttggttaccctgttaaaacatgtcaaaagcattccataaatgattactgctacaatgcataaaagtagtttctgaatattttaacctcaaaaaaataagtactttaaataaaaaccacctacttgaaagcacacacctttcaaaaacagacacacaatttagatagaatgtaattcctcaaattaaaagatattttaaagggtacacagtcattgtgatcttagttatcatttctaagtaattaaatttgtatttttacttgcttatattagaaatgcttattaccaatgagaaacagaaaatgccacataagtgaacatttaaatgttacaaaaatttataatatatgtaacgctactaaaatatataatgaacttttcaaacatgtaaatataaatcaggaaaacctgatatgtaataattgggccaaaaatgaaaatcacaaaacacagtaagggggtaaaagaataaatatgacttttaatatcagtccatctttaccaatatatctgaaaaataattctttgacataagaacaaatattttcacagaataagaaaaactaaagataaatttctctgaaaaaaagtatataaagtgagaagtttaatgtgttagctgagaactttgtgttttctgcaagaaaccatgcttactacccatgctgttaaatgagtgttatggctaagcagactcttaaaatgtccttagcaatacagtttgtggtcttaacaaaacaaaacagtagtattccttttccaggcaatatatttttaatagttacacactttaaaatacataattttccacttaaatatactaccacttttatggtgtttttcttttaacctatctagaactttgttttcctattgaaaacaaatgcaagacacattgcttagtactaattcctatccataaggcatttaaaaaatatcttctcttaggacataaacatgatataaaaatgaaaagtcaaacagaagagaatcataataaatacttttgtatcccccccaccataaggaaagtttcagcaacaccagctgacagaaataaattagatatcctgtacataaagtaaaagacagtccagttgcaaagttaaccacttcagtattaacttggaaagaacatcttcactttcatcatttgtgaaaggcagaacaacgacatgaagacacaaggctgtttagattttctgtatttcaagaagaatcatactcaaacacaagtggggtgacagaacactcagcgatatgtaattagttacgaaggttaacgctaaggcattgctttgtttacagtttttatcctgagtcacatcagatgtttcaactacatgtcctcttggtattccagatattttgctgtgatgggttcttcaagctgaattcctccactgcccattaatgcaaatgctggatacagtgtatgtgaacagtccacttggcgttcataaaggcatttcatctgatccatatcatagaaatttactttgcctttatcacagtcaaggaaaatcccaatacttgttggcatagggagaactctattttcaggttcattagaagaagtaggtgacttgggtataaaaaatttctgcatgcctatagtaactaaggtaaatggttgtgaagaatcaaaacaggcatcctcacttccactgtcatgcccactgtcttgctcatatcttggactaactgcatcccggggagaacggagccattcttgtagtttatcgctagaagcaactcccacttttaccaggtatgaatatggttccacacggaaggcccagaagtgttttccttttgtaatgccagtatctccaatgatgtagtctaagcttgtgtaataacccacttggatgcgttctgcagcaagcagaagattaaatccagctctactctctacacggtctctcttcaagttcagcaggaggtgttcattattatagccacatttttcatcaaagaggaagctgaaaactggagctggaggagtatgaagaatcaattctctgctgcaaggactacagattgaacccttgtaagctcttactctgaaagcataggtactactgttttccaagtcttgaattattttacttgttccacacacttctatctcattccatgacatttcatcatctctattgattttccgatattcaagaacatagctatcagctttatccttttctggatggtgccaatttatcaaggcattgttataaactttgctctgttcctcattgatctctggcacgtctatgccactagagaaaaaggataattctccaagaagttctgtttgtttagaggtattaacaacatagtcttcaaaagaagtctgagctgcaggtctaaagctcttcaaagattctgtggctttctgtattctgaggtggagctgctttgctgtctgcacaaagcaagactgatctgtctcctttagcacttcttgagcatatcccacaagtccattgttctctagaagtccctggtactcttccatttgagtctgaaatttgtctaatcttagtttcttagaggagtcaattgctttcaaaacagatgatttcctctcttccagaacttcaaagagcttttcaaaatgtgtaattgcttcttctttagccctctctccattacactctgtttctttcattaacaagtttagttcagatatttgactcttcacctggctttccttaccaataaggtaatcaatatcctttgaaagcttttcctttaaggttttgtaggcactgctcatagtggttacacggtggttggcatgattaccacccaacttacacagatggcaaactggcctcctacataattcacagtacatgtttattctctctgtttcatgttctgggcacattaaaatcttgggtctgaagttagtagttggaccaacatactcatgttgagcttttatagtaccccaagggtgatgaattttgaagcattcattgcagtaacttgcactacagtccatgcagctttttgtggattcttgaggtggtggtttacaaaggtcacacataatggctgtggctgccctagctgcttgacgatatctttccacaatagtttccaaagtgaagtttcgaaacagaccattgattcctcgttctccaagatccacatcatgctcacagccagggcaagggaaaacagttgtcctcggggtcaatgaattgcgcttccagcctggtctgttaattcggtcaattttatccatactaggggaggggagccgaagtcgaggactgctttgattggagttgtctgatcccacatcgttgaatgaatcatcgagagtcagcaggagttcttttacacatttatgacagatactatgttggcaagggagaatcaatgggtgggtaaacagctccttgcatgctgggcaaatgagctccctttcgatattcttaatggtaaccttgcctttagctatcaattccatgatgtagccaaattcactcatctccccagactccgacatgtttacaccccttcacaaactctggaggaccgacgcgggtgtatcgaatttgtcctttcttttctctttttctgtttttagtctgagttttgccgagctccccgcccataagctgttaaccaggaaaagaggggaagcgccggggaaagcaagaagcgggcttgggtgaaatgaaggccatcgagggctcccgggcagcctcgcccggcttgctaggatccgggtgcagcggtcggggctgcgcgatctaacggaacaaacgagggcggcggcggcggcagcagaggccgtgaaaccctcaccaggcggagccgggcgcgcggaggccccgcctcctcgggggtcgcggcagcggttcggaccgcagcgcggacgcgtgggtgactcc

SEQ ID NO: 21911 - DNA, 1684 bp, Homo sapiens
  misc_feature 1, 2, 3, 4, 5, 6, 7, 8, 9, 10, 11, 12, 13, 14, 15, 16, 17,1681, 1682, 1683, 1684: n = A,T,C or G
nnnnnnnnnnnnnnnnngacttaaacaaaaatatttactcttttcaaagaagtaaccatttgccaggggaaaacattctgcttttaggtagtttcaaaattcaggggagggagcctgaaatttttgccatgattggtttgttagaaagagcaggcatcagactacttctgataaaattgtttggaaggtcacgacctcgcaaaaacttttcaagagcaacaaggaagaattctgctgtgaagaacacagtgtacggatcctccgcatattatctcaacagaggacagtagctcaggaggcagcttcaaacggtgacctgtggcctgggccatctcttcgtcatgtgcttcacttttccctgtttccctgtgaactggcttccatggttctgtagggtagtgagtcggggttgtggctgcagcagagcaggagatgcttgcccgagtgggagcaacccacccccgtgtccccaatgcctcactcctggcttctagtgcagccctttgtagactcacctcgcaagaaggaagatctgcctggagacctgatcccagtccagctttttgaccataggtcatctttgtccccttgctcctttgcatcatgtcataaaatttgaggatatcagctgattattttttcttccaagaatgaaaatcaagcagaattgattcctacacgaaaaaaaagcacacgaatgccaaacctttcctttggtggactggacactaaccagatgagagtaaatttcttatccgtggacgtatgtaagctactgctgctgtgtgctctccacagccatatttattgtattaaacaatcagcactaaaccttcaaaaattgcccagtgttcctagttaaatgttcagaggggagaaatagatatattttaaataatgttttgctaatgaaaagagtaaatatttttgtttaaatcagcaaaaactttccattattttatatttccgtctactatacctaaaacaaaagattgccgttatacctgggttccgctgatgcagtcagccagcacctcctcacatgcacacatgattagacataggtgcactcggtaccaagagtccattttatggtccagcatatactccattgattcatcatcactgcatgtgttcagccagtgtatctcacactatccatacaaatctaaaattgatactggaaatgttattataggaggcagtgatcgcatttaaaatcaggccacctacaagtttaattttcaacatctcatgtttttatttgtcccattacagcctcaaatgttggtcataaaaaaaatttaggctaccaaagtttaaagaataaactgacaattctattaagaacttacatttaaaaactccagtagttggctgagtaagactcttgggaatacacgattccgccaaatttgtccttcacatatcgggggaaggcttgaaaatccgagaatttttaggaaaggtttatgcaaatatgttttgtattacaactccctttttttgttaacacaatgggaggcgcaaacattgtgggactcaacggaaatgtgctttctcacaaattctttaacatggacggacatatcacctcttgttgataagagggacataaatgtaatagaggccgtcaatgacactgttacgaatcatatctcgagaattatcaactactacnnnn

SEQ ID NO: 21912 - DNA, 2140 bp, Homo sapiens
gcgtccggacgcgcccgctataatcacgtgattgcctcatccgggtcttttgcgttctctttccctctcccaacatggcggcctcagcaaaaaagaagaataagaaggggaagactatctccctaacagactttctggctgaggatgggggtactggtggaggaagcacctatgtttccaaaccagtcagctgggctgatgaaacggatgacctggaaggagatgtttcgaccacttggcacagtaacgatgacgatgtgtatagggcgcctccaattgaccgttccatccttcccactgctccacgggctgctcgggaacccaatatcgaccggagccgtcttcccaaatcgccaccctacactgcttttctaggaaacctaccctatgatgttacagaagagtcaattaaggaattctttcgaggattaaatatcagtgcagtgcgtttaccacgtgaacccagcaatccagagaggttgaaaggttttggttatgctgaatttgaggacctggattccctgctcagtgccctgagtctcaatgaagagtctctaggtaacaggagaattcgagtggacgttgctgatcaagcacaggataaagacagggatgatcgttcttttggccgtgatagaaatcgggattctgacaaaacagatacagactggagggctcgtcctgctacagacagctttgatgactacccacctagaagaggtgatgatagctttggagacaagtatcgagatcgttatgattcagaccggtatcgggatgggtatcgggatgggtatcgggatggcccacgccgggatatggatcgatatggtggccgggatcgctatgatgaccgaggcagcagagactatgatagaggctatgattcccggataggcagtggcagaagagcatttggcagtgggtatcgcagggatgatgactacagaggaggcggggaccgctatgaagaccgatatgacagacgggatgatcggtcgtggagctccagagatgattactctcgggatgattataggcgtgatgatagaggtcccccccaaagacccaaactgaatctaaagcctcggagtactcctaaggaagatgattcctctgctagtacctcccagtccactcgagctgcttctatctttggaggggcaaagcctgttgacacagctgctagagaaagagaagtagaagaacggctacagaaggaacaagagaagttgcagcgtcagctggatgagccaaaactagaacgacggcctcgggagagacacccaagctggcgaagtgaagaaactcaggaacgggaacggtcgaggacaggaagtgagtcatcacaaactgggacctccaccacatctagcagaaatgcacgaaggagagagagtgagaagtctctagaaaatgaaacactcaataaggaggaagattgccactctccaacttctaaacctcccaaacctgatcagcccctaaaggtaatgccagcccctccaccaaaggagaatgcttgggtgaagcgaagttctaaccctcctgctcgatctcagagctcagacacagagcagcagtcccctacaagtggtgggggaaaagtagctccagctcaaccatctgaggaaggaccaggaaggaaagatgaaaataaagtagatgggatgaatgccccaaaaggccaaactgggaactctagccgtggtccaggagacggagggaacagagaccactggaaggagtcagataggaaagatggcaaaaaggatcaagactccagatctgcacctgagccaaagaaacctgaggaaaatccagcttctaagttcagttctgcaagcaagtatgcttgctctctctgttgatggtgaagatgaaaatgagggagaagattatgccgaatagacctctacatcctgtgcttttctcctagtttctctccaccctggaacattcgagagcaaatcaaaacctctatccagacaagacaaaataaaactcaacatctcctgaagacctttcttacctttttttaaaaacaaaaaatgaaattattttgcatgctgctgcagcctttaaagtattgaagtaactggagaattgccaatacagccagagagaaagggactacagc

SEQ ID NO: 21913 - DNA, 879 bp, Homo sapiens; identical to SEQ ID NO: 21368
  misc_feature 1, 2, 3, 4, 5, 6, 750, 846, 852, 872, 879: n = A,T,C or G

SEQ ID NO: 21914 - DNA, 387 bp, Homo sapiens; identical to SEQ ID NO: 21762

SEQ ID NO: 21915 - DNA, 619 bp, Homo sapiens; identical to SEQ ID NO: 20475
  misc_feature 619: n = A,T,C or G

SEQ ID NO: 21916 - DNA, 1380 bp, Homo sapiens; identical to SEQ ID NO: 20118
  misc_feature 1380: n = A,T,C or G

SEQ ID NO: 21917 - DNA, 392 bp, Homo sapiens; identical to SEQ ID NO: 21454

SEQ ID NO: 21918 - DNA, 499 bp, Homo sapiens
  misc_feature 479, 499: n = A,T,C or G
gcgtccgagacaggaggctcagcacttgtgccaggttagctctgcatggtggtcccactaaggcagtgggaagccaggatccagggaaccctagagcagggggatggcagagcaaaattcatggcctacagctgcctcttgccaaactgcactggattttgtgtctcccattccccagagctgtctgaggtgctttggaccatggtgatccacatcggcctgagcgtgaagagcttggcgggaggtttggtgctgttcttcttcttcactgcctttgccaccctgaccgtggccatcctcctgatcatggagggcctctcggcctttctccacgcactgcgcttacactgggttgagttccagaataaattctacagcgggaccggtttcaagttcttacccttctccttcgagcatattcgggaagggaagtttgaagagtgagtccctgtgagggccgtgtgccccatgctaccctncccgccttcctcacagtgan

SEQ ID NO: 21919 - DNA, 1060 bp, Homo sapiens; identical to SEQ ID NO: 20584
  misc_feature 1, 2: n = A,T,C or G

SEQ ID NO: 21920 - DNA, 460 bp, Homo sapiens; identical to SEQ ID NO: 21412
  misc_feature 460: n = A,T,C or G

SEQ ID NO: 21921 - DNA, 786 bp, Homo sapiens; identical to SEQ ID NO: 20840
  misc_feature 783, 784, 785, 786: n = A,T,C or G

SEQ ID NO: 21922 - DNA, 2187 bp, Homo sapiens; identical to SEQ ID NO: 21516

SEQ ID NO: 21923 - DNA, 756 bp, Homo sapiens
  misc_feature 1, 2, 3, 4, 5, 738, 739, 740, 741, 742, 743, 744, 745, 746,747, 748, 749, 750, 751, 752, 753, 754, 755, 756: n = A,T,C or G
nnnnncctcacgagtagaaagacagcagatagcagggccgacacaattcttttcttccgcttggatattcgcatgggcctactttacatcacactctgcatagtgttcctgatgacgtgcaaaccccccctatatatgggccctgagtatatcaagtacttcaatgataaaaccattgatgaggaactagaacgggacaagagggtcacttggattgtggagctctttgccagttaattggtcgtaataaccctgcgcttacagggttgttttgcagattacattaaataatttaggtataattcttggcacggtgattggcacataatgggtatttaactattagttgacttttctgggtacctaaaaaagaggaaggttagggaaggctgttgtcctttgcttactccttcctttcccagactttgtgtaaaatacctcttacttcccaggctctttactctcccttccgacccagatcctggcgtgtgcatctctttcgtgcaggacaatgtgatccgagaatttaacttgaatgagctataccagcgggccaagaaactatctaaggctggagactatatctcctgaggagcagacctgtggcttcagacccccaccacagtgttcagatgggggaaaacacagaaggatataataagatcctcactttggcagtgcttcctctcctgtcgattccaggctctttccataaccaccagcctgaggctgcagccnnnnnnnnnnnnnnnnnnn

SEQ ID NO: 21924 - DNA, 1211 bp, Homo sapiens; identical to SEQ ID NO: 20419
  misc_feature 1207, 1208, 1209, 1210, 1211: n = A,T,C or G

SEQ ID NO: 21925 - DNA, 374 bp, Homo sapiens
acttcactgatttttctactgcatctttaccacctgaactctacattattcctccacatgtctgtcccgtctgctccaagactgcagaggacagtcttgagcatcatcttactcacattttactcagaaatttcttattgagtcctgctaaatacatgctaggcattagggtttaaaaacaattaaaataaagcatgtcagggatggcttttctagaaaacatgcccaagcagagacttaaatattgagactagccagattaaaaggggtagagggcaggaaagggtgacggcatgccacgcagcagcaagagcgggagcgaggcctgaaagagtgaaagtatttgcctacaataggaggatgagtgagtaggg

SEQ ID NO: 21926 - DNA, 1380 bp, Homo sapiens; identical to SEQ ID NO: 20118
  misc_feature 1380: n = A,T,C or G

SEQ ID NO: 21927 - DNA, 463 bp, Homo sapiens; identical to SEQ ID NO: 21769
  misc_feature 455, 456, 457, 458, 459, 460, 461, 462, 463: n = A,T,C or G

SEQ ID NO: 21928 - DNA, 2187 bp, Homo sapiens; identical to SEQ ID NO: 21516

SEQ ID NO: 21929 - DNA, 467 bp, Homo sapiens
  misc_feature 445, 456, 460, 461, 462, 463, 464, 465, 466, 467: n = A,T,C or G
acgcgggggagggtggaagaaagtcagagctcagcccaggctgccttttccctgcagcgagcctcagccctctccccagcacgcccagctctctcatcatggattattcttcagctcattgtcttaagtcgtcctgtgacacctcccagtgaccgcacgctgttcttccttttcagtggtcagcaagtccatctgggcagcgcagagggaccaaaggtgtccatcgttggcctggacgattctggcttcctccaggttcaccaggagggcggcgaggttgtgactgtgcacccggacggcaactccttcgacatgctgagaaacctcatcctccccaaacggcggtaatgccgggcgtccccgagacgcggctgcctgtccgtgcccatgcatctggaaatctaatttagagttgtaggtgaattttcttttcctccaattcatntgttaagtctntggnnnnnnnn

SEQ ID NO: 21930 - DNA, 1627 bp, Homo sapiens
  misc_feature 1, 1620, 1621, 1622, 1623, 1624, 1625, 1626, 1627: n = A,T,C or G
naattttgtggggacacagatagtgagattatagtggttgttcatctcttccctgccatgccatgcacacacgtggcaccttgggtttgtctggggggagaatgatgttcccgttatcccgatggtgtccagcttttgtatttgtcatgtcagctgctgggcctgtcttagaagttgctaataacttccactttaatattactcttattgatgcattgggtttttttattgaccaataaataatttaggcattggcaatgttaagaccataacataaaccttttctaagtaatttttccatattgagcttattagcatcttttggtatctgctgggtttttagctttacaacaggcactcacatataaacatgtttatcctatttagatttgtagttcctgggagtcagagttctgtgagcagtcttaacttataaagcatgttcagacatgcttttcagatgattttgtttcattttaaaaggggaaatggcattaacctaataggaattctcctcctgaacctcagaggcagcagatggtacagctctctttgaactttactgcccaggtgaacgttctctgcatttagatcttcaggagttttacagactagtgtggagtggacatgtaaggacaagaggaagaggcaggtttcagctgagctcttctcctccttagagcaggacagtgttgggatgggctgattgtgagtatggagttctttctggaggagctccagcaggagctgggcaaatactgggagctttgactaaggggcatgcattgcagatgaggtttgaccagaggttttccaggatccctgaagaactctgcacttctaagcctgtaaggccacaacaggtgagatgaagggggagttgaacttccagctccttgtgtgtcccctagggttccccttttgggtccacacaaaggctcttgagcccaatctgaaggtctaaggctatggatatctcctccatttctaagttgggacaaggttgtccagcaaaaagaaaagcaaagactggtccaatcttagagacgtttgttttggaagcagagctgggctattagctttcctcaagaaggaaaaaggagtgctacaaaagttaaatactgatttttaaaaaaaatggcattcacacaatttctactaccacagatgagacttcttttgtttttctcaaaaacttaggctctccgagggattggtggaggctgtggtacagtgagggagcagagttctctgccacgtggaaaatcagcctcagacaggagcaggcctgggttccctatggtggtggaggcgaagctgagagatgtttgaggcagtgagagcgatttgatagactgtacccagcattgggagagatgactctctagatgttcctgggctggcattctagcttctgacatgccagttcaaaccataagattcacaacgcctgaagggaccatccagtggtaagatttatcctcctggatttcagaaaaagccacatccaagccattctcagggctttagggatctatcctatttttggaggttccccaaggatcctgggccccacgttagtgcttaacctgtaagttcggaatttattgaaacagccannnnnnnn

SEQ ID NO: 21931 - DNA, 886 bp, Homo sapiens; identical to SEQ ID NO: 21881
  misc_feature 1, 2, 3, 4, 5, 6, 886: n = A,T,C or G

SEQ ID NO: 21932 - DNA, 985 bp, Homo sapiens
  misc_feature 1, 2, 3, 4, 5, 6, 7, 8, 9, 10, 11, 12, 13, 14, 983, 984, 985: n = A,T,C or G
nnnnnnnnnnnnnnggcacctaaatctaagcaaattgcactatggctccatctccggattggtcaagtacaaggaccaacgatcaatagatgacaagcttttacaaatctccagcttcacttggtagaaccccaaaccagatacaattgcctcagacccctctgtaggcaatccaggattccctatcaggagggaagtgcagccagcaacaacttcctggtcagtagctaccactcctcccacacactcagtctcctttggacctgagatctcaagccttcaaagaagtgagatgttctccttctcccaaaatgccatctggcacacagcccctaagcctctgctctctacttccttctgccaggcaatgccatcaacgcttttcttactgaaaggccatgtgttacacagtactacaataatcctcaagatactgaaagtaatgccaagtgaaagaccaagggggtgggtggagggctaatgggctggacgaaatagccacttgattgctagttcatacaagatgtggcagcaactccttttctggctggagatcttggatgtcacatcttagaatcaggtggcaaagcatctgtgaagggcaatgtggcatcccagacagtgggtggtgagatcaggaagaaaaaatggaaatcaacagatggtggatcctacagctgagaactgattcttcaatttgacatggttggcataaacattttaaatggagcttggtaaagatcaggttattttaccattgaccaagctcttggcttctaaaaggtcctaaatttttgtttcctttgctttcacgagtgtttatttgctttccaggaacttcagggaaaaaggttaagtaatggagggaggaaagagggagggggttggcagatcaaacacaggacttaaaagtcctagatctaaacctttgaatccccagatattttatgttataaaaagatgtcccactttcagaatccagnnn

SEQ ID NO: 21933 - DNA, 1001 bp, Homo sapiens; identical to SEQ ID NO: 21314
  misc_feature 681, 682, 683, 684, 685, 686, 687, 688, 689, 690, 691, 692,693, 694, 695, 696, 697, 698, 699, 700, 701, 702, 703, 704,705, 706, 707, 708, 709, 710, 711, 712, 713, 714, 715, 716,717, 718: n = A,T,C or G

SEQ ID NO: 21934 - DNA, 743 bp, Homo sapiens; identical to SEQ ID NO: 21371

SEQ ID NO: 21935 - DNA, 1590 bp, Homo sapiens
  misc_feature 1589, 1590: n = A,T,C or G
accaaatacattgacagtggatgctttcacggctcagccaacacagttcagaggaatcttttcggcttccagggcattgcttgttaccttttgtcaggatcaacccaaatcctcagggatgctgtttttccacactgtaagtcctaactcattagtgggtcatgaaatcaacttaacagctcaagaccagtatattttaaacgtgaaatacattaaaaaatagaggaacaatagagcatataaaatggttaagtattggttcctgaaatactgtttcagctaaatattctatttactgtgtatactgggtcacaatataaagtgtttcctgttatgaaatgcaatttaaaaaaagaaagcttgaaagactgctgcaggaggcaccggccatccagtgattgttggaagagtctggattgtgtggagcctgaccttagataaggagcagcagatccacaactcaggaagtctagagatgcttagcacttcttcttttgagtgagaagatggaatcactcttggtttctaaaatatttttcttctctgctgtgtatcgggcaacctcacatgattcagtgggaccagaaaaagcatagaaaaattagatccacacacagcacccaaaaaaggccatagtcttttgtttacctagatgtattttaacctctttaccactaagcattttactataatagaactggggacatacattgtccttttgagtccgttgaatctgcaccatctaccttttggctgattcaccatacaggtggcaaaggcctttaaaaatggggagctaatacgtagggcacattctggtagggccaaaatattcagtgtctgggggggtgctatgcaaatatcaatgactttttactaaaaacagtggatttcctcatttctttaagatccaagtagaaaatgtaaataacttacattctgtatgcaggactcaatacagacttagtcaatctgattttttttggtgcttttcagtatagcgcaactctaaaaggaaacccattcaccctccttagtcctttgaagtatacttttgaaattataccttattgttaatggcaacctaatcaagctaggatttgtcggttaaaattttgattcttgtaatctgtactgtcaatttttggccactctggctgttacagcaaacttttctcccactgtcataattggtctaaagtagtatttgtttcaggactatccaaaaagcaaggccagcacattgagaagatgcagaatcctactctattacaaacctcactcatgtttcttttattgaaacctttttctactttatatttcctcttttgtaaatttttccatgtcatttaaaaaattttttactttagaattacagattagttctttttttaaagcattatggcattttcaaaaaaaaaaattattttggttacccaaaaagctatacaagaaatataacttcaattttttaggttgatatgggtatatttttaaagcttttattactttatacaaatacaaattaatttatattatagtttaacacctgctatgatgatagatatcacactgctatgatagaaaann

SEQ ID NO: 21936 - DNA, 2475 bp, Homo sapiens; identical to SEQ ID NO: 21595

SEQ ID NO: 21937 - DNA, 724 bp, Homo sapiens
actgggagaaattacatcctgggaagaagccacacattccagaaatggtggcttcactctttgagtccttaactgctgtaaacatgccattagcctacagcaaatgttattaatattacttgcaatggtgctattttatgtttgtctcaaagaagggattatctccatcctcaattcatactctcttaagaagatcgttacttttctcttaaggtgtcatggagaaactccagctgggcccagagattctgtagcgggaaaatccaaggcttatttatgccaggctgagtggatttggccagtcaggaagcttctgccggttagctggccacgatatcaactatttggctttgtcaggtgttctctcaaaaattggcagaagtggtgagaatccgtatgccccgctgaatctcctggctgactttgctggtggtggccttatgtgtgcactgggcattataatggctctttttgaccgcacacgcactgacaagggtcaggtcattgatgcaaatatggtggaaggaacagcatatttaagttcttttctgtggaaaactcagaaatcgagtctgtgggaagcacctcgaggacagaacatgttggatggtggagcacctttctatacgacttacaggacagcagatggggaattcatggctggtggagcaatagaaccccagttctacgagctgctgatcaaaggacttggactaaagtctga

SEQ ID NO: 21938 - DNA, 2538 bp, Homo sapiens; identical to SEQ ID NO: 20316
  misc_feature 2538: n = A,T,C or G

SEQ ID NO: 21939 - DNA, 1384 bp, Homo sapiens
cctggcatgaaggcagggaatgtgtactgtacccccggtgccagacgtgggaggcacccagagttgtggaatgaatgaatacattcacaggcccacaggaggagttcaagagctcaagttgagttgaacaaggacataacataagccccctgaactgctgctaattctcccagcagaaggagatgactgtcggaaactaggaggtgcttggtgataatggaataaaggttttctctctgcagggctgtctggaccacacaggggtcacacttcgatctgatcataacatagctccacctggacaagctgtttctcccaaccctctttccagcttgaatcacatcattccctttaagaatttccattcattttagtttcctgctaattgacatcttcacatacataatatattggtataaaaatactgcgtaccaagatttgatacaactagcaaatgttcattggtttacaacaaacccaaaatactcatcaaatatgggctgttggatttagaaaaataagattcttgagcgattccagctgcatttgtttatacagaacacatttactcaggaccctgcagtgtcagcttcgttctttgggtatgcagccttctatctggatctctgcaggccagccagaatatctgttgttcttagcatcagagtggttgatcttttctctctgaatttcggaagggagttccaagccttttgctgcaataaatacccagctagacctgaatttcatgttcctgatttctttacttccaagtgcttctatggcattcttggcatcgttattcagtcttgtgcttccgtcgtcataggtcaccatgaagagcagggattttggagcagcactctgaataaactttgtcatcggtccagagttatcgccttcatacatatcaaaacatcgtgttgctgtcacattcccagttacatagttgacaatggcaatgtttattcctctggcaacatttcccagctgttctcccataagtaggttatcctcaaagcagattttggcgtacttgcttctgccacctccgctgagtaacctgtaggcataggtgtcagatgggcagggagtccagtggtcacatttttgccttttggggactggagctttgaggacaggcctctccccgatgctgcggatgctataggcagcactggacaggggtgcatctggaatgagctctgcgagcaggtaccccgaataccaggcacacaaggaggcgaagaccacgaacaccaccttgagcaggcctgcagagaggacaccaagcagctgctgtgaacgacttggtggcggccctggcccttggccctccccatcccccctgtggcttttcatcccggcccagcggacgcgtggg

SEQ ID NO: 21940 - DNA, 2670 bp, Homo sapiens
  misc_feature 1, 2, 3, 4, 5, 6, 7, 8, 9, 10, 11, 12, 13, 14, 15, 2670: n = A,T,C or G
nnnnnnnnnnnnnnnagtagagacgggtttgctaggctggtatcaaactcctgacctcgtgatccacccgcctcggcctcccaaagtgctggcattacaggagtgagccactgcgcccggccaagagcttgatttttgtgtgcagtatatggaaataattttactaacatggttgtcataccctaagtaatgccaaaagttaaatttgtcatgctaaaacaattttatttcttaaataaccaattataaaaaacaaatgttctattctttgtaactgagaagattgacttcattttctccttcagggaactccagctttgttcttaattcaattaattttcaacaatttcttggaatgtggtgtatcagatgaaaggttctttctcagtttggaatcacttgtaggctgtgttctttctggtccaacttcaccactagctttcagtgactcagttttaaatgttattaatcaaaatgcaaagcagttggaaaataaggagcatctctggaaaatgtggagtgttatagtcaccccattaactgaattgattaatcagaccaatgaagtaaatcaaggtgatgccttagaacataattttagtgccatctatggtgcattgactttaccagtaaaccacattttttcagaacagagatttccagtggccaccatgaagactttgcttagaacttggtcagaattatatagagcatttgctcgttgtgctgctttggtggcaacagcagaagagaacttgtgctgtgaggaactttcttccaagataatgtccagtttggaagatgaaggcttttctaatttgttgttcgtggatagaattatttatattattactgtaatggttgattgcattgacttctcaccatataatattaaatatcagcccaaagttaaatcaccacagagaccttcagattggtccaaaaagaagaatgagcccctagggaaattgacttctttatttaaacttattgtgaaagtgatctattctttccacacactgagcttcaaggaagcacattctgataccctcttcactattggcaactcaatcaccagcattatttccagtgtacttgggcatatttctttgccttctatgatccgaaaaatatttgcaactttaacaagacctctggcattattttatgaaaactcaaagcttgatgaagttcctaaagtatatagttgtctgaacaacaagttagaaaagctactgggagaaattattgcttgtctgcaattcagctacaccggaacttatgatagtgaacttcttgaacaactctccccactattatgcataatatttctgcacaagaataaacagattcgaaaacagagtgctcagttctggaatgccacttttgccaaagtgatgatgttggtttatcctgaagagttaaaaccagtactaacacaagccaaacaaaaatttctgctcctgttgcctggtttggaaactgttgaaatgatggaggaatccagtggaccatattctgatggaacagaaaattcacaactaaatgtgaagataagtggcatggagagaaaatcaaatggaaaaagagattcatttttggcacaaacaaagaataaaaaagaaaatatgaaaccagcagccaaactgaaacttgaatcttcgtctttaaaagtaaagggtgaaattcttttggaagaggaaaagtctactgactttgtgtttatacctccagaaggaaaagatgcaaaggaaagaatattaactgatcatcaaaaagaagttctcaaaacaaagcggtgtgatattcctgccatgtataataatctggatgtttcccaagataccttatttactcagtatagtcaggaagagcctatggaaattcctactttaaccagaaaaccaaaggaggattctaagatgatgattacggaggagcaaatggacagtgacattgtcattcctcaagatgtcacggaagactgtggtatggctgaacatcttgaaaagtcctccctttcgaataatgagtgtggttctcttgacaaaaccagtccagaaatgtcaaacagtaataatgatgaaagaaaaaaagctttaatttcatcaaggaaaacatcaactgaatgtgcatctagtacagaaaattctttcgttgtcagcagtagttcagtttctaataccactgttgctggaactcccccataccctacaagtcggaggcaaacctttattaccttggagaagtttgatggttcagaaaatagaccttttagtccatcccccttgaataatatttcatcaactgttacagtgaaaaataaccaggaaaccatgattaaaacagattttctaccaaaagcaaagcaaagagaagggactttttcaaaatctgattctgaaaaaatagtgaatggaactaagagatcaagccggagagctggtaaagctgaacaaacagggaataaaaggtctaagcccttaatgagatctgagccggagaaaaatactgaggaatctgttgaaggcattgtagtcttagaaaataacccacctggtttgcttaatcaaacagaatgtgtgtcagataatcaggttcatctttctgaatctacaatggagcatgacaatacaaagcttaaagcagcaacaatggaaaatgctgtan

SEQ ID NO: 21941 - DNA, 405 bp, Homo sapiens
  misc_feature 395, 396, 397, 398, 399, 400, 401, 402, 403, 404, 405: n = A,T,C or G
acgcggggtccgcttccttccagtaaggagtcggggtcttccccagttttctcagccaggcggcggcggcgactggcaatgtttggcctcaaaagaaacgcggtaatcggactcaaccccgccaagggtgggttggaaaccgaaacgagtcagtgttgaaacgtgtctcatcctattcctgaagccagaatattctggccatgagtcattgtttccgcccatcttgattcttttggaaatggcagctcttgttcaaagaccggaaagggtgggatgtcaatttcaagtggggtcaacctgagttctgtaaatcccagtagcgattttcccgccgcgggtgggcaggcgaatcttgcgctggtttagacaaaggaagccgagaggacctgcctgcnnnnnnnnnnn

SEQ ID NO: 21942 - DNA, 550 bp, Homo sapiens; identical to SEQ ID NO: 21510
  misc_feature 539, 540, 541, 542, 543, 544, 545, 546, 547, 548, 549, 550: n = A,T,C or G

SEQ ID NO: 21943 - DNA, 886 bp, Homo sapiens
  misc_feature 1, 2: n = A,T,C or G
nnaagaagcttggagaattaaattgatcttcttaatgttacataatgctgccttgcaacaagtagtatgtttattcttcaaagaatgttagaaatctttgctaactaactagcaaatcacgagcgaaaccagcaaggtgtaaagaaggtcgcaaaaagaaatgcatatggttataacagtatcaatctaaaaacctaaccacattctagagagttgagagaagaagttgttcatttggtggtgcactggggctggagtttttattgttggtttggtttttggtatcaagagagtttatctggctttgatattagactgtgtctccctgaatagtgtctcttcctgcaaagagctcacaatggcagcttttcacacactggatgctagggtttttcatttcatatagcagaacgggaaacaaataaaacattatatagtgccctttttactgaggcaccaaaacatgcttcagaaaacttgtcagagggagatgggaagagagaggagcaaaagagatgatggaaaagcacggtccccagttttcataaatgaaccgaatactagaattggaaagaaaatacgcaaatagggagctaaatatgtctaggataatgccaagttacaaaatttaggcttaaaaaaaatcaacattctctgatccctcgatctgtattttgaagggcacctattcagctggtttctaataatcctagcattaagacaaataaacggggagacatgggtgggtgcaggcagtctcatgctaatgcacagcaccaccgatttattcacccttacagcagttttaaaatcaattcaatatttcctggataggttgacatcacccctttcatatcggagtgaaggactgaactgcttgctctgt

SEQ ID NO: 21944 - DNA, 553 bp, Homo sapiens
  misc_feature 548, 549, 550, 551, 552, 553: n = A,T,C or G
agggagtcaccacgcgtccggaaaaaatttgtgattggctggttgataaataccagtgtgttctggcacatgtaactgcccaggcatgctcgttctggtgtgtgtgtgcacgtgtgttcatgtgcattcgcgtgcatccttctctgtctctgtgtgtgtgcctgtgttcttcccttctcccctgccccaccctgacttctcagaaagctgcatcgctgacagtctgcaggctggctggccggcccatctgctttttattttatttttttaactatgagaacacacaggcccggagagccactgctactaaagcaactccattgggctgcattaagatgaacagagtgctttttaatgatgaaagcagggagctcctttccatttgcaacttagcctgaatgtggggtttctctggctgttcttttgacctagcagtagagtggagcactgccaagtccaaaaaactagagcaggaggttcctcttggagcaacggggggtttatttctgtttttttttttttttaggggaaagccgccaatggggaannnnnn

SEQ ID NO: 21945 - DNA, 421 bp, Homo sapiens
accgagttgtagaggtagaagggattcagagatcctgttttccgtcagggtggttgggtgaggctcccagacacagggctgaagtctgaaccttcatcctttcactcccagcccaatgatgtgccactgtgtcatagccacatggtggttatgaatgcatctggaactctacattttaatctgccaggcatccacccattcgttcacataattcacgtgtgtgtaatagtaaccttcagaaaggaatgtcacaatatttttctcattacaacatctttaggctttaagatgaaaagggtgaagaaagaaatcttctctaaatcttgtattcccgctattcatttttttattcaaggaaaaacaaagcctctgttaaagctctgcttacaatgaaatgtaactgaagttctatccaattctt

SEQ ID NO: 21946 - DNA, 2538 bp, Homo sapiens; identical to SEQ ID NO: 20316
  misc_feature 2538: n = A,T,C or G

SEQ ID NO: 21947 - DNA, 985 bp, Homo sapiens; identical to SEQ ID NO: 21932
  misc_feature 1, 2, 3, 4, 5, 6, 7, 8, 9, 10, 11, 12, 13, 14, 983, 984, 985: n = A,T,C or G

SEQ ID NO: 21948 - DNA, 446 bp, Homo sapiens; identical to SEQ ID NO: 20632
  misc_feature 441, 442, 443, 444, 445, 446: n = A,T,C or G

SEQ ID NO: 21949 - DNA, 689 bp, Homo sapiens; identical to SEQ ID NO: 21367
  misc_feature 1, 2: n = A,T,C or G

SEQ ID NO: 21950 - DNA, 1023 bp, Homo sapiens
  misc_feature 1, 660, 764, 829, 976, 1009, 1010, 1011, 1012, 1013, 1014,1015, 1016, 1017, 1018, 1019, 1020, 1021, 1022, 1023: n = A,T,C or G
ncacgagcacagtggcctgagttagaattctgactctgcctctttggaaggctctggaaggttaaaggagcttgtgtgttcaaatcttagcctggtacctggcatatactcagcatgtattttttcccctttcctgacaatgttccttgccccgaacacttgaatagtggagagaggaatgtttgcttttcctctccattgaaccaacactcgtccatccactgagcccaagattcaccttaggattgtctgttggactcggctcttttgtgacctaacagtgcaggggccttgtgctgagctgcacatgctcgctctcgctggtgctccctctctctctctctctctgtctgcattatttatagtaaaccatattagaacagagtgttaaagaggaaggatgagtcattcccattgaaaccattgatgacataaataaaagcaaaatgctttactatgtgttttgtgcagtatttaaggccagggtgtgctaaattgatgctcccaaactgatctgtgaaagatacatatgtgggaaaaaatcaagttaactagaggaacgctattattgaaatccattcagatctgcttctcctctattactcagatcatatcatatatgcttgtgtctgctacgagagactgctatcatactaggtngtatctcgaggtcagatagccaaagtgctaggtctgtcatctcatgcacgtagaagcttcactgttagctgcttatggcagatcacaactgagctgacatatgntgcatgagaatgagccagttgttcatgcagagtagaacgacatcagctattctcactctagcacngtgttcagtgaatatcttaataatttgggtcgtagtgtctgcatatttgttgaaaaactgaacgctggtccatacaattagctaattttcagaattatcaatggttaactgccgtaaaaaccttaactcgtgtttatatactactcntacttactctactcaatttaatcattcatcccnnnnnnnnnnnnnnn

SEQ ID NO: 21951 - DNA, 425 bp, Homo sapiens; identical to SEQ ID NO: 21503

SEQ ID NO: 21952 - DNA, 2538 bp, Homo sapiens; identical to SEQ ID NO: 20316
  misc_feature 2538: n = A,T,C or G

SEQ ID NO: 21953 - DNA, 1108 bp, Homo sapiens; identical to SEQ ID NO: 20121
  misc_feature 1, 2, 1103, 1104, 1105, 1106, 1107, 1108: n = A,T,C or G

SEQ ID NO: 21954 - DNA, 2538 bp, Homo sapiens; identical to SEQ ID NO: 20316
  misc_feature 2538: n = A,T,C or G

SEQ ID NO: 21955 - DNA, 992 bp, Homo sapiens
  misc_feature 992: n = A,T,C or G
caaggacccaagaccttcttgcttggaaagtgaattcctcagaattccgagatgatgccagtcttggaggaagatgacatgaggacccaaaaccttcttgcttggaaagtgaattcctgagaattccgagatgatgccagtcttggagaaagatgacatgaggacccaaaaccttcttgcttggaaagtgaattcctcagaactccacaaagactccagtcttggaggaagatgacatgaggacccaaaaccttcttgcttggaaagtgaattcctcagaactccacgaagactccagtcttggaggaagacgaggtgttgagagatagctgggatccctgaggaaggcagccccagtctccggtggagaattaagaggggcccaagcagatggttggtggtggaaacgtcacctcagtatagtactatggagtttcctttcacccccaacagccgacggtttccaggggcgaagagtgaaaattgaagcaaggtgtctactgtccagctgtagacaaggaggcagtgcgcctgccacccccaaggaagagtcagttcagaagcacagcagctgctggaaacccaggaggtttccagttcgttcctgctgggacctggcaagaactgcactgtcaaggctgcaagaggctcctgacggcttctgacatgtacagaatggaataagagaacctagcagaaatggaagcagaggcaagaggtctggaggccaggaaaatgtcaatggaaagcagctagcatgaagaccccacagtgttcctccctctagtagtctgggtattatttgggagctgagatgctcccaatatggttggggacatttgtcccctccaaatctcatgtgagaatttgatcccccattttggggatggggtctaatgggaggagttttgggtcatgacgggggacccctcaagaatggctttgtgccctgctcaccaggaatgaatgagctctcactctactagttcacn

SEQ ID NO: 21956 - DNA, 689 bp, Homo sapiens; identical to SEQ ID NO: 21367
  misc_feature 1, 2: n = A,T,C or G

SEQ ID NO: 21957 - DNA, 3008 bp, Homo sapiens
acgcggggactcaagctcgggttcttctcctaggcggaagccagaccagagagcgtgcgtgtttttcccagggtgccccgcgctgctgttatggccgcctccttgaggtagtatccgcacatggaattctagggccgcaggtgtatttacggtaactgtcgccactagatttcagcgcctttggactctcctgttttcactttcttttgttgactcccgtgtggccctcgtgggagcctgttttggctgcagcggtgtctggggtgatgtggaccccggagctggcaattctgaggggattccccactgaggctgagcggcagcaatggaaacaggagggggtcgtcggttcagagagtggatctttcctacaattgctgctggaagggaactatgaagccatattcttaaattcaatgactcaaaatatttttaattcaacaacaaccgctgaagaaaagattgatagctacctggagaagcaggtagtaacattcctggattactcaacagatttggacacaacggaaagacaacagttgatatttctacttggtgtgagcagtttgcaactttttgttcagagcaactggacggggccccctgttgacttacaccctcaggactttttgtcatctgttttgttccagcaattcagtgaggttaaaggactggatgcatttgttctgagcctgctcactctagatggtgaatcaatctacagcctgacctcgaagcctatactactgttattagcacgcattatcctagtgaatgtaagacataaactgacagctattcagagcttgccatggtggactttgagatgtgtgaatattcatcagcatttgcttgaggaacgctcacctctgctttttactcttgccgaaaactgtattgatcaagtgatgaaactacagaatctgtttgtagatgattcaggtcgatatttggctattcaattccatctggaatgtgcatatgtgtttttatattattatgagtacagaaaagcaaaagatcagttggatattgctaaggacatcagccaattacaaattgatttgacaggtgctttgggaaaaagaacacggttccaggaaaattatgtggcacaactgattctagatgtaagaagggaaggggatgtcctttcaaattgtgaattcactccagcacccactcctcaggaacatttaaccaagaatcttgagctcaatgatgacaccattctgaatgacataaagttagcagattgtgaacagttccagatgccggatctgtgtgctgaagagatcgctattattcttggaatctgcactaattttcaaaagaataacccagtgcacacattaactgaagtggagcttctggcatttacatcatgtttgctttcacaaccaaagttctgggccattcagacatcagccttgatcctccggacaaaacttgagaaaggaagtactcgccgagtggaacgggcaatgaggcagacacaggctcttgcagaccaatttgaagataaaactacatctgtattggaacgcctgaagattttctattgctgtcaagtaccacctcactgggccattcagcgccaacttgcaagtttgctctttgagttgggatgtaccagttcagcccttcagatatttgaaaagctagaaatgtgggaagatgttgtcatttgttatgaaagagccgggcagcacggaaaggcagaagaaatccttagacaagagctggagaaaaaagaaacgcctagtttatactgcttgcttggagatgtcctcggagaccattcttgctatgacaaggcctgggagttgtcccggtaccacagtgctcgtgctcagcgctccaaagccctccttcatcttcggaacaaggagtttcaagagtgtgtagagtgcttcgaacgctcggttaagattaatcccatgcagctcggggtgtggttttctctcggttgtgcctatttggccttggaagactatcaaggttcagcaaaggcatttcagcgctgtgtgactctagaacccgataatgctgaagcttggaacaatttgtcaacttcctatatccgattaaaacaaaaagtaaaagcttttagaactttacaagaagctctcaagtgtaactatgaacactggcagatttgggaaaactacatcctcaccagcactgacgttggggaattttcagaagccattaaagcttatcaccggctcttggacttacgtgacaaatacaaagatgttcaggtccttaaaattctagtcagggcagtgattgatgggatgactgatcgaagtggagatgttgcaactggcctcaaaggaaagctgcaggagttatttggcagagtgacttcaagagtgacaaatgatggagaaatctggaggctgtatgcccacgtatatggaaatgggcagagtgaaaagcctgatgaaaatgaaaaggcattccagtgcctctcaaaggcatacaagtgtgacacccagtccaattgttgggagaaagatattacatcatttaaggaagttgttcaaagagccttaggacttgcacatgtggccataaaatgcagtaaaaacaaatccagttcccaagaagctgtacaaatgctttcttctgttcgactcaatttacggggcttgttatctaaagcaaagcaactttttacagatgtggcaactggagaaatgtccagggaattagctgatgacataacagctatggacaccttagtgacagagctccaagacctaagcaaccagtttcgaaatcagtattgattctgctggaagcagattctggaaaaggtgctttcacctgctggtaaaagatacatctgtatatctgaaatgcaagatattgatttttaaaataaatttgttttatgaccttcaaaaaaaaaaaaagggggcgcaaaaaaaaaaaaaaaaaaaaaaaaaaaaaaaaaaaaaaaaaaaaaaaaaaaaaaaaaaaaaaaaaaaaaaaaaaaa

SEQ ID NO: 21958 - DNA, 2905 bp, Homo sapiens
  misc_feature 2904, 2905: n = A,T,C or G
ggagtcgacccacgcgtccgtgcagattggtctgatgtatgtactaagcaaaatgttactgaatttcctatcataaagatgtacaagaaaggcgagaacccagtatcttatgctggaatgttaggaaccgaagatctcctaaaatttatccagctcaacaggatttcatatccagtgaatataacatcgatccaagaagcagaagaatatttaagtggggaattatataaagacctcatcttgtattctagtgtgtcagtattgggactatttagtccaaccatgaaaacagcaaaagaagattttagtgaagcaggaaactacctaaaaggatatgttatcactggaatttattctgaagaagatgttttgctactgtcaaccaaatatgctgcaagtcttccagccctgctgcttgccagacacacagaaggcaaaatagagagcatcccactagctagcacacatgcacaagacatagttcaaataataacagatgcactactggaaatgtttccggaaatcactgtggaaaatcttcccagttatttcagacttcagaaaccattattgattttgttcagtgatggcactgtaaatcctcagtataaaaaagcaatattgacactggtaaagcagaaatacttggattcatttactccatgctggttaaatctaaagaatactccagtggggagaggaatcttgagggcatattttgatcctctgcctccccttcctcttcttgttttggtgaatctgcattcaggtggccaagtatttgcatttccttcagaccaggctataattgaagaaaaccttgtattgtggctgaagaaattagaagcaggactagaaaatcatatcacaattttacctgctcaagaatggaaacctcctcttccagcttatgattttctaagtatgatagatgccgcaacatctcaacgtggcactaggaaagttcccaagtgtatgaaagaaacagatgtgcaggagaatgataaggaacaacatgaagataaatcggcagtcagaaaagaaccgattgaaactctgagaataaagcattggaatagaagtaattggtttaaagaagcagaaaaatcatttagacgtgataaagagttaggatgctcaaaagtgaactaattttatagggctgtggtttccaaaatttttttggcatgatagacttaatttatttccttaaagaataatattaaatcatttcaagtttgcagactagtgccatccaatagaattataatataagtcacatattttatttaaaattttctagtaactacattaaacaaagtaaaagtgagcagggcaaaataattttgatattacttttcacccagtagtatacccaaaatagcgaaatatagaaattattaatgagatattttacatccttttttgtaccaagtcttctaaatgcagtacatattttatacttactgcatttcttacttccgagtagccatatttcaagtgttccttgccacatgtggcctgtgactactgtattggacagttcagtactagacaaaaactagcataattaacttagttctagccatgatttctatttggattaaaattaaactctaatcacagttaactccacagtgcattcatgcagctgacagttatatttgttttattggagtcatgatattaaaatcagcgtttgtcaacctcaggggatatttagcaattgtcgggagacatttttgatgtcatgactagggcagttattgacatttagtgagtagaggccagggatcctgctaaataacctgcattggacagcgccccacaacaaagaattatcctgcccgaaatggtagtcgtgccaaggctgagtaaccttgtgttaaaagtaacctgtggcagactaggtttccagaatttcctggttctgctcacgtatcatgtttgaaaaaattttggctattaaagatatgtattagatggtcttatcctgattattacctggatacaacttgatcttttctaatattttcagaaagtgatgggataaccctagaagaggactcagaatgatatttatattttaagtgagtcttaaaacctcctcttatttctacaagttatatggctaaatttcagattgaacagggattcagcattctgccatctcctcatggaaagagaggctccctcatctgaagcgtctctgaaatctacccttgcaagcttcagacaaatcagttgatctccctgagccacacggcctcattctgtgagggagggaaagattagccaaagagttaattttcattccaaatcacttagctgttagactgatctgtttgtagcagttgtttgtctcatttttgctctgtgcattttttgagacatttgttgagaatattctatttggtgctctactgtatttttctttttaatatctacttgatatcttgttctttaaattttcttcacatatggtttgctgatacaactgatttttataactgaaatttaaggaatctaacagtaaaaactcagtaagtgcatatatttccttataaatagaaccgttggtatctcagacctcttctcaatttttttcctgtaatgtgatgcttgattaaacattctcattgggctttattcctatctgttgggaccctggagggacccttaatttggggtgggtataaaacatcttttcgctatgtttaaagtgtttttgtcccggttaaaacggattgggttttgccttggccattggaggtatgtgggccatttaaggtgctggcaaaaaagaggggggtagtacctgggagaagtaccactttaagcatagaaaaaaacaggcctgaagaatatgagattgggccacacaaaattatattataaacatann

SEQ ID NO: 21959 - DNA, 689 bp, Homo sapiens; identical to SEQ ID NO: 21367
  misc_feature 1, 2: n = A,T,C or G

SEQ ID NO: 21960 - DNA, 471 bp, Homo sapiens; identical to SEQ ID NO: 20637
  misc_feature 469, 470, 471: n = A,T,C or G

SEQ ID NO: 21961 - DNA, 2538 bp, Homo sapiens; identical to SEQ ID NO: 20316
  misc_feature 2538: n = A,T,C or G

SEQ ID NO: 21962 - DNA, 1001 bp, Homo sapiens; identical to SEQ ID NO: 21314
  misc_feature 681, 682, 683, 684, 685, 686, 687, 688, 689, 690, 691, 692,693, 694, 695, 696, 697, 698, 699, 700, 701, 702, 703, 704,705, 706, 707, 708, 709, 710, 711, 712, 713, 714, 715, 716,717, 718: n = A,T,C or G

SEQ ID NO: 21963 - DNA, 596 bp, Homo sapiens; identical to SEQ ID NO: 21754

SEQ ID NO: 21964 - DNA, 530 bp, Homo sapiens
accatgatcataatattgctcattccttaacaagtattatgattctgatgttagcacaatgtctgtaatatttcactgtgggtgtcctttcctttctctaataccttggcagctctgtagaaaaaaacctcatgctccctttacgttcgcttctgctttgattttcctactctaggtttatattcgaagcacagacgttgaccggactttgatgagtgctatgacaaacctggcagccctgtttcccccagaaggtgtcagcatctggaatcctatcctactctggcagcccatcccggtgcacacagttcctctttctgaagatcaggtcagtatactgggaaaaccaggagatttcagatggacctagaatgaggaaggcaggctactcaacagttgtggatttgggagtctggacactccttgagttgtgcagttttaattctttcttaaataaagatacaaaggacaatttaggacatggaaaaccctagctaagagagagtaggaaccaaatttctctttggatc

SEQ ID NO: 21965 - DNA, 549 bp, Homo sapiens; identical to SEQ ID NO: 21395
  misc_feature 1, 549: n = A,T,C or G

SEQ ID NO: 21966 - DNA, 2397 bp, Homo sapiens
cgcgtccggacgtcggcccgccggcgccccaccagctccgcgcgggcccgggttggccaccgccgggcccccgcccctcccccggccgtgtcccggccggaaccgatcgtggctggtttgagctggtgcgtctccatggcgacccgccggtgctataagtagggagcggcgtgccgtggggctttgtcagtccctcctgtagccgccgccgccgccgcccgccgcccctctgccagcagctccggcgccacctcgggccggcgtctccggcgggcgggagccaggcgctgacgggcgcggcgggggcggccgagcgctcctgcggctgcgactcaggctccggcgtctgcgcttccccatggggctggcctgcggcgcctgggcgctctgagttctgagattgtcactgctgttccaagggcacacgcagagggatttggaattcctggagagttgcctttgtgagaagctggaaatatttctttcaattccatctcttagttttccataggaacatcaagaaatcatgaacaactttggtaatgaagagtttgactgccacttcctcgatgaaggttttactgccaaggacattctggaccagaaaattaatgaagtttcttcttctgatgataaggatgccttctatgtggcagacctgggagacattctaaagaaacatctgaggtggttaaaagctctccctcgtgtcacccccttttatgcagtcaaatgtaatgatagcaaagccatcgtgaagacccttgctgctaccgggacaggatttgactgtgctagcaagactgaaatacagttggtgcagagtctgggggtgcctccagagaggattatctatgcaaatccttgtaaacaagtatctcaaattaagtatgctgctaataatggagtccagatgatgacttttgatagtgaagttgagttgatgaaagttgccagagcacatcccaaagcaaagttggttttgcggattgccactgatgattccaaagcagtctgtcgtctcagtgtgaaattcggtgccacgctcagaaccagcaggctccttttggaacgggcgaaagagctaaatatcgatgttgttggtgtcagcttccatgtaggaagcggctgtaccgatcctgagaccttcgtgcaggcaatctctgatgcccgctgtgtttttgacatgggggctgaggttggtttcagcatgtatctgcttgatattggcggtggctttcctggatctgaggatgtgaaacttaaatttgaagagatcaccggcgtaatcaacccagcgttggacaaatactttccgtcagactctggagtgagaatcatagctgagcccggcagatactatgttgcatcagctttcacgcttgcagttaatatcattgccaagaaaattgtattaaaggaacagacgggctctgatgacgaagatgagtcgagtgagcagacctttatgtattatgtgaatgatggcgtctatggatcatttaattgcatactctatgaccacgcacatgtaaagccccttctgcaaaagagacctaaaccagatgagaagtattattcatccagcatatggggaccaacatgtgatggcctcgatcggattgttgagcgctgtgacctgcctgaaatgcatgtgggtgattggatgctctttgaaaacatgggcgcttacactgttgctgctgcctctacgttcaatggcttccagaggccgacgatctactatgtgatgtcagggcctgcgtggcaactcatgcagcaattccagaaccccgacttcccacccgaagtagaggaacaggatgccagcaccctgcctgtgtcttgtgcctgggagagtgggatgaaacgccacagagcagcctgtgcttcggctagtattaatgtgtagatagcactctggtagctgttaactgcaagtttagcttgaattaagggatttggggggaccatgtaacttaattactgctagttttgaaatgtctttgtaagagtagggtcgccatgatgcagccatatggaagactaggatatgggtcacacttatctgtgttcctatggaaactatttgaatatttgttttatatggatttttattcactcttcagacacgctactcaagagtgcccctcagctgctgaacaagcatttgtagcttgtacaatggcagaatgggccaaaagcttagtgttgtgacctgtttttaaaataaagtatcttgaaataattaggaaaaaaaaaaaaaaaaaactcgagggggggcccggtacccaattcgccctatagtgagtcgtattacaattcactggccgtcgttttacaacggtctgactgggaaaaacccctgacgttaacccaacttaaatcgccttgcaa

SEQ ID NO: 21967 - DNA, 1380 bp, Homo sapiens; identical to SEQ ID NO: 20118
  misc_feature 1380: n = A,T,C or G

SEQ ID NO: 21968 - DNA, 2187 bp, Homo sapiens; identical to SEQ ID NO: 21516

SEQ ID NO: 21969 - DNA, 4105 bp, Homo sapiens
cgttgtcagtgcgggctgcgttgggatcggtgcgggttccgaggacggaggtgggtggtcagtagtgcttggccgcgtcgcctctgctcggtgtcggtgtgtaggacggcttgcgtcgtgacgcgctggtcgcgtgtgtcgcgaaccctctcgaggtccggctcgccggttcgtgcgcgtcgtccgttcggtcactctgacttcgcgcgacgccggctcccgggcgcgcacgcgctgcccgagcctctgtcgccgtcatgctgcgcctcgcgcacggcgctctccacggttgtggtccgcacgctgcagtagtcgacttctctgcctgacgctgcttgcttctgcgatcgcgctccgtcccgctcttccagcatggcggctcaccgcctgcgcgccgctgtgcccgccatcactctcgctcgcggtctctgcgtccccttgcggtccaccgccgacgtccctcccgcgctcacagttcacctgctgggtgtcctgcccgcgtgcccctctcgtttgccctagcgcggcgcctatagccctctgtctctccgtgctggcttctggccgaccgcacacgctgctgtccgtcgtccccggccgtggcgttccgtccgtctcctccattctggctcgcacctctgccgccagctctccaacacgcgagctgtgctccccctcacacgctcgacctcgacgcactacccgcgaccccgctctccactcctcgcccgagcgccgctcaccccgtcgccgaagcgcgtcgtgctgtgattgacagcggggcgctgctgccgtgtgatggggaggtgtggctgagtcggctagtcggcgagtgggtagttacggtctctcaacgtcaataataataaaacgttgacggagcttctccgcctgctgcctgcctcgctcttggcggcgccacagaggtcgctacgcgttcgcggtgacagcgccgacgatccgcggaatctgtggggaaggcccgcgagcccttgggttggttttccgccaaatagccacaggcttttcaaaccattgacgtgtggccggtcctcataacctgactcaggtaaactgccaagagatgcttgcacaggatgctgtcactcttccgtagcactgagaatgcaaatgcaggacatgaacagtaatgacaagaagccaaacatgtgtatgttttactggaacttccaaggacctggtaaacacgccttccactgggtgatgagattaaggtgatggactgtcgatcaactaggtccaaggcctgggtggctgatgagccaaagagaaacttcagcgataacagatattcatcaggaactcggtcccgtacttcgcgcgctctcctgcaccgccgccgccatctcgctcaggagctcctccacaaccgccggcaacactacggccatcgcgccgcaggacacgccctccacgaccggcggaccgccgcgacgctccagctgactgcgcctacctgtggaggatcctgaccccccgccggggcagggcgagacggagtgacgtcggggcgcgtcatcgcgcgtgcggacgcagggatgtcctgctcagtcgtcagggcccggccaatccggagggctgctcggcgcgtggtcgggggccaggagcgcgtctggcctgcagtgcgcagaggacgcggcgggagcatgttccggctcctgagctggagcctgggccgaggcttcctgcgggccgcggggcggcggtgccggggctgctccgcgcgcctgctcccggggctggcaggaggtccggggcccgaggtgcaggtgccgccatcccgagtcgcgccgcacggccggggcccaggcctgctgccgctgctggcagcgctcgcctggttctcgaggcccgctgcggcagaggaggaggagcagcagggagccgacggggccgctgccgaggacggggcggacgaggccgaggcagagatcatccagctgctgaagcgagccaagttgagcattatgaaagatgagccagaagaggctgagttaattttgcatgacgctcttcgtctcgcctatcagactgataacaagaaggccatcacttacacttatgatttgatggccaacttagcatttatacggggtcagcttgaaaatgctgaacaactttttaaagcaacaatgagttacctccttggagggggcatgaagcaggaggacaatgcaataattgaaatttccctaaagctggccagtatctatgctgcgcagaacagacaggaatttgctgttgctggctatgaattctgcatttcaactctagaggaaaaaattgaaagagaaaaggaattagcagaagacattatgtcagtggaagagaaagccaatacccacctcctcttgggcatgtgcttagacgcctgtgctcgctaccttctgttctccaagcagccgtcacaggcacaaaggatgtatgaaaaagctctgcagatttctgaagaaatacaaggagaaagacacccacagaccattgtgctgatgagtgacctggctactaccctggatgcacagggccgctttgatgaggcctatatttatatgcaaagggcatcagatctggcaagacagataaatcatcctgagctacacatggtactcagtaatctagctgcagttttgatgcacagagaacgatatacacaagcaaaagagatctaccaggaagcactgaagcaagcaaagctgaaaaaagatgaaatttctgtacaacacatcagggaagagttggctgagctgtcaaagaaaagtagacctttgacaaattctgtcaagctctaaatccatttttgtgtagggagaataatgtctagtaatgtggaagaatagctatcattcctgtctctgtggcacccgatcaatggcttaaatctgtcgtttttgatattcaggtttcctcaatttagccttagtgaaggaggggttgtacacactgccatttttgtattttaaaggaaaaatgactttcattcccaactgattatgacctttcaggatgtcgtcaagtgatgctttcagttgtaacacgtgacttggtgctgtccctgctggtctaagtagaactgtagattcatatgggctggtgttcctgtgcgctgtgggtgtggtgattcagcctggcatttctaccataagtttttggtctgctgatttgctgccctgtcttctcttactttactttatcaatacctggcaaactgaccagaattaccttcctcatggcaaagggggattatggtgaattgttgttcttatagtctgtttcatgaagcacaagtggaatttaatacataaaagagaaaaatatcttagtttgctaccagcatccagcatgaagttgtaaagtggggattaggcacgtgacagtatagcacccatttgaatttaaataaaagtgaaccatatttatctggttatataaaactaaaaatgggggtgtttatataaaactaaaaactaagaatgatgtaaccttttgtctgtgttatctgaacactctacttcctttgcagccttagtcacacaactgagtcatctcaagtactctttaaggacacacagcccaggctgttctgagtcagaataggcccctacaggtatattttaaaactcttcgtaattctaatgtgtactgctggtatagctgaactactgacctggatcttagtcctagcctttttgcttttgcaatttcagtatcttcatctctaaactagggaaacactgggattctttcttagctgtgggggaaagtatttggttagatgactttgaatgaatagactgctgtgctgaaagagctttatcacactgtctcaaagtatgtaaagatacataggtggatgctcttactgcagcagtcatgaatacatttttagccatttacctaaggaaaaagacagtttttctaggtaccatgaaggaagattgaccctgttggtatgcctgtgggggtgggatgtgagtgggactgataaactgatacttttggttcgtatgtacatactggaagaatcttcataataaatgagactacacaacaatatctctatgtatcccagtaatctttgcatttc

SEQ ID NO: 21970 - DNA, 707 bp, Homo sapiens; identical to SEQ ID NO: 20542

SEQ ID NO: 21971 - DNA, 2538 bp, Homo sapiens; identical to SEQ ID NO: 20316
  misc_feature 2538: n = A,T,C or G

SEQ ID NO: 21972 - DNA, 1380 bp, Homo sapiens; identical to SEQ ID NO: 20118
  misc_feature 1380: n = A,T,C or G

SEQ ID NO: 21973 - DNA, 421 bp, Homo sapiens
  misc_feature 1, 2, 3, 4, 5, 6: n = A,T,C or G
nnnnnnccttcttggttatgaggactgaagttggattaaaatccttttcaatgaagatcagatgtcctgagtagaattcttactattgggtcctgaatcttacattaaatattctctcaaattccttgaggcatagcaacgtgagccaccgtgcccggcctgtcctctgtggttttctgggcttatgttaaaattataactcaatcaccagtctttataaatttgcttttttatatttaaaccaaacctaatgctaattgtgatatgttatttattctcacctgatttgaatcattggattcaattaaatgagtttaattatcattaaataattctaagagaaataatgtctattcggatggtgggaattttctttctacatgcagccccattctgaatgaaatcaaatcacgtgaagatc

SEQ ID NO: 21974 - DNA, 690 bp, Homo sapiens
  misc_feature 1, 2, 3, 4, 5, 6, 7, 8, 9: n = A,T,C or G
nnnnnnnnngtagagacagggtcttgtccaggtggtctcaaagtcctgggcttaagtgatcctcccacctcggcttcccaaagtgctgagattacaggtatgagccactgcccctggccaataaatgttacttctgactagggtatctcaaagtcagcatcattaacatttggagctagataattctttccgtgagggctgtcctatgcttcgtaaggtatttggaagcatctctggcttctgctcactagatatagcagcaactctcacccctcagttttgtgcaatccaaaactgtcaaacgtccctgggaggcaggtgtggggtcagggggaagaagtgctcccaggtgaggactactgtccaatcctactccctcccctccactctggaaggtgtccattccatctttgggcaactctataagaatgttctagtaatctggtgttcatttttctttaactcctatctccttgaaacatcaaaagaaaagtaatgtaagtttctgtaaccagaaagtggcaggactaggatttcaaccagaatctcttccatgctaacactcaagagtgaaacagttatttgtttccactatttcttagtggctaatctctaccacgggtcaggatggcttaatttgaagaaagttacatccttatcctctagctgcttttcctttgcccccagagt

SEQ ID NO: 21975 - DNA, 474 bp, Homo sapiens
  misc_feature 1, 2: n = A,T,C or G
nnacactactatagggcaattgagctccccgcggggccggccgaggtccttggttttttcttgactgaaatttcttactgaattctctggctgatatttttcattgtgagttgcttatctcgatgtcctgctttgaaaagtatgtgtttagggaatgtttttatttgcatacttactatgtttgctatggaaaatttagaaagttatgttaagtaaaatgaagaaaataaaaaccatctgtactcatttgtattcactgtcactttttctcatgttctaattataaatgaccaaaatcaagattgctcaaaagggtaaatgatagccacagtattgctccctaaaatatgcataaagtagaaattcactgccttcccctcctgtccatgaccttgggcacagggaagttctggtgtcatagacatcccgttttgtgaggtagagctgtgcattaaacttgcacatgactggaac

SEQ ID NO: 21976 - DNA, 2538 bp, Homo sapiens; identical to SEQ ID NO: 20316
  misc_feature 2538: n = A,T,C or G

SEQ ID NO: 21977 - DNA, 461 bp, Homo sapiens; identical to SEQ ID NO: 21774
  misc_feature 461: n = A,T,C or G

SEQ ID NO: 21978 - DNA, 1380 bp, Homo sapiens; identical to SEQ ID NO: 20118
  misc_feature 1380: n = A,T,C or G

SEQ ID NO: 21979 - DNA, 508 bp, Homo sapiens; identical to SEQ ID NO: 21293
  misc_feature 502, 503, 504, 505, 506, 507, 508: n = A,T,C or G

SEQ ID NO: 21980 - DNA, 862 bp, Homo sapiens; identical to SEQ ID NO: 21330

SEQ ID NO: 21981 - DNA, 414 bp, Homo sapiens; identical to SEQ ID NO: 21407

SEQ ID NO: 21982 - DNA, 862 bp, Homo sapiens; identical to SEQ ID NO: 21330

SEQ ID NO: 21983 - DNA, 432 bp, Homo sapiens; identical to SEQ ID NO: 21508
  misc_feature 431, 432: n = A,T,C or G

SEQ ID NO: 21984 - DNA, 457 bp, Homo sapiens; identical to SEQ ID NO: 20415
  misc_feature 456, 457: n = A,T,C or G

SEQ ID NO: 21985 - DNA, 2538 bp, Homo sapiens; identical to SEQ ID NO: 20316
  misc_feature 2538: n = A,T,C or G

SEQ ID NO: 21986 - DNA, 706 bp, Homo sapiens
  misc_feature 706: n = A,T,C or G
tttttttttttttttaaagtattaagccttataagaaatgtgttatttctcttgttcactctttattctaggtcattcaattttttaccaagtacagaaggccaaacattaacctagtgaaaataaccctcattttatttaaaagaaatagtcagaaaataaatcaaaaggaccagaaaataagggagaaaatggttaaagaagtaaacatttcatttgggaaagatttcaactgctatagtgatattctttaatgactattaaaagtattttattcagaaatgaccctatgcttatgcaccttaattgccaatatttcaccctccacagtcaaccttccctataaaaggattaccaaaaacctgaagaaccagagaggagcagatacccctggaaagccgaaagttttattgacccaaagactggtaggtatctgttcccagagagggcccctccttttatcaataaaacaagggaaaagtctgtggcaagaacatcaattaaatgtcagattacatgtaatacaaatatttttcatgttttaacttaattaccatcgagaaaaggggaaattttaaagaagcatttaatttaatgctgcagtattagcagagccaggctaactttcttttcataaaacattaccttttattaaacagtaatgtttccagttacatatttttcaatcaagatgcaaatatatacn

SEQ ID NO: 21987 - DNA, 1265 bp, Homo sapiens
  misc_feature 717, 718, 719, 720, 721, 722, 723, 724, 725, 726, 727, 728,729, 730, 731, 732, 733, 734, 735, 736, 737, 738, 739: n = A,T,C or G
agtccaaaccctgatggttagggtaaacagagagacaccagaggatttgtacactgaggaaaataaaatggcagatgttaacacaggaagccatataaacatggtcattaagtgaactgtattcagaccatcagaatttaattttaaatcttggcacagtgcccacacagccgtgtgactttagtccccttgataatataaacttcatttctctcactgtataataaagagacacaaatggtacctactccataaagttacgaagaacacataaaacctgtgaagcacttataatagtgccagaacattgtgagcacacatgagatgttcattggcattattattaagggcttatataaattcccaggtaatgcataataacagtagagactgtgacaagccctggcttccataaattgtcagcttcattttccctgtttcatttgatatgttattccattttatgctttgagacagctaaccataataaaaaaaaaagaaagaaaaaagagagagaaagtagggacaacactaaatcattagtaatttgagcacatttcctccaaggcatatgctatttttcaacttggtttcaatcatgtatctttattgtttttcttaatgttataagcatgtttggttttattgtagtctttaaatcatgtaatacttcattagtatgtattattccacataatagtcctttaggtagatgtnnnnnnnnnnnnnnnnnnnnnnnttttcctcagttgatgaagatgcgctacttggaagtatcagagccacaggacattgagtgttgtggggccctagaatactacgacaaagcctttgaccgtatcaccacgaggagtgagaagccactgcggagcatcaagcgcatcttccacactgtcaccaccacagacgaccctgtcatccgcaagctggcaaaaactcaggggaatgtgtttgccactgatgccatcctggccacgctgatgagctgtacccgctcagtgtattcctgggatattgtcgtccagagagttgggtccaaactcttctttgacaagagagacaactctgactttgcgctgcgcacattgtcagtgactctttgttgcatggtgagtgaccgtgccacgcttttgcagacctcctgacagtgagtgagactgccaatgagccccctcaagatgaaggtaatttcttcaattcaccccgcaacctggccatggaggcaacctacatcaaccacaatttctcccagcagtgcttgagaa

SEQ ID NO: 21988 - DNA, 2538 bp, Homo sapiens; identical to SEQ ID NO: 20316
  misc_feature 2538: n = A,T,C or G

SEQ ID NO: 21989 - DNA, 675 bp, Homo sapiens
  misc_feature 658, 659, 660, 661, 662, 663, 664, 665, 666, 667, 668, 669,670, 671, 672, 673, 674, 675: n = A,T,C or G
acgcgggataccaaaacacaaagaaacaacaggaagtaagaacaaaactcaagaggtctgagtgacatcttgccttgcttcacaacttcagagtttgcattgctttaaaaacattggttataagtgagtgtggaaacagtgtgttcactatttttatgctgtggctgtgctgtgcaggagctgggcttttcgtgcattttagacagaatggaccttggttaatgctggacttgggaactatgccagaaacatccaggaagtggtggtggctgatcctgaccgtcctcagttttgtgaagcaacagcctctgtgcctctttctctgcatgctctgttgacggtctagtcttgagagagaacctgctgctgtcccgtctgtcatagccttcctagcaactcttaggcctgcgtgctgtgttttcatgatctcccccaaagcggcactttgatgttttttcagagtcaaagtatcactgtggatatttatcccaaacaaaattgcaaactgatcaaatgttatgtcttttgataccaaatcaaaaacgattcttggtggctgatcaggttgtctcctaaaaatttgccttttgaacctatactgcctttatgagatgattatgaaagtagaaaatagcctgtgaaaaatggtacctttgcnnnnnnnnnnnnnnnnnn

SEQ ID NO: 21990 - DNA, 460 bp, Homo sapiens; identical to SEQ ID NO: 21412
  misc_feature 460: n = A,T,C or G

SEQ ID NO: 21991 - DNA, 2187 bp, Homo sapiens; identical to SEQ ID NO: 21516

SEQ ID NO: 21992 - DNA, 862 bp, Homo sapiens; identical to SEQ ID NO: 21330

SEQ ID NO: 21993 - DNA, 2538 bp, Homo sapiens; identical to SEQ ID NO: 20316
  misc_feature 2538: n = A,T,C or G

SEQ ID NO: 21994 - DNA, 2187 bp, Homo sapiens; identical to SEQ ID NO: 21516

SEQ ID NO: 21995 - DNA, 1380 bp, Homo sapiens; identical to SEQ ID NO: 20118
  misc_feature 1380: n = A,T,C or G

SEQ ID NO: 21996 - DNA, 801 bp, Homo sapiens; identical to SEQ ID NO: 21839
  misc_feature 528, 532, 587, 624, 635, 651, 657, 666, 669, 678, 689, 696,699, 714, 720, 732, 733, 743, 744, 774, 796, 797, 798, 799,800, 801: n = A,T,C or G

SEQ ID NO: 21997 - DNA, 431 bp, Homo sapiens; identical to SEQ ID NO: 20740

SEQ ID NO: 21998 - DNA, 886 bp, Homo sapiens; identical to SEQ ID NO: 21881
  misc_feature 1, 2, 3, 4, 5, 6, 886: n = A,T,C or G

SEQ ID NO: 21999 - DNA, 2538 bp, Homo sapiens; identical to SEQ ID NO: 20316
  misc_feature 2538: n = A,T,C or G

SEQ ID NO: 22000 - DNA, 2538 bp, Homo sapiens; identical to SEQ ID NO: 20316
  misc_feature 2538: n = A,T,C or G

SEQ ID NO: 22001 - DNA, 691 bp, Homo sapiens
  misc_feature 688, 689, 690, 691: n = A,T,C or G
acaccaccacaccccactaattttgatttttagtaaagacggggtttctccgtgttggccaggctgtctccaacaccctaactcaggtgatctacctgcctcggcctcccaaagtgctgggattgcgagcgtgagccactgcacctgcccttgtttttaactcctcttactataattcccagtcacgcagtttgtttttgactgtgatttagcctccataggttggggtgaaacacggcactctgtctgcaaactggcagcagagttttttttgtttttgtttttgtttttttttaccttcaggaaaatcccttagttgctgttgggattgaagacctgtatcttacttattaggacctattttgatttttagagaagtaggcaaaatatattgcaaatgactaggggagcctctgaaaagggagaagacacctgtttttagcacacttgaacagttgctttgtagtaacatatctggtacatttttgtttttctcttaattcatcataggactttgcattgtttgacatgttgcggttactctgttttttggtataattcgactatttttagaaaaaaaaactccaataatttttttaaaaagcagaattactaaatagtttattcctaatctgtgtgacttcctatttcatttcttgctaggtgtgcatcagtcgagtaagttgcnnnn

SEQ ID NO: 22002 - DNA, 1380 bp, Homo sapiens; identical to SEQ ID NO: 20118
  misc_feature 1380: n = A,T,C or G

SEQ ID NO: 22003 - DNA, 1214 bp, Homo sapiens; identical to SEQ ID NO: 20119

SEQ ID NO: 22004 - DNA, 879 bp, Homo sapiens; identical to SEQ ID NO: 21368
  misc_feature 1, 2, 3, 4, 5, 6, 750, 846, 852, 872, 879: n = A,T,C or G

SEQ ID NO: 22005 - DNA, 2187 bp, Homo sapiens; identical to SEQ ID NO: 21516

SEQ ID NO: 22006 - DNA, 2538 bp, Homo sapiens; identical to SEQ ID NO: 20316
  misc_feature 2538: n = A,T,C or G

SEQ ID NO: 22007 - DNA, 672 bp, Homo sapiens
  misc_feature 672: n = A,T,C or G
gacccacgcgtccgagacacctgacagtaaaggggaggtgaggaatgggtgaagtagggaagatgcagagagtttgatgctagagtttatcctttagtacttgaagattgacattaaaatacctagaacaaatacatttggacttagtgttccataaatggatatatatctaagagcagttttcccagggaaccctatctaaaagttgaattcgttctcaactgtttttacagtatctagtttccctccctcattactgtgctatgtactctaggggaattgagaaaaacgaaggcattatctttgtaagaagaaaaaatcaagatgatctggcacacctggaggggtagtggaatgggagttgatcactgaacatgtatgcaatgtgcataggcacagggggattgggaaagacatcccaggcgagaagtaagagtaatcacaaaggtgggaataaatatggcatgctacagtgtggcatgggctttgtgttcctattatttgcagaatgttcgcatagctgggtgtcttagtctgggatgctataccaaaataccatagattggtttataagcagttctagaagctgggaagtccaagatcaaggcaccagcagattccatgtctggtgattctgtttcctggttcatagacagtgcctttttgctgtgn

SEQ ID NO: 22008 - DNA, 517 bp, Homo sapiens; identical to SEQ ID NO: 20410

SEQ ID NO: 22009 - DNA, 809 bp, Homo sapiens; identical to SEQ ID NO: 20847
  misc_feature 809: n = A,T,C or G

SEQ ID NO: 22010 - DNA, 886 bp, Homo sapiens; identical to SEQ ID NO: 21881
  misc_feature 1, 2, 3, 4, 5, 6, 886: n = A,T,C or G

SEQ ID NO: 22011 - DNA, 414 bp, Homo sapiens; identical to SEQ ID NO: 21407

SEQ ID NO: 22012 - DNA, 2187 bp, Homo sapiens; identical to SEQ ID NO: 21516

SEQ ID NO: 22013 - DNA, 1020 bp, Homo sapiens; identical to SEQ ID NO: 20647
  misc_feature 1, 2, 3, 14, 20, 35, 42, 48, 81, 1019, 1020: n = A,T,C or G

SEQ ID NO: 22014 - DNA, 2071 bp, Homo sapiens; identical to SEQ ID NO: 21824

SEQ ID NO: 22015 - DNA, 489 bp, Homo sapiens
  misc_feature 489: n = A,T,C or G
aattcccatgatgtcagaccactggagtttccaggggcaacaccccataaccgtcccgctgcagaagagcatcagacgttcagtaagaatgcaaagggtatctcagtgggaaccgcggaccaggagagctcccaaaccaacacatggctagggctctctaggccctttcaggctagatcttgacgagagaagagtaaagatctttctgaggttggtgcaactgaagaaacgaaagtttcggcctctgctgtcagatctatgaaaggaaagaactgtgaacttgtccccttttgttttctttgacttaaaacaaaagaaaatcactggaacaaagtcttaaagtaataacagaaatgtcagaaaagttgaacatcttatgggcacatgcggtgagttacgctaacttatagcatccactgagattagccgcataggattcttcccatgttagagctaaaaggacctactgtccgccagctgcattgcagn

SEQ ID NO: 22016 - DNA, 383 bp, Homo sapiens
  misc_feature 380, 381, 382, 383: n = A,T,C or G
actaatttcctgaaaagtatgttccgatagatgaacagatcattaatgcagaatgagaatcactcctaaaataggtaatggtaaaaattaaattgacgattacctctctctatgcagaaggaaatatcacctatatgacatcatcatcatctattgatacctggctggcagtgctaatattgtttttaatgccaatgtgtaagaagttttatctctctgtctctgacatcctacagagtcacttccccaggcctcccatagaagttgggtgccatcaacatagggaaataagaaaagcttaaatgtaaggaagggtccttgtcttttttctgtgcagaaaaaacaagaatgagcaaagaccccaaaagggaaaccgagcnnnn

SEQ ID NO: 22017 - DNA, 1290 bp, Homo sapiens; identical to SEQ ID NO: 20742
  misc_feature 1, 2, 1281, 1282, 1283, 1284, 1285, 1286, 1287, 1288, 1289,1290: n = A,T,C or G

SEQ ID NO: 22018 - DNA, 2020 bp, Homo sapiens
ccgtcagaaggcagagtcgttttgaatacgtggttcattgagtacccactctgggccagttgatggctgcgaagagagcagaaggggtgctgctgtaggaaatcaatggctcggaagaccacactgaggaaggtgtgagttgatactggaagatctccaggtttgaggcatcttcagaggtatatggtggttttgtgtgtgttgagggtgtggtagcgcagcagctccctagggaattagaaggttttattgaacatttaccctgtgacaggcactgcaggcattcagcgcgcagtgtcatcttcattttacaggtgaggaaaagactcaggttcaagtagatggtcaaggccagtactaccggaaggaccatctgggggttcggacactggtggggtgggatttgctgccccttgcaaattgagagtgtcttggggtcagttttgatttgctcagctgttggcattctttgggctctgagtgggtgaggtgacccttgacctcctgggatcgcatctggagagtgcctagtattctgccagcttcggaaagggagggaaagcaagcctggcagaggcacccattccattcccagcttgctccgtagctggcgattggaagacactctgcgacagtgttcagtccctgggcaggaaagcctccttccaggattcttcctcacctggggccgcttcttccccaaaaggcatgcatggcggcaccagtcagaccccttgtgatgcccaagatcgtcaaaaagagaaccaagaagttcatccggcaccagtcagaccgatatgtcaaaattaagccgtaactggcggaaacccagaggcattgacaacagggttcgtagaagattcaagggccagatcttgatgtgcaacattggttatggaagcaacaaaaaaacaaagcacaatgtttcctccaagaaccgcaaagccatcgtggaaagagctgcccaactgggccatcagagtcaccaaccccaatgccaggctgcgcagtgaagaaaatgagtaggcagctcatgtgcacgttttctgtttaaataaatgtaaaaactggccatctggcatcttccttccttgattttaagtcttcagcttcttggccaacttagtttgccacagagattgttcttttgcttaagcccctttggaatctcccatttggaggggatttgtaaaggacactcagtccttgaacaggggaatgtggcctcaagtgcacagactagccttagtcatctccagttgaggctgggtatgaggggtacagacttggccctcacaccaggtaggttctgagacacttgaagaagcttggtggctcccaagccacaagtagtcattcttagccttgcttttgtaaagttaggtgacaagttattccatgtgatgcttgtgagaattgagaaaatatgcatggaaatatccagatgaatttcttacacagattcttacgggatgcctaaattgcatcctgtaacttctgtccaaaaagaacaggatgatgtacaaattgctcttccaggtaatccaccacggttaactggaaaagcactttcagtctcctataaccctcccaccagctgctgcttcaggtataatgttacagcagtttgccaaggcggggacctaactggtgacaattgagcctcttgactggtactcagaatttagtgacacgtggtcctgattttttttggagacggggtcttgctctcacccaggctgggagtgcagtggcacactgactacagccttgacctccccaggctcaggtgatcttcccacctcagccttccaagtagctgggactacagatgcacacctccaaacctgggtagtttttgaagtttttttgtagaggtggtctagccatgttgcctaggctcccgaactcctgagctcaagcaatcctgcttcagcctcccaaagtactgggattacaggcatcttctgtagtatataggtcatgagggatatgggatgtggtacttatgagacagaaa

SEQ ID NO: 22019 - DNA, 455 bp, Homo sapiens
  misc_feature 1, 454, 455: n = A,T,C or G
ncttcaataccctgtattatctgggaacaacaacccctttccctgtactggcatcaacaagataaggtttccatggagctgccataatttttctataacgctgcccctaggccagaattggttggtctacaggtagatacctgatccaaactatgacaaccacaatattccagcccttgacaatgattgactcttccaggacgggcacttaactcaagctaggccaatcatagtcatttctcaactagatcctgccccactggtcatagctaattggtgcaggactggaactggatgcaagctgactctctggattgagaactagaggtcagaccattccctgtcccatgtctgaaactgaaatatgcagcactggaaaactgctcatgctcatggccatgggatcagccttccccttagccttcagaagggccttgggagttggaggcaacann

SEQ ID NO: 22020 - DNA, 1380 bp, Homo sapiens; identical to SEQ ID NO: 20118
  misc_feature 1380: n = A,T,C or G

SEQ ID NO: 22021 - DNA, 2716 bp, Homo sapiens
  misc_feature 1, 2, 3, 4, 5, 6, 7, 8, 9, 10, 11, 12, 2716: n = A,T,C or G
nnnnnnnnnnnnactgagttaacaaaatatctttaataaaatctttttgtttgtttgttttgttttggagacagagtctgtcacccaggttggagtgcagtggcgcgatctcggctcactgcaacctctgcctcccgggttcaagcgattctcctgcctcagcctcccgagtagctgggatgacaggtgcatgccaccactctcggctaatttttgtatttttaatagagacggaggtttcaccatgttggccaggctggtctcgaactcctgactcaggtgatccgcccgcctcagcctctcaaagtgttggattacaggcgtgagccacggcgcctggcctaaaacctttttttaccacaaaatggagacctgtaaggcgaagtgaggttgatggctggacggtgggggtggggtgcagtcctggatcagggccggagctgtcacttcttcctcttcttgttgtccgggggcgcctcgttcttcttgcccagaatctttagaaggctcttggacatgtagtagggccggtccagggagccgttgttccgctccaggtcttccaggaagcagaggaagagcgtgtccacacacatgccgaaaacgctgaagaagccgctggcgatgacataggcccccaggatggaggtcatgatgggcagccagtaatagttgaggtgggggctcttaaagtctttacccagccccgggatgcgaccggagaaaaaaaagaaggacaggacccccacgcctccgaccaccagcagcttcccaaagaacagcagcaggtctgtgactttgtccaggacgaccaccctgacaatgtttcgcatgagtagcatgaacgcatttttggctgagacacagaaattcttcccgtagatggcgatcatgatgtatgcattgcggtttaggaacttgataaatttttccagacaccagaggcagcacttgaaacagcacatgatgcagcgggctacagggttctgcactcctctgagcttgtggtcaatatactccaagatgacccgggctatctgcacaagggtcaggatgagggctccaaatgccaatgacccagtgtggtaacggagtgtgcggatgaaggcagagattaaggggaaggtagggatgtcctggggcttgtggaaggcccagtagaaggaggcaaaggctccagcgaggacgcattggcccagggccagtacccagttaagggtccagaagagccccaggaccccatagatttgcagattgaagacagaacgttggattaggcctttggatgagtagccctggaagacgcacatcagccctgggcacgaggagttcacaaggtgggccgtggggttgcatgatgtatttattggcactttctcacagccgggggagctgatgttggatgcccagagcacatactggggttgccccgatgtagccaggtacagagcagtcatggcccagtaggcaatgcagatgaggaggaggacaaaggtgaccagtgggtagaacatggtagacatcatctgtcccacagccttgctggcctccttcaggagggcgatggcaatacgaatccgctgccgcaggaagatgagcaccagcagcaggatggcttcaagcaccgccaacacgatcagggcggccagccaggtctcctgcacgctctggtaggcactgaggttggtggtgaaacccagctgggagatggaggcgcccttgtcccgcagcactcggtactcctcccagcagtagtagatgccatatgccagcacgcccagcactcccaggatcagcaccagcaccaggggcccagccaccaggcgcagaagcaagataaacagtaggctcaagaccagagccacccccagggcaacaagaatccaataccaggactgggcaaaatcttcaaagatcttaacactgatgtctcgggcattgaggctgtcaataagaccgctgatcccctgctgtatggtggtgtcattggtgatccctgggagcgccggtggagtaacgttggtccatggaaagcagcgccccagagctggagcagaggggaggaggaaactggggcagagttcctgttgcaggcttgtgatcaccgtcatattccagggtacccctggcagacaaaagttcctgttttttgtatagaagacttccccaacagtctgtgagaactcgttttttcccacagtccatgggtcctccgggcaggaggacacacacacctggggtgtggggcactgtaggccgttctcagcaactgagatgatgttgctggacaggatgcagctgaagatgttgaagtacaggagatacggcttatctttgttctcccccatgccacagtaggccccagtagagttcctggggtagaggacttgccgggggtctccatacaaccaggccacaatccccaccacgatgtaacctagaatgaagagcaggaagaggacgcagcagatgacatctgtgcagcttctgttcttgatggggcctcgaaaggaggggtcgtatttgactggcttccctgagggacatgagaagaggtgtggaggatgagtctctctctgcatatcttgtcctgctgagtcctcctagccccaggatcctacccaggcctcaggtgtttggagggagatgggctagggcaggactggcaggaggggaaaactgggagcaggaaaggtaggatccaggccggacgcgn

SEQ ID NO: 22022 - DNA, 924 bp, Homo sapiens
  misc_feature 1, 2, 3, 4, 923, 924: n = A,T,C or G
nnnnccgaggtactgggagagaccacatttggggtcataaaacaagaagcaacatatatgaaaggaatgaaataatacagagtatgttctctgaccacagtggaattaaatgacaataacaataagataactaggaaacaccaactatctggaaattaatgcatgtccaaataatcattgggtcaaagaagaagtcacaagaaaaactagataacattttgaactaaatgttaatgaaaatacaacatatcaaaattttgtgagatgcaacttaagctgcactttgagaaaacgatataattttacaatcttagctcttacatgtagaaaccaaatgctttattcaaccaattttgaatgtgcacaaatatggggtatatttttcacgagcctttctgaataaactagaagacaagctccagccaaccaagagatggggaaatttttggtaaaaggaccagagataaacaattattaataacatacttaactggagatataagccagtaacaaagctgcggatatgagttgtaaagtgttatatgttctgacagtgtagaaacaatataaccaacaaaaactgggaaaggaatgaggaggaaaagggagaaaagtagaacaagcttgttgactgtctcagtagctggcagtcaaagataatacttacagctgacatatcaagtagtagatgtatattcaatagaacaaaggtaaacattatataaagccactggtcaggtgcagtggctcatgcttgtaatctcagcacttggggaggtcgacatggatcacttgatctcaagaatttaagaccagtttgggcaacgtggtgaaccttgtctcttactaatatgattatttactagccaggtacggtgacatgtgccttatctatagctagctggtcatgatgacgctgctcnn

SEQ ID NO: 22023 - DNA, 1189 bp, Homo sapiens; identical to SEQ ID NO: 20185
  misc_feature 1179, 1180, 1181, 1182, 1183, 1184, 1185, 1186, 1187, 1188,1189: n = A,T,C or G

SEQ ID NO: 22024 - DNA, 862 bp, Homo sapiens; identical to SEQ ID NO: 21330

SEQ ID NO: 22025 - DNA, 1039 bp, Homo sapiens
  misc_feature 1, 1039: n = A,T,C or G
ncactatagtgagcctcatttgaagatgaggaaacaaaggtacaaagaggttctagctggacctctaaagtcacataataagtaagtggtagagctggagttcacatccaggcagtaggctccaaggtctgtgctcttaaccacattctgggctgcatcttttatagacaaactatgatccagagagattacgagacttggatcacataccaagagagtgttaaagccacattaggattcaattccagggccatcagattccaagtccactggagaaaagatgtatatctctaatctgttaacaaattgctcaactactcagactaatcccaggtgatggatgtctaatgctcaggaaaggcgagtcagtctctgaggcaacagatcccatgggcctgggtagaaaatgcccagtgcttcccagtcccaagtgctggctttccctgtatctgcctctgccaggcaacacttatcaggctcccaatcagcaggagcctccatgctccactttgaacagcctctatgctccagcaatggggcatttgtgaagagtgacttgattaacttttctgaccatgggtataatacagttgcttcagagggcagtggttctgggtgtgatttttacactgtaacattgtatacagtgtcatggataattactatttttttctggtcattaacactcacctactctagtactaggatttcagaccaaggtcctcatgacgcctggatattttagtatctatatccaataatcttttctctcctactgaatatccaggcaaagatgaaatcgttttctttaaaactgtcaaattctgtaaaactcaggagccagttcaagggaacaagcatcttcacaatagatggaatcaagagttaaatgttatagtggcaagcttgtctactgggcaacagacaaccagacctgcttgtggagatgggcagctcccccagccctgctctgtggacctcatttctgtcaaatgaaaggcagcagcttccagctgattgcagcatagtgttcatcaan

SEQ ID NO: 22026 - DNA, 1394 bp, Homo sapiens
  misc_feature 1, 2, 3, 4, 5: n = A,T,C or G
nnnnnctacacatttttgtatatatatttttctatattccaacctaatcggtggcttgtcccttcctgtgtttattgggctgttgggtgcctggatagagctggagaccatttaactgctgtatgaataatagataagcgtcttgaataacatctgaatttcctaggtatgtagaaacacccaccatgcacatatatgaacatacagaatatatgaatgttaaaatatggtgaaaacaatcttttgctaatagaagtgttaacctttatttttaaaaaaaatttggtgtgtatgtagaggtttatttgattgttagttgtgtccatgtataatatgtcatctacctttacagatgtgcagaaatttgttgtatttggtggatatattttacttaaaactatagggcagaagctttttatgtttgttgaagtgaaatggcataccaaacctgtgtggtagagtgggatttttagattgctgtgtgtacagtcaggttatatctttaaaatacctattcgttatatattaatatgtagacattgctgatacatatgtatgtaaaaatcagagtatttttattaatataggcattagcttcttgattcacttgtttgttgggaagcacttggagaaggatgttgaatactttgtcatttcatctctgtgacgtacagttgtcatgtcaaccctcctatctgcgggttttgcatctgcaagcacatgcagctggaaagtacagcattggcagaatctgaaacccgagtaaagagcacctcgttttcataaccatgggttctgaagagctaagggagttgaggatgcaccgattttggtatgggggtacggtacaggtacaaatccccgatggatatcactagacaactgtacaatcctctttagctttttttttgttttatagacagtgtggacgtgcatatattgcaagcatcactttgttaaactatgcttaaccctgcaaatgattttaagagctctgtgtgggtggctttcttgggtttactattaaatatctgtgtttatcatagttgttctataacatttcaactttgtaaatatgtagtttgttgataaagaggatagagacatttttcttttgttgatagattgttctttcccctttgcttagtcttcattgtgttgctgggattgtaaaagacaaattacttgcacatatttaagcttatatattaaatgtatatatgctgtcatgttagagagggagagtggttccctcccccacattttgatttaaaagtaaaaattaatttttattaaattgtttgggtcagtttcatgtaagaataatctctacattgaatggtatatcttggccgggtgcggaggctcacgcctgtaatcccagcactttggga

SEQ ID NO: 22027 - DNA, 452 bp, Homo sapiens
  misc_feature 1, 441, 442, 443, 444, 445, 446, 447, 448, 449, 450, 451,452: n = A,T,C or G
ntagagcggccgtgaagtagccccccaacttgctggcgtgctgcttctttgggaacacccctgggtggcgtttcatgtaatgggacacgatgcccttcttgctgaacgactggaaagagcacaaggagcactttttcttctccactgcccgccggagttcctcgctcagctgaggggagtcgtccttgggcggggatgggatgatcactttgttgggcttgtcgctgatggtcctggaggctgccaagcagtgagtgtaatacgcatcaatgtcgtggcgcttctggtagtgggctgccagacctttgcggatggggttggtgtaggcacacagggcacacttgaagaggttgttcttgccttctggctgggctcggacattattgtgcttgatgcggtagtgcctggcgatccccttcctcgtggagcagaagtacgtcnnnnnnnnnnnn

SEQ ID NO: 22028 - DNA, 481 bp, Homo sapiens
  misc_feature 479, 480, 481: n = A,T,C or G
acaggcccacgccagacacgacgtctggcaggaacctcggcctcagaggtgggtcacttatatctctcacgcagatttactatcatgggtcacttaacccgtggatcacacgggttcctcattcttgagttttgggctagtgaggtgccgacttcggggtctaggaggggagacctgatgtggctgtgtgtgcgcacgcgggggtgttgagagtggatgagtgggaggagttggcgaatagaatagagactaggactgaagtaggaaagactccccggtgtttaggaggtttagagagatccaaaactgaggcgggaagacaaactgagctgataaaatgagggcatggaaagaacggcagtggcaggactagtgggaaacgtcggatttatgagagaaggcgaagagagaagatgtagattggtgtggaagtgggaggggatctgtgcaaaaagaatttgaaattctgaaattggaannn

SEQ ID NO: 22029 - DNA, 489 bp, Homo sapiens
  misc_feature 1, 2, 3, 4, 488, 489: n = A,T,C or G
nnnncgattgagctcaccgcggtgggcggccgcccgggcaggtacagcatggctcaaggcctcaggcaaacaaaagcactcttaccagatagaacattatgagagctcagttcccagagctgcccaaaggctagtcaggaaaacaggaccttctggggaacttacagagtttgagcaataggcctgttatgtcaaccccaagcagagtggatgaagacaaggcaagggacaggctgacagctgattcctgggttcctctgatgtttacaggagagatcaagcaaaggagacaaaaaaaggactgtttacacagggggaaaccaacactgaaaactcctggaaatgaagagttttcagaatgcgttgttgctatccttggagctgaatggctatcataatgatgattacattaattcagattttaaaaattaatcattagatgtgatacaagagaccggaattaggatcttaagggttgcactcagtann

SEQ ID NO: 22030 - DNA, 2193 bp, Homo sapiens
  misc_feature 1, 2, 3, 4, 5, 6, 7, 8, 9, 10, 11, 12, 13, 14: n = A,T,C or G
nnnnnnnnnnnnnnaatagcgggatacgggcacacccacagcccaactaatttgaatttagaaaaaagggtttcactgttggccaactggtccttgactccggacgtccgtgacgccaccccacctcagcctcccaaagtgctggggattacaggcgtgagccaccgcgccccagacctagaaaggaatacatttaaatgagctctgcacagcactggcgaaggagggacgggcctggtcagggaggtgaagggcaggtgctgccaacacctgctcctctgctccatttactctctgaccaggctgtatcccagagagctggcccagccccatgcctccccctcatcttcccctaactgctctgtgcaaggccacccatgcaggcaccaaacacccacacctgacgaagactgtctcctcttgcgctgctgttttgcagcccactccacagagaaaggactaggctgcggccagggctgggaccagtgcactgacacagacacagttcaacacgacactccccaggaggagaaaggtgggtggtgaggttgggtcacacctcctcagttggtttgttttgtacctgaatgtatgagttctccagaagaaaccccagtaacacagggggtgcagaggctctgcctccctcacatggcctgagctgaccatagtgaggccctggcaatgggcaggagccttgctgactcctttgggctttgggctccacctcaccatcataaccccttggcactcaggtctgcctggtggctgggaagcttccatctagaaaaccgcactggaaaggattctttaaccatgttgctctaacagggctgtgcactgttcagtacatgccatgcagatttctgcttccttgcttttgctcatgtgtttttcatctcactgtctgtcctgccattgactacaacccaaagcctcagaggcacagaactttcccagaccatctggtctaccctgatcttatctactataaacgtctttagatagtccttgattttctgcttgatgtgcagcagtcacctaaaagctcccttaggccacatattacgtcttttaccttttttgttttctacaatatctagcgcaaagccaggcacacacacactaaaaaataatattaaaattatgggtggttgaaaaggaacaaaaaaaagaaagatcccaggctgtatatcagccacccaaggatctcaacagattccaacttcaggctctatattggggtggcacttcctgcaagatggcgagttatattacttgtactctcacgaggcaacactcacatgctaagccaatttctgggatcacaatcttgcttagttgataatactaccatggaagccaaggaaagaagaggtaccacatgacaaatcagaggtgggctgtgtttatggtgcacagctcatcttgtgggccacccttccacagtcaggtaatggtgcaagtttcctccctgttcagctacaaggaggaagactggtcactccacgtgggactaaggaagaaggcaatgctcccagatgaggcagtcctataaattaccaggacactggggccccacccaaaccatcaggaagccacaaacctgacattagtatctgtcttgtgacacgaggcaactataagcatggggaacccagaaagagagtcccatggaacacacgcaaaggagtcatgaagacccaacagctccactgttacatctcaatagcaaacctctccccagagcagctctataagaaagcaaactcacaatgtcatatgaattggccatggccagctgcagaaaccattaaagaccattggagtttttctccccgctcctcctgaaagcagggacaggcagctctcaaatcggcatctggcagactttccagtgagtggagaccagcaggatctgatccggaaatgtctgggttgctagaatgaacacaagaaaatacagaagcccttgctacctcccatcccagaagtgggatggcagtgataaacctaaaaacgtgagatgcgatgctctcctctgacctaaggaaatccataccaagtaatataaatatcaaaaacaaaacttctgaaaaagaaacagtgttgagacttcttccagttttccaaggagcccctccagtcctaagatgcccaggggtgggtgtgaggtggagccccacgcagagt

SEQ ID NO: 22031 - DNA, 897 bp, Homo sapiens; identical to SEQ ID NO: 20923
  misc_feature 894, 895, 896, 897: n = A,T,C or G

SEQ ID NO: 22032 - DNA, 1432 bp, Homo sapiens
acattgttgtatgtcccgcacaggtccactgcttctctccgatttgtccgcgttattatctcgcctgtggcctttgtcagttggtgtcgttgctgcccctgggattgtccccgccctctttgtcgtttgcacgcagctgctgtctgtgccacgtctggtgtcactggcgcatatcctgcttctgtcctctttttctccccggggtcccgcggtttccgtgctcaaccctcctgtggttcccggggattccaggctcatgcccacccagccgcgctaatttttgtaatttttaggggtttcctccatgtcggccaagcctgtctagagctcctgacctcaggcgatccgccgcctcggccttcccaagcctgggattaccagcgcgtaagcccccgcgccggctctgtcattctgtcttttactttttgagatagagtctcgctcggacgctcaggttggagtccaacggcgtgatctaggctctctgcaacctccgcctcccgggttcaagcgattctcctgtctcagcctcccgagtagctgggattattgacgggcagcaccacgcccggctactttttgtggtttttgtatcttctgtcttctgctctttagtaccgcatagagccgcagaagactagcgagtcgaacaaacggcccctcttgcagcagttgttgatcacggggctgccccccggtactcatcctgtgtctctcgtccaaatccccgctcctcctcagctatcacctctgccgatgctggtggtttccctgggtaccgggaaccaaactctcattccccagggggcctaagacccccgtggccaggcccttctcaagtcagggttcctgcacattcacagttacgggtggccctgggagtaacacctggcacccaaacaggtcaccagagtccacacatagtccacctgccctccctgcgtaagatcagctcttcctcctcccgacgaatagatcaggatcaatgatccctgccaagatggcgactgctccagcctgctggtccaacctgtccagccacagctgttgctcgaaggcttgaagttcaatgggaccctctcccgctttctacaaactggttcctttatttttatgtttatttgggacggggtctggctctgtcacccaggctggagtgaaactccatctcaaaaaataaaaaataaaatgaaaataaaattaagaggtagacgctaggcttgagtccagaattagaaatctccagagctagggtgttttctaagaagcccctttgcgttctgggggctcagacctcagtgaggcttagtaggattttgtattttctttcattctgactcagcacagacatttatgggggagatggagagaggagagattaaggagaaaaaggtaattccggagactaagtggggagagatgagcagagcgg

SEQ ID NO: 22033 - DNA, 785 bp, Homo sapiens
  misc_feature 1, 2, 3, 677, 683, 690, 693, 785: n = A,T,C or G
nnncgttctggaagcgggaggggcgttacttctcgtgatcatatggccaatggacgcagagggggcggggcctcggtcgctgttcaactgcagggcgtattccaggagggcagtcggggagcgcagatcccgaagcagcgctgggagcgtaagtgcgggcagagcactgcgccgtttgggaacgcaactttgaggagacagtgcggtggttctggaggctgggaagtccaagaccagttggctcgcatctgacttcagtgaagttccttatgacttcccctgaaattgcttccttatcatgggggcaaatgaaagtaaaaggctctaatacaacctataaggactgcaaagtatggccagggggcagtcggacttgggattggagagaaacaggaactgagcattctcctggtgtgcagcctgcagatgtgaaggaagttgttgagaagggtgtacagactcttgtgattggccgagggatgagtgaggccttgaaggtgccttcatcaactgtggagtacctcaagaaacatggcattgatgtgcgggtcctccagacagagcaggcagtgaaggagtataatgccttgcgtgcccaaggggtcagggtgggaggtgtcttccattccacctgctgatggagcctcaagaggagaataaatcactaagtgcctaanaaaaanaataaanaanaaaaaaaaaaaactcgagggggggcccggtacccactttgcctatagggagtctattacaattcactgtccgtcgtttacaacgtcgtgacn

SEQ ID NO: 22034 - DNA, 1328 bp, Homo sapiens
  misc_feature 1324, 1325, 1326, 1327, 1328: n = A,T,C or G
acgcgtccggagatgcggctttcaggcatttgtttaggacatgcccatggcggggcttctaaaggggcttgtacggcaactggagcagttcagcacgcggcaacaagcttccaagatgccgcccaaaggaaaaagtggttctggaaaagcggggaaagggggagcagcctctgggagtgacagtgctgacaagaaggctcaaggtcccaaaggtggtggcaatgcagtaaaggtcagacacattctatgtgaaaaacatggcaaaatcatggaagccatggaaaagttaaagtctgggatgagattcaatgaagtggccgcacagtatagtgaagataaagccaggcaagggggtgacttgggttggatgaccagagggtccatggtgggaccatttcaagaagcagcatttgccttgcctgtaagtgggatggataagcctgtgtttacagacccaccggttaagacaaaatttggatatcatattattatggtcgaaggaagaaaataaaatcatatgaaagactgaataagttttatacattttgtttctttaaaaggtattacatattcttttgagctggagctgcaaggaaatacaaaaatttttaaaaagaaaagatattggatgctccttgtattctgtgaaagctctaagtatgggtttgtaggtgtaagagagggtggggctaagtgaatgtcaactgtagtaggtattcagtcagtctttctcaaagagaagtcaagcagactccctttaacctgtattctctttcctcccagaactatatctgactctcagtctgtcccataaattaattcagaaaccatcttcaggggaagcagatatcaactcacactattcacacaactgaaaatattgggcatcaaatagattagtgtgtgagaatcataaaataagttcctagacaacatttgttttacatgttagtcaactctgatcttccaggacaggtggtattagctccactgtcttaacatagtacgtggcacgttatgcctttcagtgttaactcctttctttttaaataaatgtttattggaggaaaaaagcactcagttgttccatgagttgttttgtactagactaaccgagtgctggttaaagggagggatgtcagcataaaaatgtcattccctcatcttcagtgtatgggttacattaagactgtcctttccagggccaatgttctgtgcatctaaatttttaaaatttaaaatgccatatttatgacatataaaaaagtataaagattactaatataaatactatactgcttcaaaaataaaactttgccaacannnnn

SEQ ID NO: 22035 - DNA, 609 bp, Homo sapiens
  misc_feature 606, 607, 608, 609: n = A,T,C or G
ccagctttcggcagacactgctattccaccatgaagctgggctccagaaggtccccggagggacccttggagttccctgatgcctctacatccaggagacctgggtcaagtgtgcctcggctgagtccccctcactcccttccaagaaaagcctacaactgatcaggatttgtgagactctgaactttaagcaagtcattttgactttctgtgcctcacttccatgagaacacccctcttggcaagacggcattatatgtaaacaatacccgcgtacagttcggttcagttactaaaagatgtaactgaactgcagatccttggtgaaatatctttcaacaaatctcttatgagggactgaatgcagagaaccacagaactaagatcactgtcgtcttcctgaaagatgagaagtaccattctggtggatcaacaggaggtgctcagctagaaaaagagctccaggcacttgagaaggaaaatgcacagctggaatggggaattacaagcactagagaaggagctagctcaatgagtccaggcctgtgaggtgcagagtgcccagaactggactcaggatgccccagggccactctgcctctgccnnnn

SEQ ID NO: 22036 - DNA, 408 bp, Homo sapiens
acgcggggaggtaagaaatgaattttgttgttttggtttcaaattgtggaaaaataccaagagattgatgtattgtctggatatgtgtgcagcagaggagacaacatttgcttctttacagctttgcaagtgcattaaacaaaaattgtagaagagggtgtccttgtcctctcctagtcaccacttgtgcaaacagcgaaagtttagaaaggaaaatcagcaagtcttgcatagagtgtaaggacattcagattgagaatgaagaacttgtcctttcagtctcttcttccctattaatatgagataaaaacataataaaatcacttgtaaatctagagaaatagaaagtgatttttttttccacataccaattttgacagtgctgggcctaaaggagataacatttat

SEQ ID NO: 22037 - DNA, 745 bp, Homo sapiens; identical to SEQ ID NO: 20943
  misc_feature 1, 2, 3, 4, 5, 6, 7, 8, 9, 10, 11, 12, 741, 742, 743, 744,745: n = A,T,C or G

SEQ ID NO: 22038 - DNA, 906 bp, Homo sapiens
  misc_feature 1, 2, 864, 902, 906: n = A,T,C or G
nncacttatccctttgctttctatttttcctgcttttgttattcttcatttttcttctcttgctctgaatcccttaaatgctgaggctgctcaagtttcatccctagtcctattttctcattctatatgcacactcatttttcatttaacagacttcactggcttcaggcaccatttgttttattattcatattttcaacccccatatctctctagtgctgtagacctttatttctacttactagttatattcacctaacatcccatagatatgccaatgtcaatgtgcctaaaacaaaattgtctctacctcccgctccttcaaatctattctgtcttctctaatcctataattactctccctcaagtcatcatcatcacttttctgggttactgtaatagccttcaggctaatttgctcactgtcaatcttgctgtctctcatttcagaatatgttctgcttgcaggtgacagtaaactagttaaacaaatatttaatattagcttaagcaaaaaaaaaaaaggcctatcctatttatagcctagaattaggcagtatagggttgggacagtggctcattggtgctatcaaggacgtagactttttctctttccactctgtcctctacagcatgctggtttgtcacctcatggtcacaagatgtctgctgtacctccagggagcagatacacattcaaagtaggaaatagcagataaaaatgtacacaagatgcgtctgactcccttttaccagaaaagtaaatgctttcttagaatctcctcagaagacctctgtgtatatctcaaccagtacttgtcatatagccacacacttagctcaaggaagatagggaataggganatcatgtttcttttcccctgtggtgaggaaggcaaggngtan

SEQ ID NO: 22039 - DNA, 2865 bp, Homo sapiens
  misc_feature 1, 2, 3, 4, 5, 6, 7, 8, 9, 10, 2865: n = A,T,C or G
nnnnnnnnnngcctgaggtgggtggcggtggaagttaagggagtcaggggctatcgctcctcgagactcgcagtcgcggccactgcagtcacttcgccagttagcccttagggtaggagtcgcgccggcccggggtgtgtggacgccgctttgttgcctgagatgaagttggagcccttgtttttgacattggatcctatactgtgagagctggttatgctggtgaggactgccccaaggtggattttcctacagctattggtatggtggtagaaagagatgacggaagcacattaatggaaatagatggcgataaaggcaaacaaggcggtcccacctactacatagatactaatgctctgcgtgttccgagggagaatatggaggccatttcacctctaaaaaatgggatggttgaagactgggatagtttccaagctattttggatcatacctacaaaatgcatgtcaaatcagaagccagtctccatcctgttctcatgtcagaggcaccgtggaatactagagcaaagagagagaaactgacagagttaatgtttgaacactacaacatccctgccttcttcctttgcaaaactgcagttttgacagcatttgctaatggtcgttctactgggctgattttggacagtggagccactcataccactgcaattccagtccacgatggctatgtccttcaacaaggcattgtgaaatcccctcttgctggagactttattactatgcagtgcagagaactcttccaagaaatgaatattgaattggttcctccatatatgattgcatcaaaagaagctgttcgtgaaggatctccagcaaactggaaaagaaaagagaagttgcctcaggttacgaggtcttggcacaattatatgtgtaattgtgttatccaggattttcaagcttcggtacttcaagtgtcagattcaacttatgatgaacaagtggctgcacagatgccaactgttcattatgaattccccaatggctacaattgtgattttggtgcagagcggctaaagattccagaaggattatttgacccttccaatgtgaaggggttatcaggaaacacaatgttaggagtcagtcatgttgtcaccacaagtgttgggatgtggatttccaagcaagaatatgaagaaggagggaagcagtgtgtagaaagaaaatgcccttgagaaagagttcccaagcttctaccttccttttgtcaccttacgtttcatagctttagtatactcaggaaaagaatgaccatcttttgtagaatgtttatacatttttgcatatttcaatttccacttaaattttttaaagctttaactggctctataaattaagtttgtgctttccttgaaatgcacttattcttattacaagcattttataattttgtataaatgtctattttctctaaatattttgctttcagtaaaatgctttccaactctgtttagtgtattaattaccagtggattggtagaactgctttttattgactagtaaaagttactgcctatgctttttaccttaggcttacagaattaaataaaaattagccattccagaaatatattttggactgttgtgcactgtgattactactttaaggactaaatgtatttctcattattttgaatcaaagtcctccgtttattaacagcaatacccacatcctcttcatagcctattaacaacagaggtaaaactattattcaaattcaaaaactacggtattgcctttgctgtggcagttaccatcaccttcacactctaaggtagcaggtgacatttaaagcctgcttaaatgtcagaatttataaagtgggaatctcatctgaactttatacctgatttttagaagcaaattagcttctaccaaattagctaattagcatgccatattcacacttagaacaactgattagtaaagtcacttgactaaaaacagaatttctttataaaccacttaacatatttactcctgtacacagactattcaagaaaaacaaaatggtaaatttaatagttcagacatcttagacaagacttgacttttgggcttcagcaagatgtggaaacttttttaaaagaatttttgctttctttctctctaaattttccttccgtgctttgatgcgggctcgtttctcacgttccagtctgagaaaatggtccacataaggcaaggcaaagaatcgtttcctattgtatcttttatttaggtgccaaggtataacccactgcttgaacttgtgccagatgattcttccaaagatgtctcttctccaagcaccaggtctagctctttcttgaccagtctgaagaagccttagggcatcttctctttcctggacaactttatctaatgcatccatggaatctactaccttatctaaccgctctggacttggcattggcaatctctgccgcttggcctcctgctctagggttagaagcatgtttctttctttcagtaagacataccaaagtttgtgtaaatcttcattacttttgttccttagttgctgacaggtccatgctgctccagattttactttttcttgcccccagttttttgggtcatcaaaaaattcttctagtcctttccttgacaatgtggtatgaagtaatctatattggtgaaaggatgtcacatttggtgtactcttaggcaacaaactaagagaagacctgcaacccgagtgagcagcgtccttgggatttactagggaacaagctgccttcaggaacgctgaggctcttctacaaatacccactagactggtcgcagccatgtttctaatggagaccgtcagtttcacctaggccagcaan

SEQ ID NO: 22040 - DNA, 420 bp, Homo sapiens
actgatcgtcttgttatcactccattaacagatagatgctatatcacgttagctcaggccttgggcatgaacatgggaggtgctcccgcaggacctgctggcactggcaaaacagaaaccacaaaagacatgggaaggtgtttgggaaaattatgtgggtcgtgtttcaattgcttcagaatcaaatgggattttcagaaggcctaggaaggattttcaaagcaagaaaagaaagaaagaaacagttcattttttctgatggtgattgtcgttgatttaaaatccaggaatttggaatcttcttaacgatgaaccctggatatgctgggcgccaggaactaccagaaaacctaaaaatccagtttagaactgttgctatgatggttcctgatagacagatcattatgagagttaaacttg

SEQ ID NO: 22041 - DNA, 584 bp, Homo sapiens
acgcgggggcgcagctcttagtcgcgggctgactggtgtttatccgtcactcgccgaggttccttgggtcatggtgccagcctgactgagaagaggacgctcccgggagacgaatgaggaaccacctcctcctattgttcaagtacctaaatctttgtctgagattctatttcctctagacagatgcctagaagtaaaattaatgggtcagaggacatatttttaaagcaaggttctggataacataatgctacattactttgcagaattttgtgtcaatatatagatatccactatcactatgagtgtctatttcactgtaccattaccagcactgaaaattactatttttcataaatcatgactttgaatcctagtgaattatactttttcatgtttattagatatttgtatttcctttcataatttttctctttatattctttttagccattctatttgactgaacatatatctcaatatcttcatatctgttgcttcaacttcatttctgattgtaacaccatagtctgagctctccttaccttgctctgaatgatggcatcatgtctgcctggtctgta

SEQ ID NO: 22042 - DNA, 351 bp, Homo sapiens
  misc_feature 347, 348, 349, 350, 351: n = A,T,C or G
tcgctcccctgctcctccttggtggctctctcaaggactccagagttgtatccccaggccgtcttccccgcgtacctcggccgaggtacgcgggggagaacaaagaggaagcagccatgttagcattactgaaggcagagccagccttgcatttaactgcatggtggtagagggcagtgtaattccctggttattctgtaaactatatcaaatcctttttgtctcttctcatttcactaacagaattcacaaggagctagctgaaataacccttgatcctcctcctaattgcagtgctgggccttaaggagataacatttatgaatggagatcaactatactttggnnnnn

SEQ ID NO: 22043 - DNA, 932 bp, Homo sapiens
  misc_feature 445: n = A,T,C or G
tcgacccacgcgtccgatctgtgcctccttcccttcttaaagtagtgatgaaacccatagcaactgtaggagaaagctaccaatatcctcctgtgaactgggctgcacttctctctccacttatgaggctaaattttgctgaataccaagagatatctcctgatatctgcacctctgtggataaaacacatctctgatgaacagatcctgggttttgttgaaaatttaatggtggcagtttttaaagcagcttccccacttggaagggctgagctatgcccaagtgctatacacggtctgagccaggccatgaaactgcccagccctgcccaccacctctggagtctgctctctgaagctactgggaaaatttttgacctcctgccaaataagattcggagaaaggatctagagctgtatatcagcatagcaaaatgcctcttanaaatgacagatgatgatgccaatcggatcgcccaagttactaagagcaacatagaaaaagctgcctttgtcaaactgtacttagtctctcaaggacgattccccttggtgaacctgaccgatatgctgagcgttgctgtgcagcaccgtgagaaagaggtgttggcctggatgattctgcacagcttataccaggcacggattgtgagccatgccaatacgggtgaggacaccctggggtgaacatcagaaacaggaatagatctgcctgctgttgcttttaagttgcacttgagttctcaacttaaaaattagtttagtgcttattgacacaggttaggccttctggtgccaaatgaggagtaacttggatagaaattaacagttatagctcacaacatccactttttggaaatgaggatggattctttcgaggggtttttgttttctatttggctctgtagaccctcacagttacaaacaagtta

SEQ ID NO: 22044 - DNA, 1559 bp, Homo sapiens
  misc_feature 1: n = A,T,C or G
nagccccccacagggaagggccccgctattttttcggtgttgccaaaccccccgcctcttaaaagatttggctaatatactgggataatcccaagcgaagattaagttgcccctcaggacctgaagctagtttgatgccaccaaacgtcagataatggactgtaattcatctgccatattgatcaatcatgtttatttaaggttttcttaacattagagatttttaatgggagtataaaattagtaaacaaccatttcattttttctctcttcctattctagccacataagccagtttaatccatgacacagatttcagctgtaatttgcaaaacaatccaagagctaccacagtccccaaaactacagaaaactgccatccacaaataaactaccaaggtaaatgtaaatacagcgtggttctaattttctttcacacaatcccagacaaccccaaataactttataaataccttatgaaaaaaagcaatttaaaaacctatcaaatctatttaaaatatataaatgcagacctctcaaatttccttcaatcaggccagaaattatcacaaaaattataatcacagttacaaacagaatgagtggaatgtttgtaagtttaggacaaccaaaaaagccccatgtaactttttaaaaatataatcattcactcaaatatactgtaaataggaatggcagtaacacaggaagcaaaaataaacttgcaagtgaaatttctagaagctcatgaaaacaataccatcccatattgcagatacaaaaggaaaaacagttctaatggggttaagagtactctggtcatcttcgttcgtttggtcgtgcaaggtgttaactattttcacttcccatatcacaaagttagtccacaggaggagctggtggatcttgtccattatgaggactggttggctttccaggtaggctggatcctcttagattaggaggtctcagtaagaacaagatcaatgcaataaccatccaggctaccaagatcattgtaacactgatgccattatcaccagagggtcccggtaattcctgaagacactctgtgtctgtgcagtaggactgggactgccgtaacagattgatcagtcttctcattgcatgttcatgagagcaaacacattcacagggatcaaatccaccttctgccatgattacccagcttgattttacttgactgtttaaatccgcccagacaacaaccgatggggcggggaggatgggggccgggaccgaggctcggcagaaagaccgcctggagcttccagaaggctgcggctgctccggacgctgctgccactgccgtttctggccgccggcttcctccccctcctctgttttgattcgagtgaccacgtcactcttagccacaagacccggatctgccggctcccgcgggcggcggcgcaacagattgcagcgcctggagactccagctgccccgcctgccgagcatgcgcatgcccagcgcctgccctgtgcgtcccgggaagccgggcgggagcctgcggcttccggacgcgtgggtcgac

SEQ ID NO: 22045 - DNA, 342 bp, Homo sapiens
acaaagctgaaacgcagagattttcatattatttgggagactcagaaatgagcttttaaggttgttccttgacttgcgggtcaataagcgcacaatggtgaagaaaaggctgccttctagtgacacggtgttccggtttgagactccgggcagcccaaggaaggccaacgtggaggcctcacgcagctccacagacagccccagaccagaagaaaatcattagcctatggtcaaaatccagttttgatggtgcctctttagcaagtgataagaacgactgtaaaacagaaagcaaaaatgaccctaagactgaaagaaaaaagtcttcatcttccagccagt

SEQ ID NO: 22046 - DNA, 745 bp, Homo sapiens; identical to SEQ ID NO: 20943
  misc_feature 1, 2, 3, 4, 5, 6, 7, 8, 9, 10, 11, 12, 741, 742, 743, 744,745: n = A,T,C or G

SEQ ID NO: 22047 - DNA, 745 bp, Homo sapiens; identical to SEQ ID NO: 20943
  misc_feature 1, 2, 3, 4, 5, 6, 7, 8, 9, 10, 11, 12, 741, 742, 743, 744,745: n = A,T,C or G

SEQ ID NO: 22048 - DNA, 623 bp, Homo sapiens
  misc_feature 1, 2, 3, 4, 618, 623: n = A,T,C or G
nnnnacgtgacactatacaagagctatgacgtcgcatgcacgcgtacgtaagcttggatcctctagagcggccgcctactactactaaattcgcggccgcgtcgacagagaacaaggtgttcatgaggaagttcaagatcgggtacagcaaccacggctcggactggaagatgatcatggatgacagcaaacgcacggcgaagtcttttgagggcaacaacaactatgatacacctgagctgcggacttttccagctctctccacgcgattcatcaggatctaccccgagagagccactcatggcggactggggctcacaatggagctgctgggctgtgaagtggaagcccctacagctggaccgaccactcccaacgggaacttggtggatgaatgtgatgacgaccaggccaactgccgcagtggaacaggtgatgacttccagctcacaggtggcaccactgtgctggccacagaaagccacggtcatagacagcccatacaatcagccaggctggaagtttccacattgaacctctcactccataaccctccccaacaaaaggcattgatctaaaaacatatcctttaaataatagaatagaaacatagtgagncaagn

SEQ ID NO: 22049 - DNA, 1063 bp, Homo sapiens
acccagggacacaaacactctgcctaggaaaaccagagacctttgttcacttgtttgtctgctgaccttccctccactagtgtcctatgaccctgccaaatccccctctgtgagaaacacccaagaatgatcaataaaaaaaaataaaattaaaaagaaaacaacaacaacaacaaaaaaaagtcctcccataaggaaagatgatcaattcttatgtatcgttctagggatataaatattcaggaggctctgaaggctagcaaaccgagcgatcatgtcgcacaaacaaatttactattcggacaaatacgacgacgaggagtttgagtatcgacatgtcatgctgcccaaggacatagccaagctggtccctaaaacccatctgatgtctgaatctgaatggaggaatcttggcgttcagcagagtcagggatgggtccattatatgatccatgaaccagaacctcacatcttgctgttccggcgcccactacccaagaaaccaaagaaatgaagctggcaagctacttttcagcctcaagctttacacagctgtccttacttcctaacatctttctgataacattattatgttgccttcttgtttctcactttgatatttaaaagatgttcaatacactgtttgaatgtgctggtaactgctttgcttcttgagtagagccaccaccaccatagcccagccagatgagtgctctgtggacccacagcctaagctgagtgtgaccccagaagccacgatgtgctctgtatccagaacacacttggcagatggaggaagcatctgagtttgagaccatggctgttacagggatcatgtaacttgctgttttgtttttcctgccggtgttgtatgtgtggtgacttgcggattatgttcagtgtactggaaacttccattttatcagaatctgtcatgtgaaagctgataagagagtttataaaaaaaacaaacccgggcctctattcggggggggaaacggtaggaaggcctggctcacgtttccgacccttctgtcaaggggaatcgcggcccatggggggg

SEQ ID NO: 22050 - DNA, 1086 bp, Homo sapiens
  misc_feature 1, 2, 3, 4, 5, 6, 7, 8, 9, 10, 11, 12, 13, 14, 15, 16, 17,1082, 1083, 1084, 1085, 1086: n = A,T,C or G
nnnnnnnnnnnnnnnnnaatttgtaggaaaaagcgaaagtgtgaatgaggatacatcgaatcctattttaacttagacagcaagacttggctaagagtcgccaactctgttttgtcctattttgctcagttctttgcatggccttctatttctgtgccccaccatggggttacacccctaaaacacattggcccagcatgatatgtgtgctggcttgccagccaagtggcccgaagctcctcttgagtgcactgcagtacaaccacttgacttgctctttaacatagtcctgtgagatgccagctgccatgaccaagcagtattcccactcctcctctacactctggcaaggctttcctggaacatccccatgcccacatctttacccagtaactcactaaagccactcttgactcaagcaggtgccgttccttgatcacggaatctacctttgatttcatcaggccagattcacaaacagaatgggagtgctttatctatacctttgagaggatggagagtgaaataactggaaacactgggttatcacagcttaatttcatccaggcttggtgtctttaccaaagatggttggggaaaggaagggagattcatcttgttcaggcagtgatttgctcagaattttacaagacataccctatacagacctatttgaattctactgtgggtttattgaaccagtgttggaacaacttcgcaaaacagaccaggccagttaggtacagcctcatgagttggcaggtagcagcagcccgtgtcttccctaagatgacattccctgcccaaaacacttctgtgaaaagtacagaataaacagctcagagaatacagtgtaagttacccgcagaaatatagtacttctttctagaagtttacaaactgtccatgtttatcccttgccatatagcaatcactactattagtgctgtacttaattatttgtttatctgatttctaattgttaatgcttcccccaaatattgtgtgacatttgtaattaataaaaatcacttaacgataaattaataagcagttcatatttatatttttacttaattacnnnnn

SEQ ID NO: 22051 - DNA, 970 bp, Homo sapiens
  misc_feature 116, 970: n = A,T,C or G
acctgcctagacaatcacagtgctgggacccctgcctggcaccctctggctctgagcctcgcactcctgaccgcagctcagtcccacccacctgctcagcaagggcgtccccagcnaagggcacccagaacccgcatgtgtagagagactctggcagggctgatggagcgacaggtcggggtttctctaacaagcactttcctggaaacttcattttaacatgttcccatctccctcagaaaaagggcatcgagaagaacctgggcatcggcaaagtctcctcttttgaggagaagatgatctcggatgccatccccgagctgaaggcctccatcaagaagggggaagatttcgtgaagaccctgaagtgagccgctgtgacgggtggccagtttccttaatttatgaaggcatcatgtcactgcaaagccgttgcagataaacttgtattttaatttgcttggtgatgattactgtattgacatcatcatgccttccaaattgtgggtggctctgtgggcgcatcaataaaagccgtccttgatttgtttttcaaggtcccttctgtaaatgctgtgctttcttccctgtgagagccaactttagagtgtctgtacctcttcattaccaatcagaattagatgatgtctaactgttagactgaagcgtgacgctttcatcagtagctcaagaaagtctaaattgtcatttatggatgcacacagtatcagtttaccgtacatgtctccggcctctgtggacctgattgccagcgattctctggggtagtcacccaggctaatcaagggatgcagaagttctgtgaaaaggactttattgctcctaggctgcccgggtttttgacaacggtgttgggaaccaacatggaccaggggtggtggaacacccggagcacggcagggctcaccaattggagaaattgcctggcgccctggggtatgaaataacn

SEQ ID NO: 22052 - DNA, 455 bp, Homo sapiens
acgcggggggggctgggcttcgtgtcctgcgttccgggagcgccaacccctccagcagaggggacgtggctggtggctggagaagctggatttgccctttgatggtggccctcttgatccccggcttgctgaagtcaaaggagaggctgtcgatgctgaggcacgagagaatttgctcctgctcctccagagaaaatggctgggacaggctgttgaggaataattctgcagggaaaagtggaagatggctgtgaaagactgggaggaggctggctgtgttttcaggggttcttcctgcacagtcggtagaagctgagctgctggggaaggggctggaagaaagcccacaccgcaggtatcagtagcaaattcaaaaactacagaatcagctccagaggactttgttaacaagaaagagaagattgaaaacagccctggggctacaccaactcaag

SEQ ID NO: 22053 - DNA, 1321 bp, Homo sapiens
  misc_feature 1, 2, 1320, 1321: n = A,T,C or G
nnacagtgagacctgtctctacaaaaaagtatttatttatgtttttaattacccaagtgtggtggcatgtgcctgtagtcctagctgcttgggaggctgaagcaaaaggatctcttgagcccaggagtttgaggttacaatgagctatgatcatgccactgcactccagcttgggcaacagagtcagaccctgtctctaaacaaaccaaacgaagccaaaatgaattgtataatttaaaagggtgaatcttatggtatgtaaattatatctcaataatgctgttactctaaagaaaaaaaaggtcatcgacatgattatctactactcacatgctatagaggtcaattaataccacttgcaaatgagcaaggaagaagaaaggtttatttagccaaagagaatctgagaatcttgatactaagaattgctaattcatataatggcttagaatagttttacttcatactgtgatcaataatggattagctactttatccttatctaggacaaattccaagcataggcagctacagtctgaaaagaattattataagctagaatttttctaagaaaaagatttgttctcaggaatacgaaaatagatacaaggaactgacccagacatgacaataagtctaacaaagttaacactagtaataatgtgtcagataaaaggtagaactgagctaaaaactcaaactttaaaaatgtacagcaaatcaatacccagaagtaaaagagtcttgaatgttctagttcattcttctctccattttaggtactctcttaatggcatttttatggtaagttgagttacctcagaacctgccgtgcccctcctggatgcaccaggaaagtcacagatgggaaaggacactctctcacagcagctttgctccagtcaccaagcccaacactgcgaaccataaagcagcacacagggacttctttacaccaaaggggcccgatccagcccttccttctgtgcctgccacttccgggttggtgctttacagcgcttgaagggagaacaatgttctgtagtctgcaacacactccagaccatgttgacgctatgatcactatgtttgcatgattgcatagagcttaaaagaagaaacagaacaccaagtttcttgcactgaattcacatatgaaaactggaagagcacaactgttagttttcaaggtctttggctaaagcttcacgaatgaattgtaaagtacgctggtacaaaaaagcatcctttttctttggcttacaaatgttcaaatggttaacatccacaggaattagatctccaatgcctaaatctgcnn

SEQ ID NO: 22054 - DNA, 2111 bp, Homo sapiens
  misc_feature 1, 2, 3, 4, 5, 6, 7, 8, 2111: n = A,T,C or G
nnnnnnnncggccgccaggcgcggtccgtcaatggctctcctcttggggctgtgtgctctgctctcttcccccgcaaggggtcacgcctagtggaccccgttccctcgactgtaacgcgccgtgatgatcgctccttagcgattggtccggccccctcggtcttttttttccctgtgaaaaaaaataaatctattttcttgccttccagggcagccaaccagtcagaatgcctctcatttaggcctgcaagtcccatccaagggaaatgtgtggagatgcaagaaggcaacaccaaggggaccttatcaatagccctgtcccctgcccgcctccaaagtcccccaacaaagtatgaaggaagccccacctgggggtctccaggaagtcgaggctggcctctgaggttccacagaaaagcaagatgggggagtgaaggggccggctggaacttgatgctccaacctccagagtttcgaggcacagcaagacaggttcagtaatgtccttccctccagagagcgggccttaatttatggactggtactctgagtacttcttgtggtgcagcagcagaaccaagccgccccctagcagcatgagccctggggcacccagggccactgccatgatgcccaggactagtggggacaagccgtccactggagggaagcccacacccaggagcatcgaccagctgaggtagtgttggtcccaatagccagggcctgtggaagccccgaacgtcagattgaaggcacagaagttattctgggacccaaagaaggctcggacaatgggtgactggggaagagagtatgctaaggcaggatgaagaggggaagcttggcagggcagggctgattctcggccccccggcttctgggagtaagccactggtcgccactgtgcaaagcctgatgggagggagccccacagtagctggtccaactggaagacggccggtgcatattcatcgtcgatggagtgctgtcctacagtagaggggcagccagcccggcccaatgtggttactccagcccaaaagggaagagaccaagaaaggcccatagggaacctcacaacactctagctgacaggtgtctgctgtgtgcaggaggcgagggggttgggctggtcggctggacctggaaaaggcctggaccctgaaggccaggctgccattggcaaaagtcctggtagggtcgttcatggggtggccttgaaatgtggcactcagggtggcaggatccaatgaatcagtgatgttgttccaagagaaatcggccaaggagtatggaggatatggtcttcccaaaggctttgctgccgtatcggacacgttggtgctgtcaaactcaagcagcctggtaaaaacaagggcagaagaaaactgaatgctgtccttaggggatagcaggaggctccagttgacgctcagggtgctgtggggggtgttggtggccaccattaccactgccagaggccccaggctgctccacacatagtgcagtgtggaattggtgcccactgcccgtatatgaagcaggttctgcagggggcccagccagttagggatgacctccagagacacctggaacatggagtagtggagggttgagggaacaggaccaaggagagacacaggcaaaagagaagcttgaggggaggggggcttggaaagtgctggacaaaggatgggattttggggactagacaagaggaatgtgtgcgggagctgagggaaccctggggtaaggggcagtggggacaggatgaaaaggggtagggtagagggtacagccaggactcccctgaccctggtgggcgggtcagggcacagggctgcgaagaagaaaacattcaacacttgcctggacctgggtcacccagggctgagtcggggtccagacatcaccctcacatttgccctactccacaatcccgtcccatgacccatgaccatctcccacaccctccaggttgaagaaccctcctcttggcagccaccctccacccctagcccctggatgcccggttccagccaccctgcaagggtagcgtttcctgaaacttctatcgctgcccacgcgtccgcggacgcgtgggtcgn

SEQ ID NO: 22055 - DNA, 4646 bp, Homo sapiens
  misc_feature 1: n = A,T,C or G
ncacagtgagcggagcgcctgggcggcggcggcggcggcgtgatggctccggccgcggaccgagagggctactggggccccacgacctccacgctggactggtgcgaggagaactactccgtgacctggtacatcgccgagttctggaatacagtgagtaacctgatcatgattatacctccaatgttcggtgcaattcagagtgttagagacggtctggaaaaacggtacattgcttcttatttagcactcacagatggagtctcactctgtcgccgaggctgaagtgcagtggcacaatctcggctcactgcaacctccatttcccgggtttacgcgatccttctgcctcagcctcccaagtagctgggactacagtggtaggaatgggatcctggtgcttccacatgactctgaaatatgaaatgcagctattggatgaactcccaatgatatacagctgttgcatatttgtgtactgcatgtttgaatgtttcaagatcaagaactcagtaaactaccatctgctttttaccttagttctattcagtttaatagtaaccacagtttaccttaaggtaaaagagccaatattccatcaggagtctcactctgtcaccccggctgaagtgcaatggcacaatctcggctcattggaacctccacctcccaggtcatgtatggaatgttggtctttacattagtacttcgatctatttatattgttacatgggtttatccatggcttagaggactgggttatacatcattgggtatatttttattgggatttttattttggaatatagataacatattttgtgagtcactgaggaactttcgaaagaaggtaccacctatcataggtattaccacacaatttcatgcatggtggcatattttaactggccttggttcctatcttcacatccttttcagtttgtatacaagaacactttacctgagatataggccaaaagtgaagtttctctttggaatctggccagtgatcctgtttgagcctctcaggaagcattgatgaatcattccaccaagaaaacaaacaagcacctaccatagacctggcagaataaataaggaaatccttaaagatctacaagttcaaatatgtcatgaccatcacagcagaggagtgactttctgactaatgctgccacccacacagagaataaggagtagggcctgctgggtgtttagctcatggctttatcttatttgtccccctcctcctttcacgctccagtttataaagaaacagagatgatgtgtgtgtatgcctcaaatgcagaaacagttgggcttttcttaacaggttaacagtttgtgctggttataagaaattaaccttcttttctttttgccaagggttgcatgtgaattatacctttcttaatatttgattaaataatgcagtcagctaagagccaacaaaaccccatatccagatagttagctgtgagccagcactcagctgtgtcagatttgattaatattgtattaatctcatggatggttctcaaaggtaaaaaaagagagagaaagagagagagctagctgtgggattctgtgtagttcttcactatctgttccagggctagtcggaggatcataagcaagctcagacctgcccccagttcagtacttgaccacatcccaggatttatggtgtctgtctatggccacagccaaccagaatgagtgggtcatcttataacctttctgaagctccatgaggacatgtatagaatgctgcaccttcagccagctctgctctgatctttgcagatctttaagttgtcactgtttctacggctagacaaatatgactggtggtctagactacccatagttcatcctcctcacataacttatttgaagttgtcagggaatgtcattacactctgatttttaaaattatgcagtattttccagttctcagagaggtcatggttgtacccagggaagtgtgttgcattaactaaagctaaaattatcagaatcctatttacataaagcatattaaaatatctgctccttaattttctgaaggaaatagatgtaagtttctgctacttgaaacctacagaaccgacaaaaattagggtgctaaaaaaatgacagtgaaatctcatcgtaaggcagctagttctaatttgcatttgaatgtataacaaattgcatcacttttcacaaacttaacacctgcctggagtaaaaatctgatttgacccctctgctcatgtttcatcatatttgtagctctgcatcatttagcatttttatgactttttttgctttatataaattattgtaaaatccagattgtttttaccacatgatgacgtgactcaggattaaatcctgagctacagtttcaaaaggaaaatcatttttttcttatgcaaagatggtaaaacactgttgtcattttttccagtattcaataagtagcctttgtacaaatttaaaaccaaaaactattctgttgtttttcttcacctactagccttagtttttaaccaagtatccaaggatgtcaacttgacatccttcccttagcatgccaacaagccattagactgattcttccacctacttttatgaacctccaggaagaaaaacacttgccaaaacattaagagaactttgattctgccttaagagggtatagaactaaaccatttgaaggcacagcccataagactatacttgattttgccccaagattctgacttctggctacatttcacctgcagttacctgggctatcggccgtgatacattttttaattcatttgttttccaccattatatttttatacttttcagttagatatacttctgcataaagagtatatatacagtgtaggataaaggcatatcgtacatggcaatgctgttaaacatggtaagactgaggttctgcaggattaaagtcagattaagggtacagaaagcacaccttgatactgaggccatttagagcaatttgtttaatgagtggttcagccatcaccaccagtggccacctgttcaataaaattgcctagcaccacagtggagagtcatctacaccccaaggtgagctgtaagactggccaattctttgaagacctttttttctgttgggagaatggaaagcagaaagggaagccaggctctttaatgttccaagtcagctgtgcctcacacaaggctctctttttagctactaagtaacatactcaagactttgtatctgtgcagcattttatggaaatcactggtgacctataggatattactaaattatttcaatagctttatttttttcctacttggattctaggtggacattacagagttgaattcctcactaccccctcccgctgtcatttgttttattggaaaacttcatgttaactagagtgtacaaaaagtctgtttcctgctgagccaatagtgatttgtttgcatatcacctaatgtgaaaagtgctcatctgtgaactctatagcaaattatattttagaaaatactttgtgaggccgggcatggtggcagagcgagactccgtctcaaaaaaaaagaaaagaaaagaaaatataaggatgtaaaagaagcaatttgcttgcacatctgaatatccttcttgtgtctccattttcactcttgaaaactgaaagcaatttgacttttatttttgtttttctaaagaacagctaggtgaaaggaggttaagctgattgtcactctgcctgcccactacctactccccaccatggtgtttcatgaaacatccccaccacctgaagtgatctttttaatccttgtgatagtaaatgcattgataattaacaggaaaaacatgtttttaaataatctacaaatgagaacccaaatggtagtgttttgtttgacagaagtaaatcaaatattatggtttaaatataatgcaaaatttcaggacagttaatttgggcttcccttaccctaagagggtttttcttataataaggagaagaggtgtggttcaaagaaaattaagagacaaaaccttcaggtacataatgcatgaaaatctttaaatgcctgcaaaaattaagttctgttataataccagccaattctgaattagccaatgccctaaaagcatctaacaatttaaggttatcttatgagtcctatgaaaacaattatttgttgctaaatttgagttttagctaccaacgccatgtttacgtgacaagaaattgttttggccctgtggtttatgacgtgctgctggataagcatttatgtaaaactgagtatttcaaagagaaccatttacaattggaatttccacctgtgtggctgtttgcagacctacctctgtcttccattttgcatcctgtcagtgctataattagtttgatcactttgtcttgtttttcagtgtctacaattatagcttattcactatgttctaactatttaaaaataatgggccgggcgcggtggctcatgcctgtggtcccagcactttgggaggccgaggtgagcagatcacaaggtcaggagatcgagaccatcctggctaacacagtgaaaccccgtctctgctaaacatgcaaaaaaattagtcgggcatggtggcgggcgcc

SEQ ID NO: 22056 - DNA, 1548 bp, Homo sapiens
  misc_feature 1, 2, 3, 4, 5, 6, 7, 8, 9, 10, 11, 12, 13, 14, 15, 16, 17,18, 19, 20, 1548: n = A,T,C or G
nnnnnnnnnnnnnnnnnnnngggaaactaaggccattcgttttgttttggtgtcccctttgaagccctgccttctggccttactcctgtacagatatttttgacctataggtgcctttatgagaattgagggtctgacatcctgccccaaggagtagctaaagtaattgctagtgttttcagggattttaacatcagactggaatgaatgaatgaaactttttgtcctttttttttctgttttttttttctaatgtagtaaggactaaggaaaacctttggtgaagacaatcatttctctctgttgatgtggatacttttcacaccgtttatttaaatgctttctcaataggtccagagccagtgttcttgttcaacctgaaagtaatggctctgggttgggccagacagttgcactctctagtttgccctctgccacaaatttgatgtgtgacctttgggcaagtcatttatcttctctgggccttagttgcctcatctgtaaaatgagggagttggagtagattaattattccagctctgaaattctaagtgaccttggctaccttgcagcagttttggatttcttccttatctttgttctgctgtttgagggggctttttacttatttccatgttattcaaaggagactaggcttgatattttattactgttcttttatggacaaaaggttacatagtatgcccttaagacttaattttaaccaaaggcctagcaccaccttaggggctgcaataaacacttaacgcgcgtgcgcacgcgcgcgcacacacacacacacacacacacacacacacacacacacaggtcagagtttaaggctttcgagtcatgacattctagcttttgaattgcgtgcacacacacacgcacgcacacactctggtcagagtttattaaggctttcgagtcatgacattatagcttttgagttggtgtgtgtgacaccaccctcctaagtggtgtgtgcttgtaattttttttttcagtgaaaatggattgaaaacctgttgttaatgcttagtgatattatgctcaaaacaaggaaattcccttgaaccgtgtcaattaaactggtttatatgactcaagaaaacaataccagtagatgattattaactttattcttggctctttttaggtccattttgattaagtgacttttggctggatcattcagagctctcttctagcctacccttggatgagtacaattaatgaaatatcatattttcaacggcacctggagagtccttcccttggggcctggtcttgaagggtgggggggttcggggagtccctgctcaaagcgccagctttgttggtcagctgggaccacgacgggcactacaccccacgttgtgtttgcaaaggcctgcttgtcattcgatcagaagggacctcccgcgcttgggttcgctccaccactcacacctgggcgttggccacacttttctcaagtatgggttctgccacgctgggcctgtgtttccgggcaacgtgtggcgctatgacttcgcaccggcn

SEQ ID NO: 22057 - DNA, 780 bp, Homo sapiens
  misc_feature 1, 772, 773, 774, 775, 776, 777, 778, 779, 780: n = A,T,C or G
nagttgcagtcctcttcaagctgttatcataagtacagtagtcagctacttggatatcaagactaagtgctgatatgaagacttgcctttgtgttttgttatgaaacacgcaagcataaagcaggactcaagcacaaggctgactgttctactttgaataacagcttccttgcagtctcctccacatgggtggtactgtgtttagaagggattaccaaaggctggagcgatttaagctatgcactagccttgccctcttaggttgcattctctttaggccactggttctcaaacattagggtgcactgtaaccattacagagcttgtgaaaagtgcagaaacctgagcctcaccttatgagattctgattcagccagggggaggacaggaatctgtatttttcatagcaacctcaagtaatctttattctgagggtctcgggattgcaggttgaaaaacacaaccttaatcagcagtaaattcttctctactcggccaggcgcagtggctcatgcctgtaatcccagcactttgggaggccgaggtgggtggatcacaaggtcaggagttcgagaccagcctgaccaacatggtgaaacgccatctctactaaaaatacaaaaattagccgggcgtggtggtgctcacctgtaatcccagctacccaggaggctgaggcaagagaatcacttgaacccgggaggcagagggtgcagtaagccgagattgcaccactgcactccagcctaggcgacagagcgagactctgtcnnnnnnnnn

SEQ ID NO: 22058 - DNA, 1884 bp, Homo sapiens
  misc_feature 1, 1870, 1871, 1872, 1873, 1874, 1875, 1876, 1877, 1878,1879, 1880, 1881, 1882, 1883, 1884: n = A,T,C or G
ncgcctgtgggaggcgcgtccgggtgggcggaactcctagcggacacctcgtggagtccggccggaagagcaaccgagatgaaggtgaagatgctgagccggaatccggacaattatgtccgcgaaaccaagttggacttacagagagttccaagaaactatgatcctgctttacatccttttgaggtcccacgagaatatataagagctttaaatgctaccaaactggaacgagtatttgcaaaaccattccttgcttcgctggatggtcaccgtgatggagtcaattgcttggcaaagcatccagagaagctggctactgtcctttctggggcgtgtgatggagaggttagaatttggaatctaactcagcggaattgtatccgtacaatacaagcacatgaaggctttgtacgaggaatatgtactcgcttttgtgggacttcttttttcactgttggtgatgacaaaactgtgaagcagtggaaaatggatgggccaggctatggagacgaggaagagccattacatacaatattaggaaagacagtgtatactgggattgatcatcactggaaagaagctgtttttgccacatgtggacagcaagtagacatttgggatgaacaaagaactaatcctatatgttcaatgacctggggatttgacagtataagtagtgttaaatttaacccaattgagacatttctcttgggaagttgtgcatctgacaggaatatagtactgtacgatatgaggcaagctactcctttgaaaaaggttatcttagatatgagaacaaatacaatctgttggaaccctatggaagctttcatttttacagcagcaaatgaagattataacttatatacttttgatatgcgtgcactggacactcctgtaatggtccatatggatcatgtatctgcagtgcttgatgtggattactctcccactgggaaggagtttgtgtctgctagtttcgataaatctattcgaatctttcctgtagacaaaagtcgaagcagggaggtatatcatacaaagagaatgcaacatgttatctgtgtaaaatggacttctgacagcaagtatattatgtgtggatctgatgaaatgaacattcgcctgtggaaagctaatgcttctgaaaaattgggtgtgcttacatcacgagaaaaagcagccaaggattataaccagaaattgaaggagaaatttcagcattatcctcatataaaacgtatagctcgtcatcgacatctaccaaaatctatctatagccagattcaggaacagcgcatcatgaaagaagctcgtcgacgaaaggaagtgaatcgtattaaacacagcaagcctggatctgtgccacttgtgtcagagaagaagaaacacgtagtggcagttgtaaaataattggtattcctaacaatcctgatgtataattatttgttacttttgatttgagaactctacaaataaaagtgctgggactagattaattgcaaacattttagttatatgtgtagagctttattgttactccttttagctaccctgaaaaatgatccttaaaggtggcctagttggtaagactgttttatccttaatctgcattcttctttcattgtagaatacagtatttgcaactcattttttcttgtttttattacagatatacttactttctcttgatctatatggtgaacctatacattcaaatgagcttagaacaaatctctagttactttaaaattactgaatagatgcgaggtttcgggatcccctacattacaagggggatttgacagaattttaaggctaaaaaggggggataacaaaaggataattaaaaaaagggggaataagnnnnnnnnnnnnnnn

SEQ ID NO: 22059 - DNA, 690 bp, Homo sapiens
actccaggccatggggagtccctgaagactcgatgaactgcaatggccatatcaggaggttgcaggttgaccagaactcaccgacacagcaggagagcagcttggaaccttcaacccagccagacccagtgccttggactgggggagaaaacatgcagccattcctctctctctctgctggctagaggggattctggcttttcctgccagagccacccctttccctcctcctaaagttgatggtggttctttaaggaaagggagaagtgcacggtgtgatagggcgggaagagaagaaaacggaggagaagaggggacttttcccataagcaggcagaagaaacggcagctgtgttgtgtgatggacatggatgcagcggtgtccaatgtggggtcagcccacttagtgagcattgtatccactcaggggcctctgtgggcatccgtctcctctgcagcatctttcctccccacagctgggtctgcacatgaccccctccttgggttaggcctctgatcagtgatgacctatgcgtgcggccactgttgcaagacgttcagctcaaggaaaaacgacaccaagcacatgttcatccactcgggggagaagccgcaccagtgcgccgtgtgatggcgatccttctcgctgcgctactgccgtttcaagcccccgcgtacctcggccgccac

SEQ ID NO: 22060 - DNA, 2129 bp, Homo sapiens
cgcgcgccgctctcggtcgcgcggagtgatcgtgtggaatcgcgggtcgcggacgctcgccgccggccatagctcagcctagcgccgccaaggccgacggccctcagcctctgccatggacttcgaggacgattacacacactccgcctgcaggaatacttatcagggctttaatggaatggatcgtgattatggccctggatcttatggagggatggatcgtgactatggccatggatcctatgggggtcagagatccatggattcctacctaaaccagtcatatggcatggacaatcacagtggtggtggtgggggtagcaggtttggaccttatgagtcttacgactccaggtcttctctgggtgggcgagatctgtacagatctggctatggttttaatgaacccgaacaaagccgcttcggaggtagttatggtggtcgatttgagagctcctaccggaatagccttgactctttcggaggtagaaaccagggcgggtctagctgggaagcaccttactcccgttcaaaattgaggcctgggtttatggaggacagaggaagagagaattactcttcctacagcagtttttcttcaccccatatgaagcctgcacctgtaggctctcgggggagaggaacgcctgcttatcctgaaagtacgtttggaagcagaaactatgatgcttttggaggaccatcaacagggcagaggccgaggccgaggacatatgggtgattttggaagcattcatagacccggaattgttgttgactatcaaaacaaatccaccaatgtgacagttgctgctgcaagaggaataaagagaaaaatgatgcagccatttaataagcccagtggaaccctttatcaagaaacccaaactagcaaaacctatggagaagataagcctcagcaaatcacccacaaaaactgatcctaaaaatgaagaggaagaaaagcggcgaattgaggctcggcgagagaaacaaaggcgcagaagagaaaaaaacagtgagaaatacggagatggatacagaatggcatttacatgttcattttgtaaatttcgaacatttgaagaaaaagatattgaactgcatctggaaagttcttcacatcaggaaacattagatcatatacagaaacaaactaaatttgataaagtagttatggagtttttgcatgagtgtatggtgaataaattcaagaaaacatctattcgtaagcaacagacaaataatcaaacagaagtagttaaaataattgaaaaagatgttatggaaggtgttactgtagatgatcacatgatgaaggtagagacagttcattgcagcgcttgcagtgtttatatccctgctttacatagttcagttcagcagcacttaaaatctcctgatcatatcaaagggaagcaggcttataaggaacaaataaaaagagagagtgtcttgactgctacaagcattttaaataatccaatagtgaaggcgcgatatgaacgttttgttaagggtgagaatccttttgaaattcaagaccattctcaggatcagcaaatagaaggagataagcctcagcaaatcacccacaaaaatgatcctaaaaatgaagaggaagaaaagcggcgaattgaggctcggcgagagaaaccaaaggcgcaaggaagagaaaaaaaccagtgagaaatacggagatggatacagaatggcatttaccatgttcatttttcgtacactttccgaacatttgaagaaaaagatattgaacttgcatctggaaagttcttcacatcaggaaacattagatcatatacagaaacaaactaaatttgataaagtagttcatggagtttttggcatgagtgtattgggggaattagatgcaaggaacaacattttatttcgtaagggcaaagacaaattattccaccagaaagtagttaaacataaattgacaacgatgggttggacgtgttctgtggatgtcacttgtggaggttcagcagttatgaggttggcagtgttaatcctgttattattagtcagggctaaactctggacttcaaggaaccggttagaaataagaagggttgggtatttaatacagggcaaattgcgggaac

SEQ ID NO: 22061 - DNA, 1335 bp, Homo sapiens
  misc_feature 1, 2, 3, 4, 5, 1318, 1319, 1320, 1321, 1322, 1323, 1324,1325, 1326, 1327, 1328, 1329, 1330, 1331, 1332, 1333, 1334,1335: n = A,T,C or G
nnnnnaagcttggcacgaggcctcgtgccaattacagatgtgaatggccacgcctggcctgtttcctttaagttagcacttcacgtgctcttacagcgttaattgccattattggtttgcctgattttcctgcatctcctcatatgtaagtctgcagcccaaggagagaatagtagctgtatgtgcccacaaggggtgtccaagcttcttgattcttgttaatatcgactccccaacattgaaaaaggagtgaagaagggaatatcattttagggtactgctttaaaggaatgataaagtaaacaacgtagcagggaaaataccacttgcacaaatgtatttctttgtcaaagtgtgtacacgctttctgtttgtcctgatgtcctgctgtgaagcagggaccacattgccatttattcattgttccaggcaatgcatttgtccaaacccctctggctctctgatatctctcatttcttgatgttcctattctctgacctcaacaaggaggacactgtctgttgtgtctctttgagactagaactccatgtgtttaaccttcagatccattctctacatgaaccctattctttccaccctggtaagaaggtctggaagacaggtcctaacgaggggtcagagaaggcacagagaaatgaaccagccatgcaggggcagcactgaggaggaaaccccccactctaactgggaggagagtggaaacactcttagtatctcagagtagttaccaatctaagagcatccttcgagtttaagtcaaaactctaggcttaataccaaaaataatacatcatttggaaaaatagcttggagaaaaaaaatcaataaagagtcacataaaatcttaagaaaatggttctattctgtgatatattactaagaaatacagttcttaaacgtgtataactattgtcagacaatttataggtgtttcatctagtcctgggatgaaatacgatgactcatgcaaattcagggagcacactggctgactttaaattggaacattgtaaagtgaaagctgtgaaaggttgtgtgtcctatcaatgagatttattttctaaccaagagctgttcggatgattcagtataaatacgaaaatcacatccaaaaacggtataacccagcttccttaaggcaattttcttctctgaaacaagaatatactcatatgttctttactataatgtatatgatttttatcttgtactttaaaagatgataattatgcattgtatatacgattgtgtgccttgcaataaaatcaaaactgtacctgctgaaaatcacaacagnnnnnnnnnnnnnnnnnn

SEQ ID NO: 22062 - DNA, 634 bp, Homo sapiens; identical to SEQ ID NO: 21681
  misc_feature 1, 2, 3, 4, 20, 40, 617, 618, 619, 620, 621, 622, 623, 624,625, 626, 627, 628, 629, 630, 631, 632, 633, 634: n = A,T,C or G

SEQ ID NO: 22063 - DNA, 1335 bp, Homo sapiens; identical to SEQ ID NO: 22061
  misc_feature 1, 2, 3, 4, 5, 1318, 1319, 1320, 1321, 1322, 1323, 1324,1325, 1326, 1327, 1328, 1329, 1330, 1331, 1332, 1333, 1334,1335: n = A,T,C or G

SEQ ID NO: 22064 - DNA, 1367 bp, Homo sapiens
  misc_feature 1367: n = A,T,C or G
gagcatgagaagcccacactgatggaagaagaggagagaggcaactttgagaaagccgaggtggagggtgaagctcaggaaatcgagtggctcccattccgctgcatcaaatgcttcaagctgtcctttagcactgcagagctgctgtgcatgcattacactgaccaccacagtcgggacctaaagagggacttcatcattctgggcaacggcccccgcttgcagaactccacctaccagtgtaagcactgtgatagcaaactgcaaagcacagccgagctgacctcacacttgaacattcacaatgaggaattccagaagcgtgccaaacgtcaggagaggaggaaacagcttttgagcaagcagaaatatgcagatggtgcttttgcagatttcaaacaagagaggccttttggtcacttagaagaggtgccaaagatcaaggagaggaaagtggtgggctacaaatgtaaattctgtgtggaagtgcacccaacgctccgagccatctgcaatcacctccgaaagcacgtccagtatggcaatgtcccagctgtgtcagcgtgctgtgaaggaggcggatgaccctgcccacttgttcctggatggattggaagcagccaaagacgccagtggcgccctggtgggccgggtggatggtgaacactgcttgcttgatggaatgttggaggatgaaacccggccggggggataccattgcagtcaatgtgacagagtcctgatgtccatgcaggggctgcgttctcatgagaggagccacctggccctggccatgtttacccgcgaggacaagtacagctgccagtattgctcgtttgtttctgctttcaggcacaattggatcgccatatgcaaacccaccacggacaccataaaccattccgatgcaaactctgctccttcaagtcctcctataacagccggctgaaaacacatatactcaaagctcatgctggtgagcatgcctacaagtgttcttggtgctcattctccaccatgacaatcagccagctgaaggaacactccctcaaggtccacggaaaagccctgaccctcccccaggccacggatcgtcagtctcctctcctcacactcacaccatcctcccagaaagctaccccggctgaagaagtggaaagagtccaatgactcatcatatgcagagccccgaatggtcagccagcagttgaaccacatcagtgaggtgccctggcaaggaacaacagccgggtatgcctgggctcatcggggcgctgcggacgcagcgaaactgagcgggaatggaaagggagaacccggggagccaaacagggcaaacggcacgaggggcggacacacaggcacan

SEQ ID NO: 22065 - DNA, 2199 bp, Homo sapiens; identical to SEQ ID NO: 20954
  misc_feature 1, 2, 3, 4, 2198, 2199: n = A,T,C or G

SEQ ID NO: 22066 - DNA, 758 bp, Homo sapiens
gctcgagcggtctccagcgtgattggtctcttcagagcgcgcgctctagcgtggtcgcggccgatgtactgaggctgtatacagccacagcctctccccatccctccagccttatctgtcatcaccatcaacccctcccatgcacctaaacaaaatctaacttgtaattccttgaacatgtcaggcatacattattccttctgcctgagaagctcttccttgtctcttaaatctagaatgatgtaaagttttgaataagttgactatcttacttcatgcaaagaagggacacatatgagattcatcatcacatgagacagcaaatactaaaagtgtaatttgattataagagtttagataaatatatgaaatgcaagatccacagagggaatgtttatggggcacgtttgtaagcctgggatgtgaagcaaaggcagggaaccccatagtatcttatataatatacttcatttctctatctctatcacaatatccaacaagcttttcacagaattcatgcagtgcaaatccccaaaggtaacctttatccatttcatggtgagtgcgctttagaattttggcaaatcatactggtcacttatctcaactttgagatgtgtttgtccttgtagttaattgaaagaaatagggcactcttgtgagccactttagggttcactcctggcaataaagaatttacaaagagctactcaggaccagttgttaagagctctgtgtgtgtgtgtgtgagtgagtgt

SEQ ID NO: 22067 - DNA, 1942 bp, Homo sapiens
  misc_feature 1937, 1938, 1939, 1940, 1941, 1942: n = A,T,C or G
gcgtccgctcgagctcatgcatgtgaaacgtgtgctttgcgaaggtggctataacttcaaaactgtgctcatgtttgaagttctagccactctagctcatgcatgttggacgtgttctttacgaaggtggcaactgacatacttggtctcttcatgccaccagcctactacaaagttctcgttcattggcaacagcagaacctgcctctccgttaagtcatcagcctaaaatttgtttctctctttaagaggattctttgaaaaggtcctgcagagaagtcagtacaggttatcccgaaaggtacaaggacgcacttgtaaagatgattaaaacgtatctttcctttatgtgacgcgtctctagtgccttactgaagaagcagtgacactcccgtcgctcggtgaggacgttcccggacagtgcctcactcacctgggactggtatcccctcccagggtccaccaagggctcctgcttttcagacaccccatcatcctcgcgcgtcctcaccctgtctctaccagggaggtgcctagcttggtgaggttactcctgctcctccaacctttttttgccaaggtttgtacacgactcccatctaggctgaaaacctagaagtggaccttgtgtgtgtgcatggtgtcagcccaaagccaggctgagacagtcctcatatcctcttgagccaaactgtttgggtctcgttgcttcatggtatggtctggatttgtgggaatggctttgcgtgagaaaggggaggagagtggttgctgccctcagccggcttgaggacagagcctgtccctctcatgacaactcagtgttgaagcccagtgtcctcagcttcatgtccagtggatggcagaagttcatggggtagtggcctctcaaaggctgggcgcatcccaagacagccagcaggttgtctctggaaacgaccagagttaagctctcggcttctctgctgagggtgcaccctttcctctagatggtagttgtcacgttatctttgaaaactcttggactgctcctgaggaggccctcttttccagtaggaagttagatgggggttctcagaagtggctgattggaaggggacaagcttcgtttcaggggtctgccgttccatcctggttcagagaaggccgagcgtggctttctctagccttgtcactgtctccctgcctgtcaatcaccacctttcctccagaggaggaaaattatctcccctgcaaagcccggttctacacagatttcacaaattgtgctaagaaccgtccgtgttctcagaaagcccagtgtttttgcaaagaatgaaaagggaccccatatgtagcaaaaatcagggctgggggagagccgggttcattccctgtcctcattggtcgtccctatgaattgtacgtttcagagaaattttttttcctatgtgcaacacgaagcttccagaaccataaaatatcccgtcgataaggaaagaaaatgtcgttgttgttgtttttctggaaactgcttgaaatcttgctgtactatagagctcagaaggacacagcccgtcctcccctgcctgcctgattccatggctgttgtgctgattccaatgctttcacgttggttcctggcgtgggaactgctctcctttgcagccccatttcccaagctctgttcaagttaaacttatgtaagctttccgtggcatgcggggcgcgcacccacgtccccgctgcgtaagactctgtatttggatgccaatccacaggcctgaagaaactgcttgttgtgtatcagtaatcattagtggcaatgatgacattctgaaaagctgcaatacttatacaataaattttacaattctttggaaaaaaaaaaaaaataaaaagggcgggtcgcttctcagagtcttcggtttggtctcaacaattttctagaccctccnnnnnn

SEQ ID NO: 22068 - DNA, 474 bp, Homo sapiens
  misc_feature 473, 474: n = A,T,C or G
ctactatagggcgaattggagctcaccgcggtggcggccgaggtacgcgggggtggcgcattctcagtgaggagggccgccctgcatccgtcgccggccccggtctccaggggcctcacccgagtcatgccccgctattgcgcagcgatttgttgtaagaaccgccggggacgaaacaataaagaccggaagctgagtttttattccggaaaggacccttctaaaaaaaaaatcccagaagaaaaacttggaagatgagaaagaagtatgcccaaaagccaagtcagaagaatcatttgtattaaatgagacaaagaaaaatatagttaacacagatgtgccccatcaacatccagaattacttcattcatcttccttggtaaagccaccagctcccaaaacaggaagtatacaaaataacatgttaactcttaatctagttaaacaacatactgggaaaccagaatctaccnn

SEQ ID NO: 22069 - DNA, 1211 bp, Homo sapiens; identical to SEQ ID NO: 20419
  misc_feature 1207, 1208, 1209, 1210, 1211: n = A,T,C or G

SEQ ID NO: 22070 - DNA, 966 bp, Homo sapiens
  misc_feature 966: n = A,T,C or G
acaggttatttcatttctggctgcagttttgcataaaaagggaactcgtgaggatattgaaaataacatgccagagtttttactaagaagtatgaaaaaggaacccctttcttctacagcaaaaaaggatgaattggacacctggggatatttcagagtcactgttttaccatggaaacagaaaagataatgaattaattcgtgtaaagccagaggaattgtgaaattgcctctaacaaccttatgaaacactacgcttatgcctggatgaacttaacagtttggaatggtcagctgtcattgtggatgaagctcatagaatcaagaatccaaaagctagagtaacagaagttatgaaagctttgaaatgtaatgtccgcattggcctcactggaaccatccttcagaacaacatgaaggaactgtggtgtgttatggactgggctgtgccaggccttttagggagtgggacctacttcaagaagcagttttctgacccagtagaacatggtcagagacacacggcaacaaagagagaactagccactggccgaaaggccatgcaaagacttgccaaaaagatgtctggctggtttctcaggcgcaccaagactcttatcaaggatcagttgcctaagaaggaagaccggatggtgtattgttctttgacagatttccagaaagctgtctatcaaacagtgttagaaacagaggacgtgactttgatacttcaatcttctgagccttgtacctgtaggagtggccaaaaaaggagaaattgttgttataagaccaattctcatggtgaaacagtgaaaaccttgtatctcagttaccttacagtccttcagaaggtagctaaccatgtcgcgctactgcaagctgctagtacttccaaacaacaggaaacacttatcaaaaggatatgtgatcaggttatttttccgattcccagattttgtgcan

SEQ ID NO: 22071 - DNA, 706 bp, Homo sapiens
  misc_feature 1, 2, 700, 701, 702, 703, 704, 705, 706: n = A,T,C or G
nnagggaatttggccctcgaggccaagaattcggcacgagggcaggctggagaggatttgattagactacgcgtttcgacttgcagggtgtttaatcgtcgccaagcgggacttactgcaagctatcaaatctgaggtcttattttgttgagtcgaaagtgaaattttcctttggccaacgtgacagggctttgtttggtggtaaaaagggttactagacacccctcattccactgccactggagggcgcatttctcagctcttgctcttcaaacctgctgaaaggaattcctagatctaaacaccagcatcccctgcacaggagtgatggacagttgggtgcaaaggtgatgaaggtgggatccccgaggcattgtcactacagaacaaccatgaaatagactccttatttcagaggaagagttacatattaatccacttctactgattttgtagagggagaaaagtcagggactgtgttgtattcctgtttgcatcctttaatcatctagtataattcctttaatatggtagatgctcaggaactacctgagttaataaaggaagagaaaacttgaacaaattgtgacggcctgacttgcactgttaatacttctggctttcataaatctaagcattcaggataagaatcctatgaatcattaaaatacatataatcaaaaaaaaaaaaaaaaagtcnnnnnnn

SEQ ID NO: 22072 - DNA, 439 bp, Homo sapiens
  misc_feature 439: n = A,T,C or G
gattaaattctttatatcattcttgcaacttttccatgcttttgaaattatttaagaaagttaacaaataagcaaacaaactacaaatcaggaatggaaagtgaattttacaaaatgccattttcagattcacaagacgcttgcattcaccttccttcgacgattactacttcttacacgctatgatttctctcctttttccaccacaccggctccaggtctacttgtctttactctccccgcttcatcgctgtctgcccccttccaaaacctgttctttggtttcattctctctttttcttagttgattcatttctgcttttgtctttaaagaacacagtaattcttcaacttactttggttctttgctacctctttagtgtttaaatcacttcttttgattcttatttaataacaatctttacacattaactctaan

SEQ ID NO: 22073 - DNA, 1884 bp, Homo sapiens; identical to SEQ ID NO: 22058
  misc_feature 1, 1870, 1871, 1872, 1873, 1874, 1875, 1876, 1877, 1878,1879, 1880, 1881, 1882, 1883, 1884: n = A,T,C or G

SEQ ID NO: 22074 - DNA, 1405 bp, Homo sapiens
  misc_feature 1396, 1397, 1398, 1399, 1400, 1401, 1402, 1403, 1404, 1405: n = A,T,C or G
cacgctggttttgcatcttcaggagacgctcgtagccctcgcgcttctcctcggccagtccgcgatgatgtggctctggaaggcgtgagccacttcatcgcggtcgaaatagaagcccagagagaggtaggtgtaggaggcctgcaggtacgcgggtatattcaggtgaatgagccctggaagcggattaaaggcagtgaggctgacaggcaacgggcaggaacagtgactggcttggcagtgaatatagctgccttgctctctgtcatgcttcagccttacatgcccacggttagtgccacaatccaggcccagctgcagctcccacatcacccaggacattttccagcagttgctgaaacgaggttttgtgctgcaagatactgtggagcaactgcgatgtgagcactgtgctcgcttcctggctgaccgcttcgtggagggcgtgtgtcccttctgtggctatgaggaggctcggggtgaccagtgtgacaagtgtggcaagctcatcaatgctgtcgagcttaagaagcctcagtgtaaagtctgccgatcatgccctgtggtgcagtcgagccagcacctgtttctggacctgcctaagctggagaagcgactggaggagtggttggggaggacattgcctggcagtgactggacacccaatgcccagtttatcacccgttcttggcttcgggatggcctcaagccacgctgcataacccgagacctcaaatggggaacccctgtacccttagaaggttttgaagacaaggtattctatgtctggtttgatgccactattggctatctgtccatcacagacaactacacagaccagatgggagagactggtggaagaacccagagcaagtggacctgtatcagttcatggccaaagacaatgttcctttcatcagcttaatcctttaccttgcctcagaccctaaggagctgaggattacctataccttggtccagacacctcattgtacagaatacctgaaactatgacgatggggaaatctactaacagccgagaggtagagagagaaggagaacatggaccacgaagcggcggaatccagactgaaaacaggagcgaaaatcgcaggcactccgcaccgagggcccgaacgaggccctcctaccggacaggaaccgcagcggcacactacatcgtcaaaaaggacaagcaacaatggccagactcacaaaaaaaccgacatgtgaggccaaccataggcgagaacgcagcccgcaagacagacccccgcaaaaaaaaacaggaacacaaaccgactacaagcaacctcaccaaataaacaccgcacgagcgcagagcacatcaaccaaaagcgaacaaaagagaggctcgacactcagagcggtgcannnnnnnnnn

SEQ ID NO: 22075 - DNA, 414 bp, Homo sapiens; identical to SEQ ID NO: 21407

SEQ ID NO: 22076 - DNA, 2815 bp, Homo sapiens
  misc_feature 1, 2, 3, 4, 5, 2813, 2814, 2815: n = A,T,C or G
nnnnnctgatagtccctacctgtcaggactggtgttaggatgagataatgtttgtgaactgtaaacatatataaacgtgtgctactgtgagaactggaacaaagaagagagggagtgagagaaatcaagggagggctggggctgggaaagaacgaaaagggagtcgcgtatagaggagaggcgacagtcgcgagccacactttgcaatgaaactctttagactttctgccgggagagcggcccagacgcgccaggtctgtagcaggaggccgcgagggcgggtccccagaagcctacaggtgagtatcggttctccccttcccggctttcggtccggaggaggcgggagcagcttccctgttctgatcctatcgcgggcggcgcagggccggcttggccttccgtgggacggggaggggggcgggatgtgtcacccaaataccagtggggacggtcggtggtggaaccagccgggcaggtcgggtagagtataagagccggagggagcggccgggcggcagacgcctgcagaccatcccagacgccggagcccgagccccgacgagtccccgcgcctcatccgcccgcgtccggtccgcgttcctccgccccaccatggctcggggccccggcctcgcgccgccaccgctgcggctgccgctgctgctgctggtgctggcggcggtgaccggccacacggccgcgcaggacaactgcacgtgtcccaccaacaagatgaccgtgtgcagccccgacggccccggcggccgctgccagtgccgcgcgctgggctcgggcatggcggtcgactgctccacgctgacctccaagtgtctgctgctcaaggcgcgcatgagcgcccccaagaacgcccgcacgctggtgcggccgagtgagcacgcgctcgtggacaacgatggcctctacgaccccgactgcgaccccgagggccgcttcaaggcgcgccagtgcaaccagacgtcggtgtgctggtgcgtgaactcggtgggcgtgcgccgcacggacaagggcgacctgagcctacgctgcgatgagctggtgcgcacccaccacatcctcattgacctgcgccaccgccccaccgccggcgccttcaaccactcagacctggacgccgagctgaggcggctcttccgcgagcgctatcggctgcaccccaagttcgtggcggccgtgcactacgagcagcccaccatccagatcgagctgcggcagaacacgtctcagaaggccgccggtgacgtggatatcggcgatgccgcctactacttcgagagggacatcaagggcgagtctctattccagggccgcggcggcctggacttgcgcgtgcgcggagaacccctgcaggtggagcgcacgctcatctattacctggacgagattcccccgaagttctccatgaagcgcctcaccgccggcctcatcgccgtcatcgtggtggtcgtggtggccctcgtcgccggcatggccgtcctggtgatcaccaaccggagaaagtcggggaagtacaagaaggtggagatcaaggaactgggggagttgagaaaggaaccgagcttgtaggtacccggcggggcaggggatggggtggggtaccggatttcggtatcgtcccagacccaagtgagtcacgcttcctgattcctcggcgcaaaggagacgtttatcctttcaaattcctgccttccccctcccttttgcgcacacaccaggtttaatagatcctggcctcagggtctcctttctttctcacttctgtcttgaaggaagcatttctaaaatgtatcccctttcggtccaacaacaggaaacctgactggggcagtgaaggaagggatggcatagcgttatgtgtaaaaaacaagtatctgtatgacaacccgggatcgtttgcaagtaactgaatccattgcgacattgtgaaggcttaaatgagtttagatgggaaatagcgttgttatcgccttgggtttaaattatttgatgagttccacttgtatcatggcctacccgaggagaagaggagtttgttaactgggcctatgtagtagcctcatttaccatcgtttgtattactgaccacatatgcttgtcactgggaaagaagcctgtttcagctgcctgaacgcagtttggatgtctttgaggacagacattgcccggaaactcagtctatttattcttcagcttgcccttactgccactgatattggtaatgttcttttttgtaaaatgtttgtacatatgttgtctttgataatgttgctgtaattttttaaaataaaacacgaatttaataaaatatgggaaaggcacaaaaaaaaaaaaaaaaaacgggccgatttgtgaaaagtccctccagatttctatcactttggtctctaatttcccaagacttgtattttttttttatttcaaattataacacttttttttcccccagaagtgggtgtttcatgttgctactctggtgtgtcccaagatatcctaactggccagtgtaaatgctattctttctaaataagattatttggaaacttccttcaaactgcaggagggcgagctctgagggcacgagaagctaaaactagctgcttttgatgaaaaagagtgccagtctttggtcatctctaaacaaggcttatcaccaatggagacagaaaactctagttcaagagctgtacctcctttgaatcccagccctactcgaaataagtggtactatttccatttagcctttgagcaaatcacttaactcaaaggcgttgtggctctaagattaaacgacnnn

SEQ ID NO: 22077 - DNA, 388 bp, Homo sapiens
  misc_feature 386, 387, 388: n = A,T,C or G
actctcaagacttagaagccatatggatagaatgaaataggaattggtggtgtcttggaatatctgcttcaggacgataatgaaactaatgatttagggcagtagaagaagccgtgggaggaactttcacatttggcgagcatggaatcccctctgcagttatgtttgcctgtgcatctccggcagctggaggacgaatcacatcaggctgatgagtgtgtcacgctcttcatcccccaagagctgtgatgaagaccaagactaacagttgattaacagtgctaccttttataaggctgatttagttcctaaaatatgctgaaaggaaacaaaaccaaaaagaaaaaagagtggaaaggggggtgagacagaaacctttgtcgagnnn

SEQ ID NO: 22078 - DNA, 3132 bp, Homo sapiens; identical to SEQ ID NO: 20928
  misc_feature 3132: n = A,T,C or G

SEQ ID NO: 22079 - DNA, 452 bp, Homo sapiens; identical to SEQ ID NO: 22027
  misc_feature 1, 441, 442, 443, 444, 445, 446, 447, 448, 449, 450, 451,452: n = A,T,C or G

SEQ ID NO: 22080 - DNA, 1432 bp, Homo sapiens; identical to SEQ ID NO: 22032

SEQ ID NO: 22081 - DNA, 459 bp, Homo sapiens; identical to SEQ ID NO: 21058
  misc_feature 1, 2: n = A,T,C or G

SEQ ID NO: 22082 - DNA, 745 bp, Homo sapiens; identical to SEQ ID NO: 20943
  misc_feature 1, 2, 3, 4, 5, 6, 7, 8, 9, 10, 11, 12, 741, 742, 743, 744,745: n = A,T,C or G

SEQ ID NO: 22083 - DNA, 420 bp, Homo sapiens; identical to SEQ ID NO: 21506

SEQ ID NO: 22084 - DNA, 720 bp, Homo sapiens
acgcggggagagaagtttccgggactggtgagtagtgggcgatttaaaaacccgcgagtgtagttgtgaccttcgcggtaggtgccggttggggccggctgtgattgttatcttggtgctgcagaggacagcagaagaggagattgggtcagaaaactgccctgccgcaccagagcacagcgcactagtgggacaggggtcctgactcagacttaactggctgtgtctcgtggtttttcactgtcctggaaaaggcctgaagtggcactgaaatgaggcatagatgaggtaacgtcgagggagcggtttgcaggttgcaaaggggccctactgatgctgcttaatagtaaacagtgcttactctaggacgggagttgtttccagctttacgtgtaaatctcgcgatattgtggcctgggcactatttccattaaggaggaaactgcacaggataagtcatttacctgctgttgcacagctctggctctaggattcaggctggcttcagagtcggtgctcttaaccgccatactatgttgccttctgttgtcgttgttgactgtggccatgtagcttcgcagtttcctcatctgtaacagtaaataactcaaaacctgcatgatggcccactagggtttcactttcgagcttgccagatgtagaaaatgctggagaatggagtacctcggccgccaccgcgtggagctccaattcgcccta

SEQ ID NO: 22085 - DNA, 607 bp, Homo sapiens
  misc_feature 1, 2, 3, 4: n = A,T,C or G
nnnngaagtcctcgttccacgccttctcatcatcctgaacaccgagctctgggactccggcggagaatctaaacgtaaagcatcacccacggtcgtgaactgtaggcgcccaggtacgcggggatcttattctggccttggcggagttggggatggtgtcgcctagcagccgctgccgctttggcttgctcgggaccatttggctggacccagagtccgcgtggaaccgcgatagggatctgtcagggcccgcggccgggtccagcttggtggttgcggtagtgagaggcctccgctggttgccaggcttggtctagaggtggagcacagtgaaagaattcaagatgccacctaatataaactggaaagaaataatgaaagttgacccagatgacctgccccgtcaagaagaactggcagataatttattgatttccttatccaaggtggaagtaaatgagctaaaaagtgaaaagcaagaaaatgtgatacaccttttcagaattactcagtcactaatgaagatgaaagctcaagaagtggagctggctttggaagaagtagaaaaagctggagaagaacaagcaaaatttgaaaatcaattaaa

SEQ ID NO: 22086 - DNA, 2085 bp, Homo sapiens
  misc_feature 2081, 2082, 2083, 2084, 2085: n = A,T,C or G
tccgcggacgcgtgggcggtggccgtccgcccactccgcggcgttcggggaaatggctgcgagaccctagaggcctgcggagcttactccacgggaacagcctctagataatctgagtgttgaaaatacgaagcctgttactcgtgaacagtggctgacaacagtgttgttgtgagcctggctgtctgcttggacccagaggtttcgtctgccagggttttggttgtatttaggatttcagggaaaagtgtccaagctttcagtgtggagcaggtatggacgacaaaggcgacccgagcaatgaggaggcacctaaggccatcaaacccaccagcaaagagttcaggaaaacatggggttttcgaaggaccactatcgccaagcgagagggcgcaggggacgcggaggctgacccactggagccgcacccccacagcagcagctgggcctgtccctgcggcgcagtgggaggcagcccaagcgcactgagcgcgtggagcagttcctgaccattgcgcggcgccgcggcaggaggagcatgcctgtctccctggaggattctggtgagcccacgtcctgccccgcacagacgccgagacagctccgagggcagcgtggaaagcgcttctgagaccagaagcggccccagtctgcttccacagtgtgaaggaacgaccagctcttctgaaaaggtgaaaggaggggatgaccacgatgacacctccgatagtgacagcgatggctgaccttgaaagagcttcagaatcgcttcgcaggaagcgggaacaggagcccactgagaggcccctgaaagggatccagagtcgcctgcggaagaagcgccgggaggagggtcccgccgagactgtgggctccgaggccagtgacactgtggagggcgtcctgcccagtaagcaggagcccgagaacgatcagggggttgtgtcccaggctgggaaagatgacagagagagtaagttggagggaaaggcggctcaggacatcaaagatgaggagcctggagacttgggccgaccgaagcctgaatgtgagggttacgaccccaacgccctgtattgcatttgccgccagcctcacaacaacaggtttatgatttgctgtgaccgctgtgaagaatggtttcatggcgattgtgtgggcatttctgaggctcgagggaggcttttggaaaggaatggggaagactatatctgcccaaactgcaccattctgcaagtgcaggatgagactcattcagaaacggcagatcagcaggaagctaaatggagacctggagatgctgatggcaccgattgtacaagtataggaacaatagagcagaagtctagcgaagaccaagggataaagggtagaattgagaaagctgcaaatccaagtggcaagaagaaactcaagatcttccagcctgtgatagaggcgcctggtgcctcaaaatgtattggccccgggtgctgtcacgtggcgcagcccgactcggtgtactgcagtaatgactgtatcctcaaacacgccgcagcgacaatgaagtttctaagctcaggtaaagaacagaagccaaagcctaaagaaaagatgaagatgaagccagagaagcccagtcttccgaaatgcggtgctcaggcaggtattaaaatctcttctgtgcacaagagaccagctccagaaaaaaaagagaccacagtgaagaaggcagtggtggtccctgcgcggagtgaagcactcgggaaggaagcagcttgtgagagcagcacgccgtcgtgggcgagcgatcacaattacaatgcagtaaagccagaaaagactgctgctccctcgccgtcactgttgtataaatgtatgtatcacctaggggttggcctcctggacccctcccgttctttctggatagcatcccctgggcctgtccaggactgggagttgcagcttgtgttaagctgatcacagacacggtgccctcggggagcagagccggtagagccccgtgccggtccccattggggatctggcggtccaggtccctcgagtctcgggttccggcccgcgggattctccctggcgcnnnnn

SEQ ID NO: 22087 - DNA, 3132 bp, Homo sapiens; identical to SEQ ID NO: 20928
  misc_feature 3132: n = A,T,C or G

SEQ ID NO: 22088 - DNA, 1406 bp, Homo sapiens
  misc_feature 1, 2: n = A,T,C or G
nnctacagcgcgcgggggtctcccgcgtccctccgcctcgccgggagctcgcgccctcgcccagccgagctcccacccccgcttttttcctgaaggcgctgggcggctgccaccctccggccggagcccggcactgcacaacccccatccgactttcagagtgttccacagctccccggcgcagagccctcctcggcttctttattttcccatcgcagaagagagggaaaaagagggagagaaaaaaaaaaaagaaagagaggaaagagaaaaacaaagaagaaaaaaaaaaaaaaagaagggaggagaaaaaaaaaaaggaaagaagaagaaaagaaaaaaagcaaaaaacaaaagagaataaaataaaaataagaacataaaaataaaaaaaaaagtagtaaataaagtgagagaagagagagaaaaatcaaaaatgtgggggcaaacaaaagaagagaaaaaaaaaaatcaaaaaaaaaaagaacagacaaaaataaaaaaggggaaatacaaaaaaaaaaaagcaaaaaaaagaaaaaaaagataaaaaaaaaacgaacaaagtaaaccacaacaaatacaaacaaaagacaacgccaggaaaacaaaaacaacacagcggaggaaaaaaccccacgaagaacaaacacggagaaaaacaaacacaggaacaagacaaacaggcaaaaacagaaaccaagacaggcaaacacagaaaaaagaagacgcgacaacaaaaatcaaagagagaaagagaaaaaagaagcacgaggccagacaaaacagaacacaaaaacacagagaaaaaatgagcaaaaaacagaggaacgcgcaacacaacaacgacagaacacacgcaaaaacaaccgagaggaagcaaacacctggaagcatagccactcagtatttgaccaacagagcagaacacgacaggatagccagacagtggaccaagagatacgcaacataattcacataatttgtatgcagtgtgaaggagcagaaggcatcttctcactgtgctgcaaatctttatagcctttacaatacggacttctgtgtatatgttatactgattctactctgcttttatcctttggagcctgggagactccccaaaaaggtaaatgctatcaagagtagaactttgtagctgtagattagttatgtttaaaacgcctacttgcaagtcttgcttctttgggatatcaaaatgtattttgtgatgtaccatcccccgcatgccactgtttctaccaccagttttgcaggagaaaaggaatcctaggactaatacaagctacttggctccatgctttaaggtagagagatctgggaaaaagtcttcctcctttccctttgctgcccctgtagagaccaaccagacccataaatgggcatgt

SEQ ID NO: 22089 - DNA, 1481 bp, Homo sapiens; identical to SEQ ID NO: 21476
  misc_feature 1, 2, 3, 4: n = A,T,C or G

SEQ ID NO: 22090 - DNA, 352 bp, Homo sapiens
  misc_feature 1, 2, 3: n = A,T,C or G
nnncaaattgtgtttactgcctttcgacacgtcttgtaattttttgctaaatgctggatatgatatactgggtaaaagaaagaaataaatatgcctttggtgtgaagttttatgtagacctggcaaggcataagactatgtttaatgtttgtgtacaaaccataggtgtcagaggttataattttctctatctttgtttttcacatccttgctgtcttcaggtttccctaagggactcctaaacaatctgagccttacagttattttagttgtgattccctggttattatttatgcagccatggttggatgtggcaggtaagggtgtgggacagggaggaatcattctttca

SEQ ID NO: 22091 - DNA, 1603 bp, Homo sapiens
  misc_feature 1, 2, 1602, 1603: n = A,T,C or G
nnacttgctttctatctcttctgccaaatatcctaggtcatcattcttcggttggcgccccccgcatccggctgcgaggcgctgggcacaggtgtcctgatggcaaatttcaagggccacgcgcttccagggagtttcttcctgatcattgggctgtgttggtcagtgaagtacccgctgaagtactttagccacacgcggaagaacagcccactacattactatcagcgtctcgagatcgtcgaagccgcaattaggactttgttttccgtcactgggatcctggcagagcagtttgttccggatgggccccacctgcacctctaccatgagaaccactggataaagttaatgaattggcagcacagcaccatgtacctattctttgcagtctcaggaattgttgacatgctcacctatctggtcagccacgttcccttgggggtggacagactggttatggctgtggcagtattcatggaaggtttcctcttctactaccacgtccacaaccggcctccgctggaccagcacatccactcactcctgctgtatgctctgttcggagggtgtgttagtatctccctagaggtgatcttccgggaccacattgtgctggaacttttccgaaccagtctcatcattcttcagggaacctggttctggcagattgggtttgtgctgttcccaccttttggaacacccgaatgggaccagaaggatgatgccaacctcatgttcatcaccatgtgcttctgctggcactacctggctgccctcagcattgtggccgtcaactattctcttgtttactgccttttgactcggatgaagagacacggaaggggagaaatcattggaattcagaagctgaattcagatgacacttaccagaccgccctcttgagtggctcagatgaggaatgagccgagatgcggagggcgcagatgtcccactgcacagctggaatgaatggagttcatcccctccacctgaatgcctgctgtggtctgatcttaagggtctatatatttgcacctcctcattcaacacagggctggaggttctacaacaggaaatcaggcctacagcatcctgtgtatcttgcagttgggatttttaaacatactataaagtctgtgttggtatagtacccttcataaggaaaaatgaagtaatgcctataagtagcaggcctttgtgcctcagtgtgaagagaaatcaagagatgctaaaagctttacaatggaagtggcctcatggatgaatccggggtatgagcccaggagaacgtgctgcttttggtaacttatccctttttctcttaagaaagcaggtactttcttattagaaatatgttagaatgtgtaagcaaacgacagtgcctttagaattacaattctaacttacatattttttgaaagtaaaataattcacaagcaaaaaaaaaaaaaaaaaaaaaaaaaaaaaaaaaaaaaaaaaaaaaaaaaaaaaaaaaaaaaaaaaaaaaaaaaaaaaaaaaaaaaaaaaaaaaaaaaaaaaaaaaaaaaaaaaaaaaaaaaaaaaaaaaaaaaaaacaaaaaaaaaaaagggcggccgcnn

SEQ ID NO: 22092 - DNA, 800 bp, Homo sapiens
  misc_feature 1, 22, 40, 44, 74, 113, 795, 796, 797, 798, 799, 800: n = A,T,C or G
natattaattattccagataangggattttggatttcaangagnacatttagtatttcaattgtaacaattaantaacagtcatgtgttaaggtaacaatgtggaaacatttngagacatgttttgttaggtgatttcatcattatgtgaacatcatactgtactgacaggaaccccagatggtatagcctattactacacacttaggctatatggtatagcctactactacatacctaggctatatggtatagcctactactacatacctaggctatatggtatagcctactacacacctaggctatatggtatagcctactactatacacctaggctatatggtatagcctactactacacacctaggctatatggtatcgcctactactacacacctaggctatatggtatagcctactactacacacctaggctatatggtatagcctactacacacctaggctatatggtatagcctactacacacctaggctatatggtatagcctgctgttctgaccaccctcgtatgtggtccttcactaactgaaacatcattatatggtacatggctgtatttatggctctttgcaggtaaagcattatatctcttgcctctattttatttacagaggctattttcttgcccattttaagtgcccctagtctgtggttctataccatcctatgtatagctttatcatagcactttctatacctgcttcctttactgaactctaagttctttaaagtaaggtatcacaaattaatttcatatttacactgaagaannnnnn

SEQ ID NO: 22093 - DNA, 315 bp, Homo sapiens
actatatctattgcgccaggtttcaatttctatcgcctatactttatttgggtaaatggtttggctaaggttgcccgcgtacgcggggtgagctccgagtcctctgctgctttgccttcagcctctcccaggactgggagctccctgcgaagagagagctggggctgcagagctgtattcaggtccaaggttctgcccttccttgagtggtctagaaggcactgcgtggcccctcagatgctgggacacaacagacccgggacccagctgagctacccaccccttccatggactgaataagatggactaacaggc

SEQ ID NO: 22094 - DNA, 1432 bp, Homo sapiens; identical to SEQ ID NO: 22032

SEQ ID NO: 22095 - DNA, 1380 bp, Homo sapiens
agtcgacccacgcgtccggtcttcccgcgtccggccgattcctcctccttggtcgccgcgtccttggctggcgtcagaaaaatggctacaaacttcctagcacatgagaagatctggttcgacaagttcaaatatgacgacgcagaaaggagattctacgagcagatgaacgggcctgtggcaggtgcctcccgccaggagaacggcgccagcgtgatcctccgtgacattgcgagagccagagagaacatccagaaatccctggctggaagctcaggccccggggcctccagcggcaccagcggagaccacggtgagctcgtcgtccggattgccagtctggaagtggagaaccagagtctgcgtggcgtggtacaggagctgcagcaggccatctccaagctggaagcccggctgaacgtgctggagaagagctcgcctggccaccgggccacggccccacagacccagcacgtatctcccatgcgccaagtggagcccccagccaagaagccagccacaccagcagaggatgacgaggatgatgacattgacctgtttggcagtgacaatgaggaggaggacaaggaggcggcacagctgcgggaggagcggctacggcagtacgcggagaagaaggccaagaagcctgcactggtggccaagtcctccatcctgctggatgtcaagccttgggatgatgagacggacatggctcagctggaggcctgtgtgcgctctatccagctggacgggctggtctggggggcttccaagctggtgcccgtgggctacggtatccggaagctacagattcagtgtgtggtggaggacgacaaggtggggacagacttgctggaggaggagatcaccaagtttgaggagcacgtgcagagtgtcgatatcgcagctttcaacaagatctgaagcctgagtgtgtgtacgtgcgcgcgtgcgtgaggccctgccacgattaaagactgagaccgtgtggataataaaaaccttctataaaatataaccatgttgcccgcctgggcccagttgacttttgacttaagcagccttagcttgcggccgcaattagagctcatttggccaatgcgcccctatagtgagccgtattacaattaattgaccggcgttttacaacgacattactgggaaaaccctgcttttaccaaccttaatggtgttggatacaattcccctttcgccaactgcttgatttacagaaaggccctgaccgatcgcccttcacaaaagtttgcccaaccttaatgggcgaacgtgaatttgaagccgttaatattccgtttttcccctttctttggtacaccacctcattttttatccaataggcgtgattcgaataactcc

SEQ ID NO: 22096 - DNA, 604 bp, Homo sapiens
  misc_feature 1, 2, 3, 4, 5, 6, 7, 599, 600, 601, 602, 603, 604: n = A,T,C or G
nnnnnnngattcacacagtaaagacagttgccaaagtaatctgcaatgaggaaatcaatgaaggatctggggttgtacgtcatgtcttggtttagactacactttagaggggatatgacggtaggaaaacctggttggatgtattacagagacataaacatataaatgagtaagacccgagaccagaatgagggtaatggagatggaaacaaaaatcaaacagaaagagcttttaagtgaaaaattagatcttataaaaggaccatgtaattttaaatgactctaaagaattgtattccagacacctgaatgattgatgggattaatacacgagatgggtattgggatatggcttatgacagaagatgatgcatttaattttagaaccatagagacaaggtaacaagatttaaatcaggaagaatttaattgtaaaatcttatagaaaaatatggaagaagtcagctacacagagacagcagttgaaaatgaatcattcggctgggcatggtggctcacgcctgtaatcccagcacttcgggaggccaaggcaggtggatcacttgagctcaggagttcaagaccagcctgggcaacannnnnn

SEQ ID NO: 22097 - DNA, 505 bp, Homo sapiens; identical to SEQ ID NO: 20929

SEQ ID NO: 22098 - DNA, 452 bp, Homo sapiens; identical to SEQ ID NO: 22027
  misc_feature 1, 441, 442, 443, 444, 445, 446, 447, 448, 449, 450, 451,452: n = A,T,C or G

SEQ ID NO: 22099 - DNA, 817 bp, Homo sapiens
  misc_feature 1, 2, 817: n = A,T,C or G
nncgtccgccatgttgaccaggctggtttcgaactccttaacctcaggtgatccgcctgcctgggcctcccgaagtgctgggattacgggcgtgagtcaccgcgcgccgaccctccttcagtcctgtgtcttgtacggtgaatgtggtttctaaggtggataaggaggcagggattccttgcctagctggagccctgctcacctggccatcaagcatactgtgagatgttgcaagttaggagctatagagtgtcatcgagttgtttaattttagaaacacaaaggctttaaattagagcatctcaggttagacttgtccctgagcgggtgataggtgtactgagatactgcatttctctcagccctctcccttaagccaagagagctgaagctgatgtttgatggttaccttttggtatatatgtcatggcatgagaaagaatcactgctttagtctgtagaagctttgtcgtcctttgccatgccctggggagggagcaggaccatcctttgcacccatcagagcattcctagttcttttgttgccagatacgtaagagtggttgagtttacaggtgtctgcatctctctttagcagaaagatggggtttcaaatgtgttgcctctttccaattttgctatgcctatcagtagtcagatattttggggagaagggaaaaatccaaggtaaatgtgaggttcttacagtgaattacttttcaaaagaaatttctgctaccaaggggcatttgggaagtggctgtgtggagaagttttcattgtaatgcgaacatattgccaaaaaaatattgtacan

SEQ ID NO: 22100 - DNA, 745 bp, Homo sapiens; identical to SEQ ID NO: 20943
  misc_feature 1, 2, 3, 4, 5, 6, 7, 8, 9, 10, 11, 12, 741, 742, 743, 744,745: n = A,T,C or G

SEQ ID NO: 22101 - DNA, 459 bp, Homo sapiens; identical to SEQ ID NO: 21058
  misc_feature 1, 2: n = A,T,C or G

SEQ ID NO: 22102 - DNA, 612 bp, Homo sapiens
  misc_feature 1: n = A,T,C or G
naacggccgccgtgtgctggaattcggcttagagcggtcgcccgcgcaggttcaccgtgctcggcgaaattatgacctggtccctggtgtctacagtgcacatgggaagcctaactggtctgcgcctggcaacatgaagctaccatatggtatgtgaaacagatgttcactaatctctaaggctaaccagaagctctgatttgaagagaataaatggattttgcacaaaaccacaggaaaagtccccggagctccatcccgcacttacaacagagtgcctttacacaaacctacggattggcagaaaaagatcctcatatggtcaggtccgcttcaaaaaaggaagatgaaatcccagagactgtctcgttggacgaatgctttgatgctgcaaagaacaagatgcgagtgaagatcagctatctaatgattgccctgacggtggtaggatgcatcttcatggttattgagggcaagaaggtgagaaggggtttcttctctatccagtatgtatgttctccaccaagaacctagagtaaatcagggattgacccttgtatttaccctctgagaagaggaggctactttttacattacatgagaaaagataag

SEQ ID NO: 22103 - DNA, 421 bp, Homo sapiens
  misc_feature 421: n = A,T,C or G
acgcgggagtgacgtctgccaggagccagaagacagaacctctaagtggctctggggaccagccactcttccgtggagctgatcgatatgactttgccatcatgatacctccaggaggcacggaatgcttttggcaatttgcccaccagactggatacttctatttcagttacgaggacggcacacaaaaggtgcagaacaatatctttcacatgtggcgatactacaactttgcccggatgaggaaaatggctgactttttccttatccaatcaaactataactacgtgaactggtggtcgacagcccagagccttgttattattctttctgggatcctgcaactgtatttcttgaagcgtctcttcaatgttccaacaactacagatacaaagaagccaagatgctaagctaaggtgan

SEQ ID NO: 22104 - DNA, 1783 bp, Homo sapiens
  misc_feature 1180: n = A,T,C or G
cacgcgtccgcatgtgcggtgattacagcttgagtatgagggggaactccgaaccatgtctagattgtgatctctttatcctgtttcccttccctttatatccacaggacgtggtgggtcctctggtgcgaaattccggatttccttgggtcttccggtaggagctgtaatcaattgtgctgacaacacaggtgaggtctttgcacgttgctatactcccccttttaaaagcactcaatgggcctgtggctaatgacctattgagccgtcaagaaaggggagagtgaaaacatcgcttttgggtgaagtggcaacatgtgttgtttgcttcaatcggtggtgtgacaaggcgttcttgcggactaactgcttgggcagtgagtggagggaggggctttggaagtgtttgggaaatgttatactgatggaacggcctgatggccctcaacattttttatttttatttacattcttttggaggagccaaaaacctgtatatcatctccgtgaaggggatcaagggacggctgaacagacttcccgctgctggtgtgggtgacatggtgatggccacagtcaagaaaggcaaaccagagctcagaaaaaaggtacatccagcagtggtcattcgacaacgaaagtcataccgtagaaaagatggcgtgtttctttattttgaagataatgcaggagtcatagtgaacaataaaggcgagatgaaaggtttttattttattttattttatttttttaatgcaggttctgccattacaggaccagtagcaaaggagtgtgcagacttgtggccccggattgcatccaatgctggcagcattgcatgattctccagtatatttgtaaaaaataaaaaaaaactaaacccagaaaaaaaaaaaaaacaaacaaaaaaaacacgaaaaccttgttcgggaccgccgagcgcaccaaggaaaaagcgtgtttgagaaacacatcgtggttggggaggcgagggccaccgcgagaagtaagatgcaccaacgtgggcccatcgagtgtggacgtccaagaagacagacgccgtgggaccaatgcacaactggtgggttgcgtgttctccgcccagatagaaagagagccccgtggggatacccgccacagggcttgtagaaaacaaaactaccagacagagaggggctgntaccgtgcaggcacaaaatacagtgggagagcatcaataaaacaaaggggcgggaccacacaggagcgaccgtcgaataatacaaaaactaaacgacccagccgaaaggtgggggaataactgatcccagtagcgaagacaatgacaagcaagtagaaatagtcaagacatatgatcgaaagaacagcaacaaatcagatacgaacaagccagaccatgagagatcaaacgatcaagaagcaacagacagacacaaaagaatagaaagagacaagcgagacgacgaaagacgcaagaaacggaagagacagagaagcagagaagagagaagagaaggaggagagagagacgagacaggacaacaaaaggagagagaaagacaaaggagcaaggcaagggatactataacagccagatcagagaaacgacgagcaaagaacgcagaaacagaacgagcataagagaaagaagcggagcaagagacagagcaagagcaggagcaagacacaggacaccaaagaagaaagatgaacaaggagagaagaaagacaagaaaaaaagagagagacgaaagaatagaagaagacgaagagcagagcaaga

SEQ ID NO: 22105 - DNA, 1976 bp, Homo sapiens
ggtggcggccgcttttttttttttttttcctttttttttttttttttttttttttttttttttttttttttttttttttttttattttttaaaaccagaacatttattgcatgactaatcgttgacattcttaagatgaactggatgctgcaacagctgccctcttgggtttaggtgttgttccttcacggaatccatgcctgaatctgcggtatacaatttttaggtgcctcattcgaccagttccggtggtatttcgtcttttagccttggcactccagttatactttctctggtctcggccgcagaagcgagatgacgaagggaacgtcatcgtttggaaagcgtcgcaataagacgcacacgttgtgccgccgctgtggctctaaggcctaccaccttcagaagtcgacctgtggcaaatgtggctaccctgccaagcgcaagagaaagtataactggagtgccaaggctaaaagacgaaataccaccggaactggtcgaatgaggcacctaaaaattgtataccgcagattcaggcatggattccgtgaaggaacaacacctaaacccaagagggcagctgttgcagcatccagttcatcttaagaatgtcaacgattagtcatgcaataaatgttctggttttaaaaaatacatatctggttttggtaaggtatttttaatcaattaggcttgtagtatcagtgaaatactgtaggtttagggactgggctagcttcatatcagatttacttgttaagtgactgttttggaatgtttacttttggactgggtttgtaacacggttaaaggcaatgagaaacaagcagaattccaggagtccttgaagcagagggcactggaagacaatatagcagattaaaatagcacagctcatgtggcataggtgggtattttagatgtttgagtaaatttgaaagagtatgatgtttaaattacctttagcaacatgttcatctgctatgctgtcatgactagggggatgattattagtcacatagagcttgggagtaccactggaaacgtatgggtaggagtttaggtggcttctgtttttcaaaagatgatcttatcctagtatctgtaatgctcacttggcacacctgacttgtgggctgtgtgtaaggtggctagctaagtgaaaaaagcctgctaggtgtgagtcaacttaagaatatgtaaataggtttgagaaaaagtagggcttgggtgcaagtaaagattgagcaggaaataaaggaaaatcaagtataatccctgagatttgtagactaaaggcaatgatgtgggactacttggtcgaatttttttagccctcaacttggttattgggtgtttctgtgtcaacgcactgaaacttgctgtcgtgccttcctagttttcgtggtttattgacagggttgggggttttttttgtttttttaaaatgaagggacaaagtcaactggactgctgagtgagagggcaggggcagttgaagggaacatgaattgctggaacagctacataaaatagtgatgtagccaagtcatgctatttaaattataattctccactgtgtttagaataacatctgaggttcttaacctggccttggaagggtatcacttttacttgtaacctggaatggctttataatgtgctagctaattgctactctcatcttgtattttaactcctaatttacccttcaggtctcagcttcagaacattcacttataaagaaaccctgctgattaaatctctcttgggcttcctcccgaaatgtgagactatactttaaagatgtatggttagagtccaattgccattgcctttcttgtttacagatagtgcaatggcgcaatcctggctcactgcagcctctaattcctgggctcaagtcaagtggttctcctgcctcagccttctgagtagctgggactgcagatgcacaccaccacacctggctg

SEQ ID NO: 22106 - DNA, 916 bp, Homo sapiens
  misc_feature 1, 2, 3, 4, 5, 6, 7, 8: n = A,T,C or G
nnnnnnnnagagtgtaggtggatcatcagaatgttctgctgacggttttaatgcatgtctcacaaatcatagaattagactcatccagtcagctcttaccatctctaagcttaagacggattctaaattctaatggagacagtcatattttagcagctgggaaaataggaaaaggaatgctctactctttgaggtcataaatctacaatcagtccagttgtcataaagataggatcccaaagaaaacagtttcaacaactgcatgcatggatcttgaatgccggtgtgcaagggctgggtgggaatgaggttgctttcagagcctatacgaggaggaatactgagggaatactagacatttctttgtaggtattttgtggggaatgaaaagataagattcccaagccctaagagcctttccctaaattctctaggtgtgtgtattttcagggaagaggaaaattttaaatcagcagcctacttcagcattctcatgaaactgaattgcaactagcatttcaactaggttaggattccttttggtatgtggagggggaaagatctgtacaaagagaagcagcaaaatatgaaaaaaggccagagctgtattctccccagtggctagcctaaccaaccccggagtgtccagacctaggaaaagaaaaggctaacggtcctggggctcacccagcacaagtgcgagcctcaagggcacgaaacagcttacaaaaggccatttggtactatgtctggtgctggtattcttgtagactcattcttgatcatataattgaaaaaagacctctgcaagtgatgggggagaaaaaacaaacccacattctagggaaaggtgagttggtgactcagcagctcccgtctagtgtgacacttctggagaagagtagggggccatggt

SEQ ID NO: 22107 - DNA, 2425 bp, Homo sapiens
  misc_feature 2424, 2425: n = A,T,C or G
tcgagcggccgcccgggcaggtacgcggggcagagaatcctccaccacacacagcaggcactatctgccacagttcctttccccgatagcttcaaattctctgccttttgaaataagcctacttttaactggaataaataattggtcaatctctacctcaggtgaagaggaaccaagcctctggaaacacttaggaacaaactgtaaaaaccaaaggcaattgtgtaaccggttaaataagcttgctggactttgtccctgtgtatgagttagacaattctttcagctagtttgagtgacgcactgaccagtgaagcgcagtgaagcagtgggaaccggaatatccaaagagtggtttgaaggagaaagaagcattgtggctttatatcctctgggcctgggtttcctgaagtcaccacacatagaggagagagaaaatggctgagttaaagtacatttctggatttgggaatgagtgttcttcagaggatcctcgctgcccaggttccctgccagaaggacagaataatcctcaggtctgcccctacaatctctatgctgagcagctctcaggatcggctttcacttgtccacggagcaccaataagagaagctggctgtataggattctaccttcagtttctcacaagccctttgaatccattgacgaaggccatgtcactcacaactgggatgaagttgatcctgatcctaaccagcttagatggaaaccatttgagattccaaaagcatctcagaagaaagtagactttgtgagtggcctgcataccttgtgtggagctggagacataaagtctaacaatgggcttgctatccacattttcctctgcaatacctccatggagaacagatgcttttacaattcagatggggacttcttgattgttccgcagaaagggaaccttctcatttacaccgagtttggcaagatgcttgtacagcccaatgagatctgcgtcattcagagaggaatgcggttcagcatagatgtctttgaggagaccaggggctacatcttggaggtctatggtgtccactttgagttacctgaccttggaccaattggggccaatggcttggccaatcctcgtgatttcttgatacccattgcctggtatgaggatcgccaagtaccaggtggttacacggtcattaataaataccagggcaagctgtttgctgccaaacaggatgtctccccgttcaatgttgtggcctggcacgggaattatacaccctacaagtacaacctgaagaatttcatggttatcaactcagtggcctttgaccatgcagacccatccattttcacagtattgactgctaagtctgtccgccctggagtggccattgctgattttgtcatcttcccacctcgatggggggttgctgataagaccttcaggcctccttattaccataggaactgcatgagtgagttcatgggactcatccgaggtcactatgaggcaaagcaaggtgggttcctgccagggggagggagtctacacagcacaatgaccccccatggacctgatgctgactgctttgagaaggccagcaaggtcaagctggcacctgagaggattgccgatggcaccatggcatttatgtttgaatcatctttaagtctggcggtcacaaagtggggactcaaggcctccaggtgtttggatgagaactaccacaagtgctgggagccactcaagagccacttcactcccaactccaggaacccagcagaacctaattgagactggaacattgctaccataattaagagtagatttgtgaagatttcttcagaatctcatgctttctggtagtattggaggagggggttggttaaaatgaaaattcacttttcatagtcaagtaactcagaacttttatggaaacgcatttgcaaagttctatggctgtcaccttaattactcaataaacttgctggtgttctgtggacgtaaaaaaacacaaaaaaacacacacagggcgaaaacaaaacaaccgaaccataacaccaccacacaaatttttcgtgcggcggcggctccggcctcgtgaaaaagtttttaaacaaccacatatttttgggagccgcgggcccacaaatgggtaagtgacaacacactggccacagaggagtcgaccccacagagaaaactgctggacaccatagcaatcgacggatgtgtaactcccaccgcaataaaaataatccgcggcgtgcgtcaccagagagcttgttggagaaacacacacacaggaagggcgcatgcgcaggcctaaacagaggagctcataaacagaggggtcacagaggaaggcggagttgtaactaataaagcgcccgcagtagggcttacaacgataacgcacacaactgacaacgagccagccacnn

SEQ ID NO: 22108 - DNA, 336 bp, Homo sapiens
taatcgtgtgacattttgagagccatcagatgttacgtttctcaaaaaaaaaaaagacttgattatattaactatttgaatctatgatctgtttccttgagggatttttgctaatctgtatttcaatttcccaggtcctagaatttatgatttttttttttttaagaggttagtagctaacagtgagaggcagcctcattgtttttagtttctagttgggtggaactcagccctagtgttgtatacttattaatcccattttagtgctttgcacatatccattgttattcagtgtttttctctgggtccttccagtttattttcttccttagctgt

SEQ ID NO: 22109 - DNA, 672 bp, Homo sapiens
  misc_feature 1, 2, 3: n = A,T,C or G
nnnggtcaaaggactgtaaatttcaaaataaacagagagctcttaacaaagacagtgctacaacaagtaattgaagatggctcaaaatatggattaaaaagtgaacttttctctggacttccccagaagaagattgtggttgaattcagttcacctaatgttgccaaaaaatttcatgttggacatttgcgttctaccatcataggaaattttatagcaaatctcaaagaagctttaggacatcaagtaataagaataaattaccttggcgattggggcatgcagtttggtcttctgggaactggcttccagctgtttggctatgaggaaaaactgcagtccaatcctctacagcatctctttgaagtctagagacaagatcgctatgtagacacaccgtgaaccatttcccactgtgggcctgcaccaccccaggggcttcctagcttctgctcttctggaagtcttccccatctcctccccattccaggtaattctcctttcctctatcctggcagtttctccacttggccactgctccctgctgtcccttcccaacactgcttgcttttctactctctctctgcttatttgggacagcactacagtgtgtcattgtcctcttagtcttcctcttagaatgagttttgaaatacctagcaagaacaaagt

SEQ ID NO: 22110 - DNA, 1380 bp, Homo sapiens; identical to SEQ ID NO: 20118
  misc_feature 1380: n = A,T,C or G

SEQ ID NO: 22111 - DNA, 343 bp, Homo sapiens
aggtaccttgcttggtcactcagtgctcatggggattgttagaagctttactttagatcccacttctgatgccatctttcagtccagaggaaataagcatccttccatgcaaggggtactttttttttttttttttttttttttttgcttgtttttatcttttggccttttggtgacttggtgctccttggagtcactggagttctactttgaatcccactctgacatcaatcgactgccttaattcctggtccagctgcccgaccctgactctctcccgctcttttcctcaggtcgaaggtttcctttaagatcacgctgacgtcggacccacggctgccgt

SEQ ID NO: 22112 - DNA, 348 bp, Homo sapiens
accacacaccctccactactcatcaccagacagggaaccctggcttgggcccacagcacagaccctccatcctgggctgattacactaagtgattgctaactcacatgtctctgggatggagcacccaggagacaagcaaagtggtggagcagcaagtcaggtgatgtggagcccagagggcagggacagctatctctctaggctccacttgcccttgtagacactttgtctcagcactccttagtctgcttgcctctcccagggccccagcctggccacacctgcttacagggcactctcagatgcccataccatagtttctgtgctagtggaccgtacctgcccgg

SEQ ID NO: 22113 - DNA, 439 bp, Homo sapiens
  misc_feature 438, 439: n = A,T,C or G
gagaccaggtctcactatgttgcccaggatggtctcaaactcctgagctcaagtgatcctcccgccttggcctcccaaagtgctaggattacaggcgtgagccaccacacccagccaagttccatccacttttgaaaacaagacatttatgtataggaagagaattatggaaacactttgtaaaacatccatttattatatccaatgctaaacactaccacttggactctaagatatgtttatgcctctctgtttattctagttttttaaaaatcaaatatatatacctacgggcataaaacctctatcgttattacttttatgtgtttaaacaaacccctacactttgagtctaactttctactcatctgagctgttttctactttatgaaaaagtggcagactgggattaaaatttggtctaatacaaaacctcann

SEQ ID NO: 22114 - DNA, 489 bp, Homo sapiens; identical to SEQ ID NO: 22029
  misc_feature 1, 2, 3, 4, 488, 489: n = A,T,C or G

SEQ ID NO: 22115 - DNA, 817 bp, Homo sapiens
  misc_feature 1, 2, 3, 4, 48, 795, 796, 797, 798, 799, 800, 801, 802, 803,804, 805, 806, 807, 808, 809, 810, 811, 812, 813, 814, 815,816, 817: n = A,T,C or G
nnnnggagacagaatctctgtcacccaggctggagcgcagtggcgagntcctcggctcactgcgacctctgactcccgagttcgggcggttctcctgcctcagcctcccgggttgctgggattgcaggtgtgcaccaccacagcctgctaatttttgtgtttttggcggaaatggggtttcaccaggttggccaggctgctctcatagacttctggctattttaaaaccatagattaaggaaggattattataaattgcagttcaagctttttttttatcttagagcactataactgaatgtctttgttgtatcattgtaaacacagcaataaatatgcagttcttccctccctttttctccaccagatgttaacagggaacgacatgaagacttttacgcagagcttaaaacagtcaaccctctctgttcttacaagtttttgccccatcaatggctaaataaaagatgttgaaaactgtggaaaaaagtagaatgtatttaattagcaaacatttgatgagtggtatcatgctatcgagttggaatttaaggaagggaaattgaagatgtgttagatgtggtggtttcttcctcaagaagctcatggtctaatggtcatgctaaaaatgtgtatcactgagtaatgtggtagctatcagacttaaagcactgtaggcttggcatggcggctcatgcctataatctcagcacttcgagaggctgaggtgggagaaaagctttaggccaggagtttgagatcagcttgggcaacacagtgagatctcatctctannnnnnnnnnnnnnnnnnnnnnn

SEQ ID NO: 22116 - DNA, 1268 bp, Homo sapiens; identical to SEQ ID NO: 21760
  misc_feature 1, 2, 3, 4, 5, 6, 7, 8, 1266, 1267, 1268: n = A,T,C or G

SEQ ID NO: 22117 - DNA, 3524 bp, Homo sapiens
acccacgcgtccgcaccccgggagcgggctgcgcagtgtccggggccgagccggtgcgccgcagactagggcgcctcgggccagggagcgcggaggagccatggccaccgctaacggggccgtggaaaacgggcagccggacaggaagccgccggccctgccgcgccccatccgcaacctggaggtcaagttcaccaagatatttatcaacaatgaatggcacgaatccaagagtgggaaaaagtttgctacatgtaacccttcaactcgggagcaaatatgtgaagtggaagaaggagataagcccgacgtggacaaggctgtggaggctgcacaggttgccttccagaggggctcgccatggcgccggctggatgccctgagtcgtgggcggctgctgcaccagctggctgacctggtggagagggaccgcgccaccttggccgccctggagacgatggatacagggaagccatttcttcatgcttttttcatcgacctggagggctgtattagaaccctcagatactttgcagggtgggcagacaaaatccagggcaagaccatccccacagatgacaacgtcgtgtgcttcaccaggcatgagcccattggtgtctgtggggccatcactccatggaacttccccctgctgatgctggtgtggaagctggcacccgccctctgctgtgggaacaccatggtcctgaagcctgcggagcagacacctctcaccgccctttatctcggctctctgatcaaagaggccgggttccctccaggagtggtgaacattgtgccaggattcgggcccacagtgggagcagcaatttcttctcaccctcagatcaacaagatcgccttcaccggctccacagaggttggaaaactggttaaagaagctgcgtcccggagcaatctgaagcgggtgacgctggagctgggggggaagaacccctgcatcgtgtgtgcggacgctgacttggacttggcagtggagtgtgcccatcagggagtgttcttcaaccaaggccagtgttgcacggcagcctccagggtgttcgtggaggagcaggtctactctgagtttgtcaggcggagcgtggagtatgccaagaaacggcccgtgggagaccccttcgatgtcaaaacagaacaggggcctcagattgatcaaaagcagttcgacaaaatcttagagctgatcgagagtgggaagaaggaaggggccaagctggaatgcgggggctcagccatggaagacaaggggctcttcatcaaacccactgtcttctcagaagtcacagacaacatgcggattgccaaagaggagattttcgggccagtgcaaccaatactgaagttcaaaagtatcgaagaagtgataaaaagagcgaatagcaccgactatggactcacagcagccgtgttcacaaaaaatctcgacaaagccctgaagttggcttctgccttagagtctggaacggtctggatcaactgctacaacgccctctatgcacaggctccatttggtggctttaaaatgtcaggaaatggcagagaactaggtgaatacgctttggccgaatacacagaagtgaaaactgtcaccatcaaacttggcgacaagaacccctgaaggaaaggcggggctccttcctcaaacatcggacggcggaatgtggcagatgaaatgtgctggaggaaaaaaatgacatttctgaccttcccgggacacattcttctggaggctttacatctactggagttgaatgattgctgttttcctctcactctcctgtttattcaccagactggggatgcctataggttgtctgtgaaatcgcagtcctgcctggggagggagctgttggccatttctgtgtttccctttaaaccagatcctggagacagtgagatactcagggcgttgttaacagggagtggtatttgaagtgtccagcagttgcttgaaatgctttgccgaatctgactccagtaagaatgtgggaaaaccccctgtgtgttctgcaagcagggctcttgcaccagcggtctcctcagggtggacctgcttacagagcaagccacgcctctttccgaggtgaaggtgggaccattccttgggaaaggattcacagtaaggttttttggtttttgtttttgttttcttgtttttaaaaaaaggatttcacagtgagaaagttttggttagtgcataccgtggaagggcgccagggtctttgtggattgcatgttgacattgaccgtgagatttcggcttcaaaccaatactgcctttggaatatgacagaatcaatagcccagagagcttagtcaaagacgatatcacggtctaccttaaccaaggcactttcttaagcagaaaatattgttgaggttacctttgctgctaaagatccaatcttctaacgccacaacagcatagcaaatcctaggataattcacctcctcatttgacaaatcagagctgtaattcactttaacaaattacgcatttctatcacgttcactaacagcttatgataagtctgtgtagtcttccttttctccagttctgttacccaatttagattagtaaagcgtacacaactggaaagactgctgtaataacacagccttgttatttttaagtcctattttgatattaatttctgattagttagtaaataacacctggattctatggaggacctcggtcttcatccaagtggcctgagtatttcactggcaggttgtgaatttttcttttcctctttggggatccaaatgatgatgtgcaatttcatgttttaacttgggaaactgaaagtgttcccatatagcttcaaaaacaaaaacaaatgtgttatccgacggatacttttatggttactaactagtactttcctaattgggaaagtagtgcttaagtttgcaaattaagttggggagggcaataataaaatgagggcccgtaacagaaccagtgtgtgtataacgaaaaccatgtataaaatgggcctatcacccttgtcagagatataaattaccacatttgccttcccttcatcagctaacacttatcacttatactaccaataacttgttaaatcaggatttggcttcatacactgaattttcagtattttatctcaagtagatatagacactaaccttgatagtgatacgttagagggttcctattcttccattgtacgataatgtctttaatatgaaatgctacattatttataattggtagagttattgtatctttttatagttgtaagtacacagaggtggtatatttaaacttctgtaatatactgtatttagaaatggaaatatatatagtgttaggtttcacttcttttaaggtttacccctgtggtgtggtttaaaaatctataggcctgggaattccgatcctagctgcagatcgcatcccacaatgcgagaatgataaaataaaattggatatttgagaaaaaaaaaaaaaaaaaactgcggccgcaagcata

SEQ ID NO: 22118 - DNA, 724 bp, Homo sapiens
  misc_feature 1, 719, 720, 721, 722, 723, 724: n = A,T,C or G
ncgtccggctacagtagttgtctctggataaattaattatgattgtaggaaaaacaaagataatgaaaaaatttcaatgaattggtattttttttaatacacattatatacttttttaacataaatcttatttaaaggtactttaaagtttttggttagcaactgtttttgtctgttgtgggtagatccattctaccttcagccttcgggtcctacagttaggctctacttccctgtcagctcgcctcaggtggggatagtcagtgggacagcaggtgcacatcctggccaggcctcctgcactgccctgaagggccaccctggtggcactgaccgtggatggcctgtggtcgtggccctttctcctttctctgtctcatgtcttgtctgtatgctgcatgttctttgaagattgcctctttttaataaacttatttttttaatgataaacacttatttaacagtttaatgtttatgtttcctttttactcattagggtgaaaatgggatggaggattgtgtcatggccctagaaaccttgtttagtgttctgctttctctttgcagacttatggctccctgcacaccttttctcactgaattgatgtaccagaatctaaaggtgctgattgaccctgtttctgttcaggacaaggacacactcagcattcactacctcatgctgccccgcgttaattaattctagaagactttcgaannnnnn

SEQ ID NO: 22119 - DNA, 1150 bp, Homo sapiens
  misc_feature 1147, 1148, 1149, 1150: n = A,T,C or G
gcgtccgggaaaccccgtctttactaaaaatacaaaaaaattagccaggtgtggtggtgggtgcctgtagtcccagctacttgggaggctgaggcaggagaatctcgaacccaggaggcggaggttacagtcagctgagaccgcaccattgcactccagcctgggtgacagagcaagattccgtctcaaaaaaaaataaaaaaaaccaagaagaaaaggaatgaattagaacttcttctgcttggacttaagggcatcatcaggcaggttttgggtaggatagcaggggaggcagagacatagtcggggtcagtggtcatgagtgtggctttgagcccaaaaacttggtttctgttccctactttgccactcagtagtgcatgactttggccaaatttcttaaattcatgaagcaagtttccgggtgaatgaaatggggataaaaatagtgttcaaacctatccgttggtttgtgtgaaactgaaatgaatagtatcgtgcaggtacttgtgagcaaggggagctgctgtttcctgtccctttatgatgggaaatatctagacaagttcccaaccctctgcactgcaggctgcatggcacggagggtcttgtaacaccagctggggctggccttcttttaggagcttcagtggttctgaaaacttttatttgtttgtttgttttagtagatgtggggtctttctgtgttgcccggactggtctcgaacttctggactcaagtggtcctcccccgctcatgcctgtagtcccagcactgtgggaggctgaggcaggaggatcatctgaggccaagagttcaagatcagcctgggcaacatagtgataccctatctcttaaaaaagaagaagtttttaaatttgaaataataataggtactggatttatgcaaatgtcttttctgcgtcttttgagatgagtatcaggtttttttttttccttttatcatctgatgatgaacttaatgtttccatttgtattaatggaatactaagtccctctgtgatttctgaaccaagctattcctaggcctgagttttattttgttgacacagaaataaattagaaagccaagcgtggtggcatgtgcctgtagtcctagttgctgaagtaagaggattgcttgannnn

SEQ ID NO: 22120 - DNA, 491 bp, Homo sapiens
acttccagggagacaccgattataagaagagaaactcagcgctggggaagaagacaaataaaaagaagtgttaagaattgcctttgggactctgaaggctgaagaattgatgaattgcaagtttgtgccccatagctgcacagaatgtttcatcattactaacaggatattcctcatgacattgctgtctgatctttgaccatcagtctgtgacctgccccttctctttacgtaagtaaaagtgatttctttacctttaaaaaaaaaaagtaccaacgcagggctgagccccagctgtccttgacagggtgtctctgccagcctctgcagggaagcaggactgaccaaaatcagccccggggcccccctctggctgccctgcagtcctggtgtcactgccgagtgctccggggaaaggactgtcaggcacaatgtcactgacagagtctgtggagttctgggggctgttacaagtcctgggcgtaagtggc

SEQ ID NO: 22121 - DNA, 687 bp, Homo sapiens
  misc_feature 683, 684, 685, 686, 687: n = A,T,C or G
acgcgggggaagtggcgcgtcccttagcaactaaagctggcaactgggaaatcgtccggtgctgcaggtctcagccgaagggcgtcggaaactgcgctcgcatcgagcagtttccagcctcctgggtaaaggagcagtctcctcccttgcttgggactctggacgcatctcattccggtgaaagtaagggacagcttaggaccagaagcctttcgcggagaaaaggctgacatgcccgtcctatatgacaggttactgaagctaaaggagatgtttaactccaagtttggatctattcccaagttttatgttcgagcaccaggaagagtcaacataataggagagcatatagattattgtggatattctgttcttcctatggctgtagaacaagatgtgctaatagctgtagaacctgtgaaaacgtacgctctccaactggccaatacaaatcccttgtatccggacttcagtactagtgctaataacatccagattgataaaaccaagcctttgtggcacaactatttcttatgtggacttaaaggaattcaggaacactttggtcttagtaacctgactggaatgaactgcctggtagatggaaatatcccaccaagttctggcctctccagctccagtgctttggtctgttgtgctggcttggtgacgctcacagtgcnnnnn

SEQ ID NO: 22122 - DNA, 502 bp, Homo sapiens
  misc_feature 502: n = A,T,C or G
actgctgattggttggggatgcaaccatcggggtgtggaagctggtcctggtgcactcagttggcttctgggtgggagccacggaagagttgctggtcccggtgggtccatctgactttgaagcatcttttgcagtttgaatgtttccagtgatgtctgagcagctcacagcaacaggcacaaaagttgtccatacgtaagctgtggtggtgagttctctttaagtctagattaagttgtccagcttcagcttgcagggcttccggaaaagggcagtttttgttctgtaatgccaataggtttggatgaattcttctcttcttcagatctttaaaatatatctaaagtttctgggcctttttttcataaggctaaaaaacccagtagtctatgcacatttttaaatatgatgctccagccaaagccttggtaaaataaccaatgtttccaattgtattcaatgacaccctccaaatgtgcaaagagaagcagtgagcacaan

SEQ ID NO: 22123 - DNA, 505 bp, Homo sapiens; identical to SEQ ID NO: 20929

SEQ ID NO: 22124 - DNA, 339 bp, Homo sapiens
ccgggcaggtacgcggggaggtcccggaagagccgcttggagcgcggcacgttcagccctgagagcgcagcggggacggaggaagtgctgtggaacatcagatagaatggatagcacagcccaaattttacaaaaaggattttaaaggaagatctcaatggtggaacactagaggctttcctgctaaagttaagaacaagcaaaggctgacgcagttttggcatacaggaagtgttggagctgagactcgaaactgtcccccaggccttggccatgctgataaatatctaggccctacaggagttcgtgtccatgaacccagtaaacgcaattcctcag

SEQ ID NO: 22125 - DNA, 471 bp, Homo sapiens
  misc_feature 1: n = A,T,C or G
naggtacccccattctctgattataaacagataaacccaaatgtggatcatccttggaatacccccattctccttgcctcttagcatgtttgatttaagaaaagcctccaggaaatcttgagagcctgtcttggcataatgcagtgtcacctgtgccaaccatggggtgtcccgtgagtgtgagtgtggcagtgagaagaagcatcgagggcgaggggaatatgaaagttggtcttcacctaattacctgtttggtttggattttcaagagatgattgggcttcttagcttttctgaattctgcagtattttctaaacaggatagattatgatctcggtccccatccatcctaacttctgagttcatctctgtctctgctttacagtctttaattttttgttgttccttcatttttttctttttaataagacatagcagaattccttaggtatgggatttatgagaccagt

SEQ ID NO: 22126 - DNA, 2570 bp, Homo sapiens
  misc_feature 2569, 2570: n = A,T,C or G
acgcgtccggcgggcgggggcctctggtagccctggggacgctgtatctgtgggctcttgaatcgcgtcacaaatcagcgaccgaactctggcggtggtggttaagacggcgaaggcggcagcggcggcgacagctctggggtttgcgtctcggggtgtgtcggccgccgctgctgcttgggcctggtatgtacagatggctggttaggattctcggcaccattttccgtttctgcgaccggtcggtgccccctgcccgggccctcctgaagaggcggcgctcagacagcactctgttttctacagtggacactgatgaaataccagccaaaagaccaagattagattgctttattcaccaagtgaaaaacagtctctacaatgctgccagcttatttggattcccattccagctgaccacaaagcccatggtaacttctgcttgtaatggaacacggaatgtggccccttcaggagaggtattttcgaactcttcatcttgtgaactgacaggttctggatcctggaacaacatgctgaaactgggtaataaatctcctaatggaataagtgactatccaaagatcagagtgacagttacccgagatcagccacgcagagtcctgccttcctttggttttactttgaactcagaaggctgtaatagaagaccaggtggccgtcgccatagcaaaggtaatccagagagttctttaatgtggaaacctcaggaacaggctgtaacagagatgatttctgaagagagtggcaagggtctgaggcgtccccattgtactgtggaggagggtgttcaaaaagaggaaagagagaagtaccgaaagttattggaacgacttaaagaaagtggtcatggaaactctgtctgtcctgtaacttcaaattatcacagttctcaaagaagtcagatggacacattaaagaccaaaggctggggggaagagcaaaatcacggagtcaaaacaactcagtttgttccaaaacaatatagacttgttgaaacaaggggacctctatgttcattgagaagtgaaaagaggtgttcaaaggggaaaattactgatacagagaagatggtcggaatcagatttgaaaatgaaagtaggaggggataccaactggagcctgacctatcagaagaagtgtcggcccgactccgcctgggcagtggaagcaatggcttactcaggaggaaagtgtcaataattgagacaaaggaaaagaattgctcaggcaaagagagggacagaagaacggacgatctccttgaacttacagaggacatggaaaaggaaatcagtaatgccctaggccatggcccacaggatgaaatcctaagtagtgctttcaaattgcgaattactcgaggagatattcagacattaaagaactatcactggctcaatgatgaagtcattaatttttacatgaatcttctggtggaaagaaataaaaagcaaggctatccagcacttcatgtattcagtactttcttctatcctaaattaaagtctgggggttaccaagcagtgaaacgatggaccaaaggggtaaatctctttgaacaagaaattattctggtgcctattcatcggaaggtacattggagcctggtggtgattgacctaagaaaaaagtgtcttaaatatctggattctatgggacaaaagggccacaggatctgtgagattctccttcagtatttacaggatgaaagtaagaccaaaagaaatagtgatctgaatcttttagagtggacccatcacagcatgaaaccacacgagattcctcaacagctgaatgggagtgattgtggaatgtttacttgtaaatatgcagattatatttctagggacaaacctatcacatttactcagcaccagatgcctctcttccggaagaagatggtgtgggaaatccttcatcagcagttgctgtgagaaaactttgcctggtccctctagctgctggtggttctttcacagacatttccatatacctcatgcattgtgggttaaaaagtccctgcatcacttctgttctcacaggtactgagctgtcaaaagtgcatgaaggcctctcactgtactctagtcctgacttggggtgcagagggctgcttgcaatcctgtttgtaaggctgtgcctgctcagagctttggactgttcaacccacacaagaacaaacgctaactaatattttttttaagagattcttttccctatgaatgtgggaaatgcaggatttattctgtgaattgtttgtttctgtgtgtttgttcagcgtattcattcactcactcgtttgcaaacataatgggcagtggtcatttactgctgctcttttacagttagctctaaattacttgtttgaactatttatttctgaaaggaatgttactcaagctgccactccctgctgaagagcaggagggaactctcactgggggcggaaggaagtggagctggagcagtaactgccaatatggcggcggagggtttgggatttccgtgggtttgaggtcaaaaaatgtgggagaatgaaatgtgnn

SEQ ID NO: 22127 - DNA, 1042 bp, Homo sapiens
  misc_feature 1, 2, 3, 4, 1035, 1036, 1037, 1038, 1039, 1040, 1041, 1042: n = A,T,C or G
nnnnagtcgaccacgcgtctggactaggctgggcaacatagcaagaccccatctctacaaaaaaatttttaaattagccagaggtggtggcatgcacccgtagtcccagctgctcgggaggctgaggcagaagattgctcgagcccaggagttcaaggctgcagtgagctctgattgtgccactgcactccagcctgagtgacagagcaaaacctggtttcctaagggggggataaaagagggagagatgagatcggggtgtcccgcttctgtgcatgtggagggggtaactgggaaccgtgtactgtaggggatcgcacaccttggggtggaaacagcagctctccggagttgcatgggagccatgggcagtggtcctggctggtgaaatgattctagccacgtggcccacccagggggcaaaacaatagaaaccttcagaaatgaaacgtcacctggctgcaagaagatagtcccacaggcgccctagagatggggatgccaagtggcttctcgggaagctgtaagaatccacagggcattgtaagatggagggaaatattaagttttcttcgtaaagaggtgaggggggcgagagcagcaaaggacactggaaaatgagaagcatggatgggaagtgttgcattgagcataatttggaggtaaaatctccaacaccgtaactgagtggcctggggacctgatagaaagccttgctcaggactaaggcagagttcccagttatatcgcagatacaaagagaccaggaacacgcttgtaatcacagcacttagggaggctgaggcgggtggatgacctgaggtcaggagttcgagaccagcctagccaacatggtgaaacccccatctctactaaaaatacaaaaattagccaggcgtggtggcacatgcctgtaatcccagctactcaggaggctgaggtgggagaatcgcttgagcccgggaggcaggggttgcagcgagctgagatcgtaccactgcactccagcctgggcaacagagtgagaccctgtcnnnnnnnn

SEQ ID NO: 22128 - DNA, 1308 bp, Homo sapiens
  misc_feature 208, 209, 210, 211, 212, 213, 214, 215, 216, 217, 218, 219,220, 221, 222, 223, 224, 225, 226, 227, 228, 229, 230, 231: n = A,T,C or G
tcgacccacgcgtccgctcacagcccagccccctccagagccctgccccaccgcaccctgcttctccagggcctagcagaccagcatctgccccggtgaagggatggatcagctgtgggggtgggtgcagaaggttgccacctcctacctcagcgggagtcacctaggaaagatggagggattgacactattttctcaataaaatggnnnnnnnnnnnnnnnnnnnnnnnnggccctgtgaaacttcctgttcccagctgcatcagagagcctgtctggggccaaggttgccagagatttctgaagacacagcttgttccttgttcttggctggtgggtgcacaaggacttctggaagggatttagacggggctgagtgctaggattaaagtggggatgggagtacggcaacagaaaaacctgggagctagcaatgcacccagcccttgactgtgccctggtggacagccgagctgtggctctagcgtgagccagtgccttcctgtccctgccaagggtgaggccagagttggccccgaggctaatgtttcagtgggtgagattaggtcggccgtacagaggccggtgggctccctgacatcccttccaggcaacctgaaagcactgaaatagcttatggccctgtgccagggaccttggcccaagctgctgacctccagggtggggagggagctacccccaggagaagagtcactcagacagcagtatgagcaagccagccagcagctccgtgcctgcacccagctcaggggaatcccagggggttcagatgcccaggaaggaaaaggggacagcgctactgctatggaatgagaccaccacttctcctgttgtccttcccagcttctccccaacctccccttttccctagtttataagacaggagaaaagggagaaagcaaaaagttggaaagaaacagaagaaagataaatagctagacgaccttggcgccaccacctggccctggtggttaaaatgataataatattaacccctgaccaaaactactggtgttatctgtaaattccagacattgtgtgagaaagcactgtaaaactttttgtactgttagctgatgtaggtagcccacagtcacattcctcacacttacttgatctattatgactctttcacgtagaccccttagagttgtaagcccttcaaagggctaggaatttctttttcggggagctcggctcttaagatgcgagtctgctgatgctcccggccgaataaaaaacctcttccttcttaaaaaaaaaattggtgcggccgcaagcttattc

SEQ ID NO: 22129 - DNA, 604 bp, Homo sapiens; identical to SEQ ID NO: 22096
  misc_feature 1, 2, 3, 4, 5, 6, 7, 599, 600, 601, 602, 603, 604: n = A,T,C or G

SEQ ID NO: 22130 - DNA, 499 bp, Homo sapiens
acctaagtagacactttttgtctatcttttcgtctgctaaagagagagcattgtgtaggagctctttagagttgctcttagaagcatacttttgtggaagagtgggaagaaataatcataaatttatttcacagttgatgtgtgactactttttcaagtgtatgacttgtaaaagtgggattggtgtatttgagttagtggatgaccattttgtagagttgaatgttggtgtcactggccttcctgtttcagattccaggatcatagctggtcttgtgcttcagaaagatttttctgtgtacgcggggagccaaggagggagggtcttcctttggcatgggatggggatgaagtaaggagagggactggaccccctggaagctgattcactatggggggaggtgtattgaagtcctacaaacaaccctcagatttggtgatttcctagtagaactcacagaaataaagagctgttatactgcgaaaaaaaaacaaaacc

SEQ ID NO: 22131 - DNA, 2486 bp, Homo sapiens
  misc_feature 581: n = A,T,C or G
acacgaagcacacagcaatgacgaaaacacgccaaaagaatatcttccccttctagtgttttggtgtttccctcttcccgtttgttctcattttctacaaacgtgtaactgcttgtctatcccttttcgccctggtctgttcttgccagttcaaccgtgggcaccccagccccattttaacttatttaattactgcgccagcccgtgtgctcatcctgtaatccacaccttggagcccgagcggtgatcacctgagtcaggatttgaaccagcctggccacatgcgaaccctctctactaaaatcaaattagctgggttgtggcaggtgcctgtaatcccagctatttgggagctgagcaggagaatctcttgaacccgagggagagtttccattacagagatcacgccattgcactcagcctggatgacacagaccaaattccatctcaaaaggaaaaaagattttactgggcatggtggtgtacacctgtagtcccagctacttgggaactgaggcaggaggatcgtgtgagcccaggaggttgaggctgtagtgagctatgatcgcaccactgcactncagcctgggcgacacaagcgagaccctgtcttccaccaaacagaaagaaataactgtctggacgtcacggttggaaaacacgagagtggctacagctgatgccttacagatgcgtagacaaattacgaataggacttggttgggattcgcttagcagcagatggctttgcagtttccaggcagcccaaggcttctgccactctcagactgtctctgcgctgagcagccactgggggtcccctgagacagagtcccctgggccctgtggctggtaccttcccagcataatggatgatggagaactcagtcttgtccttgagctgcttgggcttctggaacttggggtggctgccctgctccgtgcacagcttctccacgaaagacttgtccgtggctttggggaaccagcattcctcgtccagcagggccagcacacctggagggttgttcggtcgctcgatgagctcgatgcagggctgtaggtccagcccaaagtcgatgaagttccactcgatgccctcgcgctggtactcctcctgctccaggatgaacatggtgtggttgaagagctgctgcagcttctcgttggtgtagttgatgcacagctgctcgaaggagttcacctcaaagatctcaaatccagctatatccaggatccccaggaaggaagccccttgccgatgggtcttgtccagggctttgttcacgcgggtgagtatccagcggaaaaggcgctcatatgttgccttggccaaagcctctacagcaaagtcagcctgttcttttgtctgagctttctgtaccacatctcgcccaaccttgatacgaggagtgaggatggatctggtgaaatctgtcacattaattcccatgaggtggcaaactttctgagcagctgtgttatctggcatggacgcctggtctgtgtttctttccttcttgaagacgatatttccaagctgcaggaccgatgataccaccttcaatatggatagctgctcctcctcgctgaaacccatgattgccatggcctccacggtttcctggaacatctcatcatcctgggctgctgggatgggcacaaagccattggagaggaaggtgtagttgttgaagccctccaaaagcaagtcacttctcatcttctccttggctccagcaatcatgtagtaaaagatgtggaatgtcctctcgtctctggcttggcgaattgcccgtgatttttctagcagataggtctcaatgttggctcccacgatgtaacccgtgacgtcgaagttgatgcggatgaatttgccgaatcgtgaggagttgtcgttcttcactgttttggcgttgccgaaagcctccagaatcgggtttgcttgtagaagctgcttttccagctctcccgtgatacttgtgtctttcttgcccttgtgggaggaggccaccacggccaggtactgaatgaccttcttggtgttttcggttttcccggctccagactcgcctgtgcatagaatggactggtcctcccgatcttgaagcatgctccggtaggccgtgtctgcgatggcgtagatgtgaggcggcatctcgtgcctcttcttgcccttgtacatgtcgacgatcttctccgagtagatgggcaggtgtttataggggttgaccaccacgcagaagaggccagagtacgtatatattagccctgagaagtaccgctccctcaggttgtgtagcacggaggcttcgttgaggcacgtcagctccgccatgtcctccaccttggagaacttgggtgggttcatcttctggatgtcatctttcccaaccgtgaccttcttgccattctccaccagctccacaaccacctcatcccccttctcctccttaatgctgcggacgcgtggtcgactccctata

SEQ ID NO: 22132 - DNA, 2115 bp, Homo sapiens
  misc_feature 1, 2112, 2113, 2114, 2115: n = A,T,C or G
nacagcaaatacttccgtaaaacagaccatcaagctttccacttagagcccagtgtggccccaatacctttccttgtcgctcctgcgtgccagtccgcctccgcgtggtccggccgctgcgccacgcccccgctcgccccgcccctggatttgctccctcaaagctgaagtgaggccgggctgaggctcttacagtggtccctgctggcccttggtgacgggtcgcgtcagttccgacccggacccgtacgctgctgcgctgacgtggctcccggaagtagggctggcgtagggccgccatgttgcagcaggatagtaatgatgacactgaagatgtttcactgtttgatgcggaagaggagacgactaatagaccaagaaaagccaaaatcagacatccagtagcatcgtttttccacttattctttcgagtcagtgcaatcatcgtctatcttctctgtgagttgctcagcagcagctttattacctgtatggtgacaattatcttgttgttgtcgtgtgacttttgggcagtgaagaatgtcacaggtagactaatggttggcctacgttggtggaatcacattgatgaagatggaaagagccattgggtgtttgaatctagaaaggagtcctctcaagagaataaaactgtgtcagaggctgaatcaagaatcttttggttgggacttattgcctgtccagtactgtgggtgatatttgcctttagtgcactcttctccttcagagtaaagtggttggcggtggttatcatgggtgtggtgctacaaggtgccaacctgtatggttacatcaggtgtaaggtgcgcagcagaaagcatttaaccagcatggctacttcatattttggaaagcagtttttaagacaaaacactggagatgatcagacttcctgaatagagaaagcttatgtgctttgttacattggggaacaactgaagagattcttgactcaaccttttagagcttagtccatgttgcaacgaggagtgttggctttgtttttccacttaaaaactttatttataaaaaggaaaagtagttttcatattaagtttttatttcctttccagcagttggggctagaaagtatgtgttggcactagaaacattgtcaagatttgttctgtggtgtaggtatgcacattccataggtatgcacacggccatgtaatatcagtatatcccaagttaatgaaagtgttcatttacataggtaatggagacctttgcattttgatccatagaacataggaggatgttcttagtctgtctcaaagctctatatgtttacatattatttctgtagattgttttcaggagaaagttttgcttctatggtaagagtgagcactttggcttatgtataagttagaaataattgttagtttttaatatgcacttcgtggggaaatttcttagacgtatgcaagcaagtgaaaacaattagggccagtggtattaactactttataaaattttatttttgtttgtaagaagtcatctacttaaggcccagttaatataagtggaatcatcatagtttaaggaatacccagagattgctgctgttctatttattttacagaaagggtagctagattgaaagctcttcagtggaccttgagctaatagatcttttaccactaaaagagcattattctcatgtcataatgagaataataatttacatacttggcataataaatgcctaaaagacattttattttctgaatctatttttttcttgctataatggggatattgtaaattatgcatttgtattaatggtatttcttaaagcaatctatgtaactgtaaattaaaccaatctacaaactattgtaggcatctgtaaattctgttgtaggtattataaactttgttgaagtcttaatcagcagattatgttgtgaatatatttgtacattgttaaaatagtttttaagattatttgtttaattgaataagtgtcttattggagtgatagctttgaaggtgcaaaactttatatttgtataaaattctactatttacaaggcaaaaaaaaaaaaaaatctcatttaacccgtatgataaatatgtaatacnnnn

SEQ ID NO: 22133 - DNA, 671 bp, Homo sapiens
cacagtaaagatacaatatgaatgtacttataccagctaagcagcagtaaactgaaagtaaaaagcatagctagctagagagatgaataaacagcaatgtttatgtcctgcagccagatgacaatgcactgttgcagaagaatgagtttcagacctttgcagctttggccttctctagctgctgaagctgttccagggcagggcctggtgtcgtggtgtccagaggaagatcccatacactaccaccttcccaaactgtaggctgtgaagctgttggctgaagctcccagatagagccagtatctggcacggacacagacctagttactgagggaatgatgttctgatcagatattctcatcttcaaggtctgaaactgttgaagaagaagtgccaactgctgctgctgctgggaagacagtgctgctttctgctgttgggccaaaacctgtgcatattgttgttgtattaaaaactgctggtactgcaggtgctgcatctggtataaggctgtgagttcttgctgcctggtcagtcgttcctggtccagctctcccatatgaggagggggagctggacctggagaaaagggaacccttcgtcgacgcggccgcgaatttagtagtagtagtcgacccgggaattccggaccggtacctgcaggcgtacca

SEQ ID NO: 22134 - DNA, 745 bp, Homo sapiens; identical to SEQ ID NO: 20943
  misc_feature 1, 2, 3, 4, 5, 6, 7, 8, 9, 10, 11, 12, 741, 742, 743, 744,745: n = A,T,C or G

SEQ ID NO: 22135 - DNA, 1245 bp, Homo sapiens
cgcggagcctggggaagcttttccagtagtactttccggcgtgttgaccctatttcccgtgctgcaccgcagcccctttctcttccggttctaggcgcttcgggagccgcggcttatggtgcagacatggccaagtccaagaaccacaccacacacaaccagtcccgaaaatggcacagaaatggtatcaagaaaccccgatcacaaagatacgaatctcttaagggggtggaccccaagttcctgaggaacatgcgctttgccaagaagcacaacaaaaagggcctaaagaagatgcaggccaacaatgccaaggccatgagtgcacgtgccgaggctatcaaggccctcgtaaagcccaaggaggttaagcccaagatcccaaagggtgtcagccgcaagctcgatcgacttgcctacattgcccaccccaagcttgggaagcgtgctcgtgcccgtattgccaaggggctcaggctgtgccggccaaaggcacaaggccaaggccaaggccaaggccaaggccaaggccaaggccaaggatcaaaccaaggcccaggctgcagccccagcttcagttccagctcaggctcccaaacgtacccaggcccctacaaaggcttcagagtagatatctctgccaacatgaggacagaaggactggtgcgaccccccacccccgcccctgggctaccatctgcatggggctggggtcctcctgtgctatttgtacaaataaacctgaggcaggaaaaaaaaaaaaaaaaaacaaacgacaacccaacagcaccaaaacaaaaaactcagaggccatacatgagacgggcagcagaaaacacgcgcataacaaggggcacgtgcacaacagatgtcctcgaacccgcatgttggacacgggggaacacagcgggggaccccataaaaagggcggccgaacatacatcgagaaaccggggtacggaagacgcagcgaaacgacagcaagaccacgagcccagcggccacacacgcacgcgccgtgtcgaaggtgcggtgcggggcactgacatgcagagggctgacaacgcgctgcagctccgcgcgcacgacacacagcggatcgcccgccacgtgtgacatggctctgagccagcgcagtaccgcaacacgtaccaacgtgtccccgggtcgcccgtcagcagtgctcgtgagtgcagcagactcgaccgtcacgcacgagacacagcgacatggaaccggcgagca

SEQ ID NO: 22136 - DNA, 4534 bp, Homo sapiens
ctatcgttttgctactacactccaccctggacaactgactgaggccttgtattttcctttttttttttttttttgagcctgggcaatatggtgatgccctgtctcaacaaaagatagctgggcatgtcagcatatccacccctgtagttcagttactcaggagcctgaggcgggaggatagattgcaccgtagagattgaggctacagtgagctgtgatcgtgccactgcactccagtccgggcaacatagtgagaccctgtcttaagaaagaaagaaaaaaaagaattcagagacactaatataagtatggtggtgggcaaaatgtggtcaaatagtgttagaaatttgtatcttttgtcttttttggtgcaggttttgcagacattgggtacagaaacttaccggcctagttctgcctcacagtgtgtggctggtattgcttgtgcagagatcccagtaaaccagtggccagaactcattcctcagctggtggccaatgtcacaaaccccaacagcacagagcacatgaaggagtcgacattggaagccatcggttatatttgccaagatatagacccagagcagctacaagataaatccaatgagattctgactgccataatccaggggatgaggaaagaagagcctagtaataatgtgaagctagctgctacgaatgcactcctgaactcattggagttcaccaaagcaaactttgataaagagtctgaaaggcactttattatgcaggtggtctgtgaagccacacagtgtccagatacgagggtacgagtggctgctttacagaatctggtgaagataatgtccttatattatcagtacatggagacatatatgggtcctgctctttttgcaatcacaatcgaagcaatgaaaagtgacattgatgaggtggctttacaagggatagaattctggtccaatgtctgtgatgaggaaatggatttggccattgaagcttcagaggcagcagaacaaggacggccccctgagcacaccagcaagttttatgcgaagggagcactacagtatctggttccaatcctcacacagacactaactaaacaggacgaaaatgatgatgacgatgactggaacccctgcaaagcagcaggggtgtgcctcatgcttctggccacctgctgtgaagatgacattgtcccacatgtcctccccttcattaaagaacacatcaagaacccagattggcggtaccgggatgcagcagtgatggcttttggttgtatcttggaaggaccagagcccagtcagctcaaaccactagttatacaggctatgcccaccctaatagaattaatgaaagaccccagtgtagttgttcgagatacagctgcatggactgtaggcagaatttgtgagctgcttcctgaagctgccatcaatgatgtctacttggctcccctgctacagtgtctgattgagggtctcagtgctgaacccagagtggcttcaaatgtgtgctgggctttctccagtctggctgaagctgcttatgaagctgcagacgttgctgatgatcaggaagaaccagctacttactgcttatcttcttcatttgaactcatagttcagaagctcctagagactacagacagacctgatggacaccagaacaacctgaggagttctgcatatgaatctctgatggaaattgtgaaaaacagtgccaaggattgttatcctgctgtccagaaaacgactttggtcatcatggaacgactgcaacaggttcttcagatggagtcacatatccagagcacatccgatagaatccagttcaatgaccttcagtctttactctgtgcaactcttcagaatgttcttcggaaagtgcaacatcaagatgctttgcagatctctgatgtggttatggcctccctgttaaggatgttccaaagcacagctgggtctgggggagtacaagaggatgccctgatggcagttagcacactggtggaagtgttgggtggtgaattcctcaagtacatggaggcctttaaacccttcctgggcattggattaaaaaattatgctgaataccaggtttgtttggcagctgtgggcttagtgggagacttgtgccgtgccctgcaatccaacatcatacctttctgtgacgaggtgatgcagctgcttctggaaaatttggggaatgagaacgtccacaggtctgtgaagccgcagattctgtcagtgtttggtgatattgcccttgctattggaggagagtttaaaaaatacttagaggttgtattgaatactcttcagcaggcctcccaagcccaggtggacaagtcagactatgacatggtggattatctgaatgagctaagggaaagctgcttggaagcctatactggaatcgtccagggattaaagggggatcaggagaacgtacacccggatgtgatgctggtacaacccagagtagaatttattctgtctttcattgaccacattgctggagatgaggatcacacagatggagtagtagcttgtgctgctggactaataggggacttatgtacagcatttgggaaggatgtactgaaattagtagaagctaggccaatgatccatgaattgttaactgaagggcggagatcgaagactaacaaagcaaaaacccttgctacatgggcaacaaaagaactgaggaaactgaagaaccaagcttgatctgttaccattgggatgataacctgaggacccccactggaaatctcccatcttttgaaaaacctggaagtgaggagtgtgcacggatgctgaatgtttgggaatgagaggatgagtgagtgaggcttgaaaacacaccacattgaaaatcctgccacagcagcagccgcagccgccaacagcagcgctgttagtgagctaagtaagcactgacttcgtagaaaaccataacatcggccatcttggaaaagagaaaaacaatggagttacttatttaaaaaaaaagaaagaaagttatctcttcccaggagaggctagaagtagcttttctgtcttttggccagtgccgagtggaatgcctggtttgggggaggaggagggactgggttcagctgtggtgctttgttgtaaaaggcagcctggcctttgctactgaggagaaagatggagcctgggtctcaagcccaccttcgctgtacctttgccacatggtactgtatgcttgccagctagaaggagggtcagggattttttacagtctgagaatgagtgtgtgtgagtgaggcggtatccacattctcaacttcaagtcattgcagtttctttttcccagaaaacaaggggttagatgttgcatttcataaaactaaccgaagttctgtctactgatgcagcacaagagatgtacatcaaacatcgccaaaaaaaaggggggccccaaacaggggacagggggaaacaaaaggcccacagagggtgggggacccccctggaagcagagtgagataagataacacaagcagactccgacacacaggttgtcggcgcggcgcgccgcccggttacaaaaagaaaaacaaaaaacaaaaaataacacaagaaacaaagaaacaaacaaaaaacaacaacagccatagaagtataaaaacgcaaaaaaacaaacaaaaaacacgacaacacaagaaaccgacataacacaaacaaaacaacagaacgagaggacaaggacgacacgagaaggagaaaagagatgagagagagaaaagaacaagaaggagaagagaagaaggacaggaagatgagagagaagaacaaacaagaaggaaaaccgagacgaggcagaaacacaaacacacacaacacaacacagacaaagacgacagacgaagaaagaagcacaggagacccgaacacgcaacaccacacaacagaaacagaagagagagaagacggagaacgaccgcgccacggggacagacaacagcacagcgagaaagagcggaagaagacaaagcagggagacggaggaaaaggagaaagaagagaagaaacaggagggaaaaggaggagagaggagaagagcggaaagagaggaagaagaacggaacgagagagaaaacacacaaggagaagacaagcagcgcgcagaagaggcacgagggacggagaagcaaagaagacaccaacaacagaagagtgacgaagcgaagaacaagagaagagagagggaggggaggaacagggagaaaaacgatagagaggagagcgagaggcgagagaagggagcagaaagcaagcagtgaaaaaagagaaggagaggacggacagagcagaggaagcaagcagaaaggggagagagagacgaagaaagggagaagagcagagagaaaggcgggcaagagggacgaaaagagaagagaacgagagagagaaagagagagagaacgcggcgaagagaagaggagaagacagacacagcagacgacagaagagacagacccgaagtaagcgagagaggagaagcagacaga

SEQ ID NO: 22137 - DNA, 1159 bp, Homo sapiens
  misc_feature 1, 21, 44, 66, 85, 1158, 1159: n = A,T,C or G
nggccccaggttacacttatnctccgctcgttttgttgattgtngcgatacattcacacggaacanttgcctgttccgattaatncgctcactataggaatttgccctcgagccaagattcgcacgggctttccccccgccggcttgttgctcagcgtcggaggcggtagtgacggtggcgtttccttgaggaagagtgagggttccaacttttctgcttatctgggaggtgttgggcgcggacagtcgagatgtcagagaaaaagcagccggtagacttaggtctgttagaggaagacgacgagtttgaagagttccctgccgaagactgggctggcttagatgaagatgaagatgcacatgtctgggaggataattgggatgatgacaatgtagaggatgacttctctaatcagttacgagctgaactagagaaacatggttataagatggagacttcatagcatccagaagaagtgttgaagtaacctaaacttgacctgcttaatacattctagggcagagaacccaggatgggacactaaaaaaatgtgtttatttcattatctgcttggatttatttgtgtttttgtaacacaaaaaataaatgtttatataacactggttcgatatccaaaaaaacacaaccacgcagagcagcacaccaacaccgttgtgggggccgggcgggtggccctgagagaggttttcaagacccatctcggtgggggcgcgggggccctggagaaccggcaacatgggcaacaggggacccaagagagccccggcaacgacgaaggggcgggggtccccaccaaataaaaacacggccggggggagaccccgaggggttttagacaaaacaccaccagggggctccaggagaccaaaaggcagcacatacacagggggcgccagggagcctattaattacccgcccccgcccgtgggcgcggtagctgcgcacagagagacgatgcactaaacagcaagacaacaacaagcagcaacagaaaccagcagcgagcagaggacaacaagaaccagcaacaagcagaaggaaagagagagaagaacacgccacaaagcagaagagacagcacaaagaagcacagacgacaataaagcacagacagaatacaacgacagacgaaagcnn

SEQ ID NO: 22138 - DNA, 4378 bp, Homo sapiens
  misc_feature 1, 2, 3, 4369, 4370, 4371, 4372, 4373, 4374, 4375, 4376,4377, 4378: n = A,T,C or G
nnnactataggctgaagcttcaccatgggcggcatcttttacccatacgatgttcctgactatgcgggctatccctatgacgtcccggactatgcaggatcttatccatatgacgttccagattacgctggtggggatccccgggcgacccacgcgtccgcggaaatggaggaggagacagagttccttgagctcggaaccaggatatcaagaccaaatggactactgtcagaggatgtaggaatggacatcccctttgaagagggcgtgctgagtcccagtgctgcagacatgaggcctgaacctcctaattctctggatcttaatgacactcatcctcggagaatcaagctcacagccccaaatatcaatctttctctggaccaaagtgaaggatctattctctctgatgataacttggacagtccagatgaaattgacatcaatgtggatgaacttgatacccccgatgaagcagattcttttgagtacactggccatgatcccacagccaacaaagattctggccaagagtcagagtctattccagaatatacggccgaagaggaacgggaggacaaccggctttggatgacagtggtcattggagaacaagagcagcgcattgacatgaaggtcatcgagccctacaggagagtcatttctcacggaggagattcaggatactatggggacggtctaaatgccatcattgtgtttgccgcctgttttctgccagacagcagtcgggcggattaccactatgtcatggaaaatcttttcctatatgtaataagtactttagagttgatggtagctgaagactatatgattgtgtacttgaatggtgcaaccccaagaaggaggatgccagggctaggctggatgaagaaatgctaccagatgattgacagacggttgaggaagaatttgaaatcattcatcattgttcatccatcttggttcatcagaacaatccttgctgtgacacgaccttttataagttcaaaattcagcagtaaaattaaatatgtcaatagcttatcagaactcagtgggctgatcccaatggattgcatccacattccagagagcatcatcaatattgacttgaagctgaaagaaaagccttagttggccatgctggaagaagaggatgcttttctggttcatggttctgttgaaacatatctacctgaaagagacagggctgatgttacctttttccactttgcactacctggtgccattctaaatttctaaggggaaaaatagaaagtttgtttactcttaagatattttatgaaattgtgtgtactttcctattttgccaattatgtgcctcaaagattttagttgagccttagcaagaaagtaggaccttccatttcaatacttcattaacacggtgtagtgatactttgtcccttagactggtgtttaccagtaagatacctttaatccactgttaagtatgagtggatttgtttccatagattagctggatttccttttggtgattgcattaggtttaaagtacacaggtctcaactctccccaggaaagtttcccctgtttgactccacctttaaaatcctaagcctgactaggacagccacaaaccacacaaggtgtaaaaccatcatcagctaagtgcccgttttgttcttgtttaccagaatctcctttaacttctcaaagggaagccgggctttctaatccacgtcaactttattttagttgtcaaattgggcattatattttatgtaaattggtcttttaacatcattttcctgatgaatgttggtgaccaccacattgtgaaatttaagaatccgtgttgcatgtttggtagctctctgagtttcaggccataaactcagctccagaggttaccttttaagtgccaagaactcaagtgcaaggtggcctactcaaaaatcatttggtagcattcagttattcatgaattcctctctcgcatgcattataaaaagtgatctgctttaaaacaccgtaatctgatcataggcttaaaattaaatatgagtattactttcatgtacaaaatatttcctttatagtcttcatatgccctttaaaatgccaacaagatttcaagtctgtaggcctctagtgaggtggggtggcaaaccacagctaagtctcgctcaccactgcaagctaagaatggtttttacattttgggttggaaaaattttttttgaatatttcatgacacatgaaaattattcaaatgttagtgccgataaataaagtggtactgaaacacagccacacaaacttgtttttgtactgtctacagctactttcacactacagccgcagagctgagcagttcagcagaccgtatgtcccacaatgcctaaaacattgactatgtttacagaaaaagtttgctgacccctgctctagcaaacgcatcctttcctactccaccccaatttgtatttagatagtttctctaacagaacggacaaatgaggctgcaaactaatttatttttgtcaaaaatcaatgttttgacatccacagacagtgaaataaaagaaatggcttgctgaaaaacatgaggagtcctagccacaaaatcactgcttaggttgcaattgccaaaatgaagccttcttagaagcacttctttagtatatacaggtgttggctgaagtccgtgcctcactctgggaaccattcttagtctccagtgtctcctattacaaagaagctggcagaaataaaaatgaaggggtgagagcggttccaccctagtctcatggtggaaaattcattggggagagctgtccaggatatttggagtcctgggtagaaggagcttgtaactactttaaagtcgacatctttgcacaggtgattgagtttctctgacctcattgcttcacctctgtctcctcccgtccttccgcacgtgcccacacacacgcagttcagccctctttcctccataagcctccatcgttttctcttttctcctcttgatcctttcaagcgagtatcttgttgaattgtatgttctgttggatctcctccttcataacatctggcttgttggacagaaaaaccctacagcccaccccctcccacagcccacctccacttttgaaagcccaaattacacctctcccagaacacagtgttgacgtaaatacagttacccaatattcctgtttgttcacctatttgctactttcactcagtagcatcccattttgtaaaatgaattccatggtcaccctgtcacaggaagtaatgaaaaatccagtgttcagtgtagtggtgcaaacctgagggcatagagctgttcatagagggctcttgttatagccaaacagacacagcaacaatctcaccatttatatatatatttttaacttgtccagctcatctatggaaaactactcaggtggtatgctgtttgaagcctcatcttcctacatgaaaattatgggcatttgtcccaatgattttgtttcagctgttctgtaggctgcataaccactctgatatttaggtatctgctattttattatcttaaaagacaaattaatttaattgcatgtgctagggaaaagctaccatgtacattcaccccaagtaaatagaatcctagatgaatcctagaaaaataatccctaagcagataggtagacagaggtaaacattcacatgatttagctctctagctcttgcactctgaacattcttgctttggttctgacttctgggaactgctttgcatttctcctatagatctgtagttaagggaaccaaggggtcattggggcaaaagcattgtttctcaaagctccttgattaagagaaagaacagaaatttgcacagaagatagtgtcaaggagtgagaaagtttgtttgagggcagtagctcagtgtggaagaaaatcctgaagtttctgttgaagccatacaatgttctatggggttactctctaagacattctctgaggtgtgtgaggaagtcactactcctagcctttgttaagatgtaattttaaatattcagttatggtactatgtttgcaactctcgtcttatcacaatgcctcagtagtttgttcccttagaaacatttagatgtgcacaaattaatcttttatatatctaaaggtttttctatcatgcattggattgctcagaataaagtgtctgttagacttcgttttggtaaataaattctccataatgtagattaataatataaaagtctttaatgacacaatatatctatatagcctcactgtataattcagaaataaaaattgattctgcaaaaaaaaaaaaaaaaaaaaaaaaaaaaaaaaaaaaaaaaannnnnnnnnn

SEQ ID NO: 22139 - DNA, 953 bp, Homo sapiens
  misc_feature 1, 2, 3, 4, 952, 953: n = A,T,C or G
nnnnacattcgcgctatcgggtcacccccaaagctccccaaccacgttcccacctttacccccctttttaccccctggcccttcaaacggaccgtaactgccccggtatttagcccccctttttttttaaagccagatacattatgcatgataccaatgtgactgaatataaatatttttattacaaaatattccaggtaaaaattcggagctgcttacaagcttctttagctttaagctcattgcatttcttcatgtctagagcatgggtgacgggctcaggtgtgcctggcctgccccgcagggtcctccttctccgtctgcagtgggtcccactcagtgaggacctctgaggacacctcagtgaacagatggtcccagtcccagccgacatcatcctcccggacttcgtgctccggcgcgagcactttggtgaggagtttcaggtcgatctccccatccagtgtctgaatggctgagtacttcatgaggtcattgtccaggtcacggtaggtcatcacccgctttatctggatgctgggaggggctgccacctgcaaaacaaagtcttcttcctgtacttcctccagatccggaatgataggaatatctcctccataatctgatccattcaggctctgtggtctgaggcggaaatcttctatttcttcagaagccttcctcctaaacttcgaagccttcacggaatcacctgcccagcctccctgtcggcagcgaggtaatttagcagaggaagtctctccagtcagagtcaaagaggaattcttgccattgaggtgattctcggcctgcgctgactcctgttgagctcggcgacccatcttggccctggaggtagccaagctgtagcgaagctcctcgtccaagtcgagcaaatcctccatctccccccttctgtcgtcttctcgcaggtgtcgacgcggccgcgaann

SEQ ID NO: 22140 - DNA, 3820 bp, Homo sapiens
gcgtccgatccggcatacagaatacagccacgcttctcaaagaattgctttcttggaaagttttgagcacagaagactatacaacctgtttttctagcagaaattttctaaatgaagcagtggactatgttattcgccacttgattcaagaaaataacagagtaaagacaagaatatttctgcatgttttgagtgagcttaaagaagtggagcccaaattagccgcctggatccaaaaacttaatagctttggcttagatgccacaggaactttcttttctcgttatggagcatctcttaaactgcttgattttagtatcatgactttcctctggaatgagaaatatggtcacaaactagactctatagaaggaaagcaacttgattatttctctgagccagcatcattgaaggaagcccgttgtttaatatggctgctagaagaacacagagacaagttcccagcattgcatagtgctttagatgaattctttgatataatggatattttcacagcatcatgggaaagattgcatgttacactgacagaatctattaacagccgctgtactgtgttaaggaaacaagatagtggtgaagcaccgtttagttcaaccaaggtgaaaaacaaaagcaagaaaaagaagccaaaggattcaaagcctatgttagttgggtctggaacaacttcagtaacttcaaataatgagatcatcacttcaagtgaagaccatagcaatcgaaattcagattctgcaggcccatttgcagtgcctgaccatcttcggcaagatgtagaagaattcgaagctctctatgaccaacacagtaacgaatatgttgtccgcaataagaagctatgggacatgaacccaaaacaaaaatgttcaactctatatgattacttctctcagtttttggaggaacatggtcccttggacatgagtaacaagatgttctctgcagaatatgagtttttcccagaagaaactcgacagatactagaaaaagcaggaggtttaaaaccttttctcttgggatgccctcgttttgttgtgattgacaactgtattgcactgaagaaggttgcatcacggctcaagaaaaaaaggaagaagaaaaacattaaaacaaaagtagaagaaatttcaaaagcaggggagtatgtacgagttaaactacaactgaatccagctgctagggaatttaaaccagatgtaaagtctaaaccagtgtcagattcatcttcagcaccagcttttgaaaatgtgaaacccaaacctgtgtctgcaaattctcccaagccagcttgtgaagatgtgaaggccaaaccagtatccgacaattcttctagacaagtttctgaggatgggcaacccaaaggggtctcttctaattctcctaaaccaggctctgaggatgcaaattacaagcgagtctcctgtaattcccccaaaccggttcttgaggatgtgaaaccaacttattgggctcaatcccatttggtcacaggatactgtacgtatcttcctttccagagatttgatatcacccagacaccgccagcatacataaacgtgttaccaggtttgccccagtacaccagcatatatacacccttggccagcctttctcctgaatatcagctaccaagatcagtaccagtggtgccgtcttttgtagccaatgacagagcagataaaaatgctgctgcctattttgagggtcatcatttgaatgctgagaatgttgctggtcaccagattgcctctgaaacacagatccttgagggctctttgggaatatctgtaaagtcacactgcagcacaggtgatgctcatacagtcctgagtgagtctaacagaaatgatgagcactgtggaaattctaacaacaaatgtgaagtaattccagaaagcaccagtgcagtaacaaacattccacacgtgcagatggttgccatacaggtatcttggaacataatacaccaagaagtcaatactgagccatataatccttttgaggaacgacaaggggaaatttcacggattgaaaaggagcaccaagtattacaagaccaacttcaagaagtgtatgaaaattatgagcagataaaacttaagggcttagaagagaccagggacctggaagagaagttgaaaaggcacttagaagaaaacaagatctcaaagacggaattagattggttccttcaagatttggaaagagaaattaaaaaatggcaacaggaaaaaaaagaaatccaagaaagactaaaatcactgaagaagaaaattaaaaaggtttcaaatgccagtgaaatgtatacccagaaaaatgatggaaaggaaaaggaacatgaattacatctggatcagtcccttgaaatcagcaacacacttacaaatgagaaaatgaaaatagaagagtatataaagaaagggaaagaggattatgaagagagtcatcagagagctgtggctgcagaggtatccgtacttgaaaactggaaggagagtgaagtgtataagctacagatcatggagtcacaagcagaagcctttctgaagaagctggggctgattagccgtgatcctgcagcatatcctgacatggagtctgatatacgttcatgggaattgtttctttctaatgttacaaaagaaattgagaaagcaaaatctcagtttgaagaacaaattaaggcaattaaaaatggttctcggctcagtgaactttctaaagtgcagatttctgagctttcatttcctgcctgtaacacggttcatcccgagttactccctgagtcttcaggccacgatggccaagggcttgtgacttctgcaagcgacgtgactggaaaccacgcagcacttcacagggatcctagtgtgttctctgctggtgattccccaggggaggctccttctgcgctgttgccagggccaccccctggtcagcctgaagccactcagctgacagggccaaaacgggctggccaggcagctctgtcagaacgaagccctgtggctgatcggaagcagcctgttcctccaggacgtgctgcgcgttcaagccagtctccaaaaaagccgttcaatagtattattgagcacctgtcagtggtattcccatgttacaacagcactgagcttgctggttttattaaaaaagtgcgaagcaaaaacaagaactcactctcaggattgagtattgatgaaattgtccaaagagtgacagaacacattctagatgaacagaaaaagaaaaagccaaacccaggaaaggacaagaggacttatgagcccagctctgccacccccgtgaccaggtcctcccagggctcaccctcggtggttgtttgcaccatcacccaaaaccaaggggcagaaagcagaagatgtccctgtgaggattgcactgggtgcaagttcctgtgaaatatgccacgaggtgttcaaatcaaaaaacgtgcgtgtgctcaaaatgtgggcacacgcattcacaaagggtgctttaaggcagtggcttcaaggcagagcgcttgcccggctgcagggtccgtgatctcctgcacagaagagtcccttctgggacgaagctggccccagtccagatccagaagtggcttcctggtcttcctaggtcgtcccacttccctacagggtcctccaccaggtgttgaatcgcaaatgaccgcttttctcccccggtcttcacacatcgagaccttgtctttgtcgtccacgccaacagcacacgcatacggacatagtcttccctccgagaactcgcgtggcaggtcacagcgccaccagac

SEQ ID NO: 22141 - DNA, 1294 bp, Homo sapiens
  misc_feature 1, 1293, 1294: n = A,T,C or G
nctcggctccgctcctctcggccggagtgtgctggaattcgcccttgcactgtgacaagctgcacgccctgactgggctcctccccgggcccgccccgacaggtttgtcttgtgaccgcgggcggccgctgcttctttcccgagcttggaacttcgttatccgcgatgcgtttcctggcagctacattcctgctcctggcgctcagcaccgctgcccaggccgaaccggtgcagttcaaggactgcggttctgtggatggagttataaaggaagtgaatgtgagcccatgccccacccaaccctgccagctgagcaaaggacagtcttacagcgtcaatgtcaccttcaccagcaatattcagtctaaaagcagcaaggccgtggtgcatggcatcctgatgggcgtcccagttccctttcccattcctgagcctgatggttgtaagagtggaattaactgccctatccaaaaagacaagacctatagctacctgaataaactaccagtgaaaagcgaatatccctctataaaactggtggtggagtggcaacttcaggatgacaaaaaccaaagtctcttctgctgggaaatcccagtacagatcgtttctcatctctaagtgcctcattgagttcggtgcatctggccaatgagtctgctgagactcttgacagcacctccagctctgctgcttcaacaacagtgacttgctctccaatggtatccagtgattcgttgaagaggaggtgctctgtagcagaaactgagctccgggtggctggttctcagtggttgtctcatgtctctttttctgtcttaggtggtttcattaaatgcagcacttggttagcagatgtttaattttttttttaacaacattaacttgtggcctctttctacacctggaaatttactcttgaataaataaaaactcgtttgtcttgtctctgcaaaaaaaaaaaaaaaagggtactccgcgcgggagttcggcaagggcgcaggtaaagagaccagcctctggcacagaggcccatatacgagatgacatcaaacacagcgacctacagccgcctaaccccccgcatcgcgaacacgcccaccggcactcgtaaccaaccccacctcgcgggcgcacccgagcccccccggatcagcgcccgagcataaacaacgacactgaacaagcccgacacgacgcaactcagcgatcataagacaccaaacgacgaaagcccagcgacacgaccaccgaccagcacacagaacgcagacaaaccgagagaacagtcann

SEQ ID NO: 22142 - DNA, 1262 bp, Homo sapiens
  misc_feature 1, 2, 1261, 1262: n = A,T,C or G
nnaatttacacggaccaccgtgctaaaaacgggccctgagtttatggccgggtaaatttaccgggcggatccctgccttttgggacactaaagaggttggcaaaagaggggttccggccggatccggatttcaaaccttccccccacctcgcccaggctgccagaccggaagcgctccgctgtacctggatcctgctcctctgggttgaaacccgggcgccgccaagatgccggcttaccactcttctctcatggatcctgataccaaactcatcggaaacatggcactgttgcctatcagaagtcaattcaaaggacctgcccccagagagacaaaagatacagatattgtggatgaagccatctattacttcaaggccaatgtcttcttcaaaaactatgaaattaagaatgaagctgataggaccttgatatatataactctctacatttctgaatgtctgaagaaactgcaaaagtgcaattccaaaagccaaggtgagaaagaaatgtatacgctgggaatcactaattttcccattcctggagagcctggttttccacttaacgcaatttatgccaaacctgcaaacaaacaggaagatgaagtgatgagagcctatttacaacagctaaggcaagagactggactgagactttgtgagaaagttttcgaccctcagaatgataaacccagcaagtggtggacttgctttgtgaagagacagttcatgaacaagagtctttcaggacctggacagtgaagggagcccgggcagccaccgtctccagagccctgggcagcattttccagcaagatgtacacaatcttttgcctttatttcgtaaagttttatacagaagagagaagagcatgtctttacttgaaaaactcttgatcaagaatttgggtgggagaaaagaaagtgggttatcaagggtgatttgaaattttctgcagcattaaagctggcgcttaataagaataagtaataataaagaaatttctaacattccatgtcaaaaaaaaaacagggggggcgggcaaagatacccccccgagacggcccacatagcagcaccccagtttctgtacaacaggagcccaaagggagcgagcaataaacagcaccgacgacggagtaacagcggcgatggaaaacggtgcagcgaaatgaaggagccaacaatcgaggggacaggagacacaccacaaggccagacagtacaaacgatacacagacagcagcgcgagaccgann

SEQ ID NO: 22143 - DNA, 772 bp, Homo sapiens
  misc_feature 1, 2, 3, 4, 5, 6, 7, 8, 9, 10, 11, 12, 13, 14, 15, 16, 17,18, 19, 20, 21, 22, 23: n = A,T,C or G
nnnnnnnnnnnnnnnnnnnnnnnaataatacattttattcacctcaagctatctaaaatcttatcatcttgacacactgaaataataatcaattaacaaatgattgagagattttactgtttttttctttagtaagtcttcgaaacacagaagacgatgtttcttatactgtcacagtgcagttaactcgaacagcacagacccggagccttaaacagctttgtcagagctcagcctctctgcagtgtcctaagcactcaacaaataagttggctcagcctctctgcagtgtgctaagcacacaacaaataagtcttggcgttggccatttgtacgtccaatcattaggcgctcagtgcgtgcaccttccctgtagacctccctgtgattctggcacccacagccaactcttgtatctttccccaggggcagggctgcctgggtccaaatccgacgtgatctcccgtgtggatcgaggggaagagctgaggcaggagagagaggcccggcgagttacctgcccaggtgggtgaggatatccagcaggtgtgagccctcttcctaccccatctttcatggtcagtgaggttcactcaggggtgaggcagtggaacacacgggtgatcatcgtgggctcgggagtcgggttgtgtgggttcaaatcccagctgattgcttcctggctgtgtggccttgggcaagtcacttagcctctctgtgctttgatttttttcatctgctacatgaacagagtgagaactccaatccaggt

SEQ ID NO: 22144 - DNA, 745 bp, Homo sapiens; identical to SEQ ID NO: 20943
  misc_feature 1, 2, 3, 4, 5, 6, 7, 8, 9, 10, 11, 12, 741, 742, 743, 744,745: n = A,T,C or G

SEQ ID NO: 22145 - DNA, 407 bp, Homo sapiens
  misc_feature 407: n = A,T,C or G
actttttagcagagacatggtttcaccactgattcacttcttgccttagtctcagagatctcagacagaagctgtgaccttcttggctaaccatgatgacagtcgggccctctatgccatcccaggtgagtagttagcatttgaatggtgcccgtcaagaaggagtctggtgtgtctcagggagaggattctgatgtcctgtcatccactgggagggattatgatgctgagaggtatgatatcagggttatcccatactggaacaaggccagttaatgtttcttctcaaccccatctctctcctctcctgtgagtttcaccactgtcttttgcatctctgtgccaggcttggactatgttagccatgaagacatcctcccctacaccttcactgatcaggttcccan

SEQ ID NO: 22146 - DNA, 1966 bp, Homo sapiens
  misc_feature 1961, 1962, 1963, 1964, 1965, 1966: n = A,T,C or G
gggagtcgacccacgcgtccgccggcttccggcaactgggctggaccgaaaccggcgcggagcaactgaggcccgagccttctcgggacccgggggacgcctaaccccgcgagaaccctgcaaattttcttcctcataattgggagaagactcactggccgaatggcagcagtagatgacttgcaatttgaagaatttggcaatgcagccacttctctgacagcaaacccagatgccaccacagtaaacattgaggatcctggtgaaaccccaaaacatcagccaggatccccaagaggctcaggaagagaagaagatgatgagttactgggaaatgatgactctgacaaaactgagttacttgctggacagaagaaaagctcccccttctggacatttgaatactaccaaacattctttgatgtggacacctaccaggtctttgacagaattaaaggatctcttttgccaatacccgggaaaaactttgtgaggttatatatccgcagcaatccagatctctatggccccttttggatatgtgccacgttggtctttgccatagcaattagtgggaatctttccaacttcttgatccatctgggagagaagacgtaccattatgtgcccgaattccgaaaagtgtccatagcagctaccatcatctatgcctatgcctggctggttcctcttgcactctggggtttcctcatgtggagaaacagcaaagttatgaacatcgtctcctattcatttctggagattgtgtgtgtctatggatattccctcttcatttatatccccaccgcaatactgtggattatcccccagaaagctgttcgttggattctagtcatgattgccctgggcatctcaggatctctcttggcaatgacattttggccagctgttcgtgaggataaccgacgcgttgcattggccacaattgtgacaattgtgttgctccatatgctgctttctgtgggctgcttggcatacttttttgatgcaccagagatggaccatctcccaacaactacagctactccaaaccaaacagttgctgcagccaagtccagctaatgaggaaattctcttttgttttttggagcatggttctttgggaagtggcatccactgcaggaaagcagaatgagcagagccagcagaactgatggagtggcacaaattcccagtgtctggatggtgccacactggcgcctaatcacccgtttaacaagcagaaattaaatgttgctcagcacatgtgtctttcagctcttccttttcacccatggatgatcattgcgagcatgcgctgattggactgaaatgccggggaataggttaggcatgctcagtgccgtccctttgccaccacagtcaaatgacatgcttcactgtggtaccttaatacctgaaatagaaccatggaaaattctgatgtcctctctctgaattatgtacagactacctgggggatcctcttctctccaaatgttagccatcctgaagtagccgaacagtagaaactttggtggggattaaccgggagcttgaaaatttgtctttggtaacctgatactggacagctgaactgaatggctgcaaaataaatacctcacatgatgtctgtgtctgcaaaaaaaaaaaaaaaaaaaaaaaaaaaaaaaaaaaaaaaaaaaaaaaaaaaaaaaccaaaaaaaaaaaaaatccgcccccccccggggggaacctccaatcccccctatatgaagtctttttaccccccctaattgcccgtattttaaaaacgtcgaaattggaaaaaccctgccttaaccaaatttaatccctttgaaaaaaatccccttttccccacctggcgtaaaaccaaaaagcccccccccaatcccctttccaaaaatttgcccaccctaaatggcaaatgaaaattgtacccttaaattttttttaaaaannnnnn

SEQ ID NO: 22147 - DNA, 3201 bp, Homo sapiens
  misc_feature 3110: n = A,T,C or G
acgcgggtggttggatctcagctggaagttctgtttggagcccatttctgtgagaccctgtatttcaaatttgcagctgaaaggtgcttgtacgcggggaggcgattactgggcaggctcagtctttcgcctcagtctcgagctctcgctggccttcgggtgtacgtgctccgggatcttcagcacccgcggccgccatcgccgtcgcttggcttcttctggactcatctgcgccacttgtccgcttcacactccgccgccatcatggtgaagctcgcgaaggcaggtaaaaatcaaggtgaccccaagaaaatggctcctcctccaaaggaggtagaagaagatagtgaagatgaggaaatgtcagaagatgaagaagatgatagcagtggagaagaggtcgtcatacctcagaagaaaggcaagaaggctgctgcaacctcagcaaagaaggtggtcgtttccccaacaaaaaaggttgcagttgccacaccagccaagaaagcagctgtcactccaggcaaaaaggcagcagcaacacctgccaagaagacagttacaccagccaaagcagttaccacacctggcaagaagggagccacaccaggcaaagcattggtagcaactcctggtaagaagggtgctgccatcccagccaagggggcaaagaatggcaagaatgccaagaaggaagacagtgatgaagaggaggatgatgacagtgaggaggatgaggaggatgacgaggacgaggatgaggatgaagatgaaattgaaccagcagcgatgaaagcagcagctgctgcccctgcctcagaggatgaggacgatgaggatgacgaagatgatgaggatgacgatgacgatgaggaagatgactctgaagaagaagctatggagactacaccagccaaaggaaagaaagctgcaaaagttgttcctgtgaaagccaagaacgtggctgaggatgaagatgaagaagaggatgatgaggacgaggatgacgacgacgacgaagatgatgaagatgatgatgatgaagatgatgaggaggaggaagaagaggaggaggaagagcctgtcaaagaagcacctggaaaacgaaagaaggaaatggccaaacagaaagcagctcctgaagccaagaaacagaaagtggaaggcacagaaccgactacggctttcaatctctttgttggaaacctaaactttaacaaatctgctcctgaattaaaaactggtatcagcgatgtttttgctaaaaatgatcttgctgttgtggatgtcagaattggtatgactaggaaatttggttatgtggattttgaatctgctgaagacctggagaaagcgttggaactcactggtttgaaagtctttggcaatgaaattaaactagagaaaccaaaaggaaaagacagtaagaaagagcgagatgcgagaacacttttggctaaaaatctcccttacaaagtcactcaggatgaattgaaagaagtgtttgaagatgctgcggagatcagattagtcagcaaggatgggaaaagtaaagggattgcttatattgaatttaagacagaagctgatgcagagaaaacctttgaagaaaagcagggaacagagatcgatgggcgatctatttccctgtactatactggagagaaaggtcaaaatcaagactatagaggtggaaagaatagcacttggagtggtgaatcaaaaactctggttttaagcaacctctcctacagtgcaacagaagaaactcttcaggaagtatttgagaaagcaacttttatcaaagtaccccagaaccaaaatggcaaatctaaagggtatgcatttatagagtttgcttcattcgaagacgctaaagaagctttaaattcctgtaataaaagggaaattgagggcagagcaatcaggctggagttgcaaggacccaggggatcacctaatgccagaagccagccatccaaaactctgtttgtcaaaggcctgtctgaggataccactgaagagacattaaaggagtcatttgacggctccgttcgggcaaggatagttactgaccgggaaactgggtcctccaaagggtttggttttgtagacttcaacagtgaggaggatgcccaaagctgccaaggaggccatggaagacggtgaaattgatggaaataaagttaccttggactgggccaaacctaagggtgaaggtggcttcgggggtcgtggtggaggcagaggcggctttggaggacgaggtggtggtagaggaggccgaggaggatttggtggcagaggccggggaggctttggagggcgaggaggcttccgaggaggcgggggaggaggaggtgaccacaagccacaaggaaagaagacgaagtttgaatagcttctgtccctctgctttcccttttccatttgaaagaaaggactctggggtttttactgttacctgatcaatgacagagccttctgaggacattccaagacagtatacagtcctgtggtctccttggaaatccgtctagttaacatttcaagggcaataccgtgttggttttgactggatattcatataaactttttaaagagttgagtgatagagctaacccttatctgtaagttttgaatttatattgtttcatcccatgtacaaaaccattttttcctacaaatagtttgggttttgttgttgtttcttttttttgttttgtttttgtttttttttttttttgcgttcgtggggttgtaaaagaaaagaaagcagaatgttttatcatggtttttgcttcagcggctttaggacaaattaaaagtcaactctggtgccagaaaaaaaaagtaatttagtgaggtgaaccacttcagaattaaaaaaaaaaactcgagggggggcccggtacccaatttgccctatagggagtcgtattacaattcactggccgtcgttttacaacgtcgtgactgggaaaaccctggcgttacccaacttaatcgccttgcagcacatccccctttcgccagctgggcgtataactaacaaggcccgaccgattgccttttccacagttgcccaccctgaatggcgaatggcaaattgnagctgtaatattttggtaaaattcgcggtaaattttggtaaaaccagctcattttttaaccaatggcccaaatgggaaaattcctatataa

SEQ ID NO: 22148 - DNA, 571 bp, Homo sapiens
  misc_feature 1, 2, 3, 564, 571: n = A,T,C or G
nnngcccctgggaacgtgaaaaatgtctgtttcaaaacacattataaggctatgaaattatctgtgatgtaatcccaagagaatcaaatacattccccaagcttgattcacaattcaattcatttgtaaaaacacaaatgattgtatgtattatattcagttgcctttcacatgtacatggatttttttttctcttatttgggagtagtcctttgaaacgacagtcatattgaaacaggaagtcagtaagctgttgcaacatccttagggcaaatgctgtgaattcacctgctggtaactttgattaaggactgagaatggtgtgggtatcgctgtcttctcataagtaattatttaaaaggactaattgctcctttggcttcagaggtaaaaatgcccacatggcagccagttctgtggcagtttggggataatgtggttggatgaataagggagctaggaagaaggctgatggcggccttgactctcaatcccctggggctggggacagggaatgcaggtgcaagccctggttaagatctgctccgtggccctggtggttcnccagtgn

SEQ ID NO: 22149 - DNA, 3551 bp, Homo sapiens
  misc_feature 3550, 3551: n = A,T,C or G
agggagtcgacccacccgtcccgcgctttgttgcgaaagcgagggggcgaggtgctgcggtgctagagcgcggcgcgaccggacgctgcgggcggggaagaggatggagactgtggcgtccgctgcaacggttggggctgcgcgtgagaaggtggcggtgtaggcacctgcgctcggggaaggctggcggcggcggccgagccatggcgggagacccccttctctgggctccctgaagtctcggggagccgtgacccatgggatcgttgagcagccgggtgctgcgccagccaagaccagcccttgcccagcaggcgcagggtgccagggcggggggctcggcccggaggccggacactggagacgatgcggcgggccacggattctgttactgtgcgggcagccacaagcgcaagcggagcagcgggtccttctgctactgtcaccctgactcggagacggacgaggatgaggaggagggggacgagcagcagcggctcctcaacacccctcgaaggaaaaaattaaagagtacatctaaatatatttatcaaacattatttttgaatggtgaaaacagtgacattaagatttgtgctctaggagaagaatggagcttacacaaaatatatttatgtcaatctggctacttttctagtatgttcagtggttcttggaaagaatccagcatgaatattattgaactggagattcctgaccagaacattgatgtagaagcactgcaggttgcatttggttcactgtatcgagatgatgtcttgataaagcccagtcgagttgttgccattttggcagcagcttgtttgctgcagttggacggtttaatacagcagtgtggtgagacaatgaaggaaacagttaatgtgaaaactgtatgtggctattacacatcagcagggacctatggattagattctgtaaagaaaaagtgccttgaatggcttctaaacaatttgatgactcaccagaatgttgaactttttaaagaactcagtataaatgtcatgaaacagctcattggttcatctaacttatttgtgatgcaagtggagatggatatatacactgctctaaaaaagtggatgttccttcaacttgtgccttcttggaatggatctttaaaacagcttttgacagaaacagatgtctggttttctaaacagaggaaagattttgaaggtatggcctttcttgaaactgaacaaggaaaaccatttgtgtcagtattcagacatttaaggttacaatatattatcagtgatctggcttctgcaagaattattgaacaagatgctgtagtaccttcagaatggctctcttctgtgtataaacagcagtggtttgctatgctgcgggcagaacaggacagtgaggtggggcctcaagaaatcaataaagaagaactagagggaaacagcatgaggtgtggtagaaagcttgccaaagatggtgaatactgctggcgttggacaggttttaacttcggcttcgacctacttgtaacttacaccaatcgatacatcattttcaaacgcaatacactgaatcagccatgtagcggatctgtcagtttacagcctcgaaggagcatagcatttagattacgtttggcttcttttgatagtagtggaaaactaatatgtagtagaacaactggctatcaaatacttacacttgaaaaggatcaggaacaagtggtgatgaacttggacagcaggcttctgatcttccctttatatatctgctgtaacttcttgtatatatcaccagaaaaaaagaattgaaaataatcgtcacccagaaaatccagaaaactgaagatttcatcagttggaaacagtagcactttgaaaactttttaggccagctttaatttaatggccctactgatattcacatcgaaggtgactaacaatgacaaaggccttatgaactgtacagacaatacagaagattattcttatcctcattgcatttctatgcatatgcgtaagaacattttaaagccaagaaaatatctgtcaaaccatttctgttagaacgatgtcaattcatgcttttaatttagcatcaatagaaaattgctgtaggtaaatctcacatttatctgcaacaaaatatagatttaatttttagcttaaactttgtttctaccttatgttagtggacctcagttatccatctgtaaatttctttttatttggctaaaataatctaaaagaataatttggttggccaattagaaatgcctttttcagttggtgtattgaaagctttcctttaacattttcacctgctcattgtgattcctccttttagtctaatatctttccaggtcatacttgtttttaatcattaaatattttcttcctggttttggagactaagctgataaactttttttaaaacttaagcattgtcattgctattttttttaatttgactttcctaggagtttaagaacagtgaaagttagctttgcaccttcaaatgatcttgaatgagggaaaaatcagtttgattccaaggatatttcttgccttacatggtcttttctttgacagtctgtacacctttattattaggttttgaattatttatgtaccagatattatagttttaaacattttaatattctctgatctttagaattatttatgttcaaattttagttgggaactttgtttcctacttaagctcaggactttttaccctctgaattgagtgcctttgagtgacacatgctaatagaaatttcatagtaaatgtaaataaggtcagaggatgtaatatggagcctgatgatgaagcattaatgtaaaaatggaacttatttttgtcaaaaatgagatgtacacttgtcatgatttatgtatgttgaccttttgtgtttattactgttttgaaaatagccatgttcattttctttccagttagagtaagtacttctgtggttaatgtatatttttattatggtttttaaaatgggaatcatttttatgtatctgtgcaaataataaatgcccatttggaaaaagagtaagctcttacataaaatggaccaaaaaatcccccttaattgaaaccaaaattttttctttctagttaggtttttttcccaactccttttaacttttggaatttattaataatttttttcttttttaatgatatgcccataggttcataaattgcttttgttcttttaaaattcatccatttggtttaacttaaaggaaccttttaaatgcctcacccttgaccctcagagctggaatttaaatgtttctaatacagtgatttggctgttatcaagaggttacatttcagctgggtgtcagccaggtgtggtggctcacacttgtaagcccagcactttgggaggccgaggcaggcagatcatctgaggtcaggagtttaagatcagccatgaccaacatggtgaaaccccatctctattaaatacacaaaataaaaattagccaggcatggtggcacacgcctgtcatctcagcgactcaggtggcgnn

SEQ ID NO: 22150 - DNA, 3440 bp, Homo sapiens; identical to SEQ ID NO: 21306
  misc_feature 1, 2, 3438, 3439, 3440: n = A,T,C or G

SEQ ID NO: 22151 - DNA, 897 bp, Homo sapiens; identical to SEQ ID NO: 20923
  misc_feature 894, 895, 896, 897: n = A,T,C or G

SEQ ID NO: 22152 - DNA, 1721 bp, Homo sapiens
  misc_feature 1, 2, 3, 4, 5, 6, 7, 1721: n = A,T,C or G
nnnnnnnaccgcctcccgggccgtaagtaccggcgtggcggcgcctcagcccggcctgggcgagccctgggtgctccgccgggcagctcacggcgccccgtatggcctggggatcctaagaggccctgtgacccccctcgcctggtctccctctcacccctggagggttgccgcagctccggggcccccgggcaggaagggcgcactggtcgtcccgggcaagaggggtactgaagcagaagggcgcgggctagcacgcggaatggcctcgtgccctatgaggagaccacggaatttgggttgcagaaattccacaagcctcttgcaactttttcctttgcaaaccacacgatccagatccggcaggactggagacacctgggagtcgcagcggtggtttgggatgcggccatcgttctttccacatacctggagatgggagctgtggagctcaggggccgctctgccgtggagctgggtgctggcacggggctggtgggcatagtggctgccctgctgggtgctcatgtgactatcacggatcgaaaagtagcattagaatttcttaaatcaaacgttcaagccaacttacctcctcatatccaaactaaaactgttgttaaggagctgacttggggacaaaatttggggagtttttctcctggagaatttgacctgatacttggtgctgatatcatatatttagaagaaacattcacagatcttcttcaaacactggaacatctctgtagcaatcactctgtgattcttttagcatgccgaattcgctatgaacgggataacaacttcttagcaatgctggagaggcaatttattgtgagaaaggttcactacgatcctgaaaaagatgtacatatttacgaagcacagaagagaaaccagaaggaggacttataattggctataatttataagaatgttgtcattgagtgtgtcacttaaggtcttagactgcaaatctaaccatatttaatgaaatgtcttactgtacaaaaagtctaagccaaaggttctcaggggagaaagcacatgtgcagttttaaaacaaagcagtgctttgtcccattgctgtgatttttagtcagactttactcagtctgaaatgcaattaacattaaaggattaagtgtgagatttcgatttatgctatttgtgtatcccatactcctcccttttaataaacagtttccactgatgatatgaagggccggtataaagaagtcttttaatgagtaagctttcttggtaagattaaatcttacaaattatttttaaaaccttgtgatatatacaatgtttagctgagttttctaattttctggatgtaaaacaaaaggtttaacctatacattccttgagctgttagtgctatttaaatcttttgccctgtttaggtcctaaacacttttagttgagtaggatatgagcttttttgggtctcatatcatgctttttgccttaatttcaggtgtatatatatataagtaaaggaattaagtgaaaataaaatttcaggtactttttaaaagcacctgaaatctggccggatgcggtggctcatgcctgtaatcccaccactttgggaggccgaggcgggcagatcacctgaggtcaggagttcaagaccagcctggccaacatggtgaaaccccatctctactaaaaatacaaaaattagccgggcgtggtgtcaggcgccn

SEQ ID NO: 22153 - DNA, 1268 bp, Homo sapiens; identical to SEQ ID NO: 21760
  misc_feature 1, 2, 3, 4, 5, 6, 7, 8, 1266, 1267, 1268: n = A,T,C or G

SEQ ID NO: 22154 - DNA, 897 bp, Homo sapiens; identical to SEQ ID NO: 20923
  misc_feature 894, 895, 896, 897: n = A,T,C or G

SEQ ID NO: 22155 - DNA, 429 bp, Homo sapiens
acaaagaagagattctacagcacttagaggctgtatagcttccagaaaaagtagctataatgcattgcagaggccaccaaaaggcaaggatgccacaagccaaaggaaacagaaaagcagacagggaggcaaagcaggcagcaatgatcaccccgcattttaaagaggaagccttagctatgcctctcctcccagaacctcctctccaagacgacccaagttatactccaaatcaaagatcctggtgtgccaagaagatataaaatgtatgaaaagaaagtaaaagaagttcttctataggagactagccattccaaagatgttagctcctaagtttgtgaagcaaatccatcaagaaaatcatataagaaaaacagcattagaaacattatgtagtgccatttttcttttctttttttcggacgcggg

SEQ ID NO: 22156 - DNA, 866 bp, Homo sapiens
  misc_feature 1, 2, 3, 813, 845, 849, 866: n = A,T,C or G
nnnatgcctaaaatcatccagactgttggtggtggtgctgtgcaggagagagcgcctgagctggatggtggtgggcccacggagcaggacaaaagccattctaacagcagcaccttgtcggaccgaagactcagcaactccagcctctgtagcattgaagaagagcaccgaatggtgtatgaaatggtacagcggattctcttgtcaacacgaggttatgtcaacttcgtgaatgaagtatttcaccaggcatttttgttgccttcctgtgagatagctgtaacaagaaaagtagttcaagtgtacagaaagtggattctccaggacaaacctgtgttcatggaggagccagatagaaaagatgttgcccaagaagatgctgaaaaattaggattttccgagactgatagcaaggaggcctcatctgaaagttctggtcataaacgatcttccagttggggacgcacatactccttcacaagtgcaatgagcagagggtgtgtgacagaggaggaaaatacaaatgtgaaagccggcgtccaggctttgttgcaggtatttttgacgaactctgcaaacatctttttgttggaaccatgtgctgaagttcctgtgctcttgaaagaacaagttgatgcttgtaaagctgttttgattatttttaggcgcatgataatggagcttacaatgaataaaaagacatgggaacagatgttgcaaatactactcaggataacagaactgtcatgcagaagccaaaggataaacgaataaaggacttggttgcccaaagcttgcaggggtactatttangacgctcatggtagctggatccgaccaaactntggngacatttctcgagagcn

SEQ ID NO: 22157 - DNA, 426 bp, Homo sapiens
accgcgggagctcgggctcctgagggcgacggtcctctgatggcagatgcgggagaaacctctggcgtcaggcgagccctcgcgtggagcacacgaaagtcgtggcttattctggcttcagtatgtggggtggagaaggcgatccacgcagctgcgtctatttcctgtggatcaatcgcaaaatacgttctgtaagccccgcccccactgcgtgcgggcggcttttgtctccacggcaaccgtcaactctggatacgcctgtctttctccatggcaactgtctacgccgcaggctggagctgcccattaccggagcccatatggcaatgacccttggccagtctctgggaactaaactcctgggatgtttacacaggtgctgggtaagatgttcttccatatgctcaagaccacgggtcaagatgt

SEQ ID NO: 22158 - DNA, 1185 bp, Homo sapiens
  misc_feature 1161, 1162, 1163, 1164, 1165, 1166, 1167, 1168, 1169, 1170,1171, 1172, 1173, 1174, 1175, 1176, 1177, 1178, 1179, 1180,1181, 1182, 1183, 1184, 1185: n = A,T,C or G
acccagggacacaaacactctgcctaggaaaaccagagacctttgttcacttgtttgtctgctgaccttccctccactagtgtcctatgaccctgccaaatccccctctgtgagaaacacccaagaatgatcaattaaaaaaaaaattaaatttaaaaggaaaacaccaacaacaacagaaaaaagtcctcccataaggaaagatgatcaattcttatgtatcgttctagggatatacttggaggttggcggtgcggggctgaaggctagcgaaaccgagcgatcatgtcgcacaaacaaatttactattcggacgaatacgaagaggaggagtttgagtatcgacatgtcatgctgcccaaggacatagccaagctggtccctaaagacccatgctgatgtctgaagtctgaatggaggaatctctggcgttcaggagagctcagggatgggatccagtatatgatgatccatgaaccagaaactgcacatctggctgttccgggcgcccattaaccaagaaaccaaaggaaatgaagctggcaagctactttgtcagctcgtcaagctttacacagcctgtccttagttcctaacatctttctgataacattaggtatgtggcttcttgttgtctcactttgagtatttaaaagatgttcaagtacactgtttgaatgttgctggtaactgcttgcttctggagtagagccacacacacacgcatagcccagtcagatgagtgctcggtgtggacccacaggctaagctgagtgtgaccccagaagccacgatgtgctctgtatccagaacacacttggagatgggggaagcatctgagtttgagaacatggtctgtcaccaggatcatgtgaattgctggtttgtgttgtttggcctgcgggtgtagtatggtgtggtgacttggggattaatgttcaggggtgtgggaacttggcatctgtcagaagactggtaggtagaaggtgattaagaggagttatagttaaaagagggaatggacacaaagtgtcgggtctattgtgggggacaagggttaatggcaatggtaggggtggggccctttgaaaggggaataggggcccagaggggggatatcaaaagagttaataagaaaaagaaaaaggaaaggaagaggannnnnnnnnnnnnnnnnnnnnnnnn

SEQ ID NO: 22159 - DNA, 397 bp, Homo sapiens
gtaggagaatatggcttaaagacaagagggggagagcctcttaattgttcatactattttacttcaccctccatccagtctgacaataatgccaaacttaatttacaatctagggcaagagtaactctataagaggattttatgaagtacagccaggtgtggtggcccgcatctgtaatcccagctactcaggagtctgaggtgagagaatcactcaaggccagaagtttgaggcccagactggcaacatagcaagaccatgtctctttgccgtgggccgctccttccgaggcttcggctacggcctgacgtttctgccactgctgtcgatgctgatgtggaacctctactacatgttcgtggtggagccggagcgcatgctcactgccccccgcgt

SEQ ID NO: 22160 - DNA, 2224 bp, Homo sapiens; identical to SEQ ID NO: 21832
  misc_feature 1, 2, 3, 4, 5, 6, 2220, 2221, 2222, 2223, 2224: n = A,T,C or G

SEQ ID NO: 22161 - DNA, 1752 bp, Homo sapiens
acatggatgggcggggaggtaactaaaagatcctttacacaataaagtagatgatcatgataaatgaggtaaggtcctattatcacacacttcaaacacggtagatcagaaacccactatgatactcgcttcctgtctgtttgctaaggaatataaaatggctagaaagtttaatttgaaacctttgcctccatttggaatagtagacaccagttaagagggtgtcagatgcctttttttttttttttttttttttggctggtccctgttgattggtcagaagacagctcagctaaaaggggaagttgtctgggtggttgctttttttctgacgtctgttcctcaggctggaagaaatgagcagaaaacaagggatgagtactttttagagtatgtgcatgttacgtaatacctgtttctgggcaatgctgcttcttctgactcaacaaatggggagagcaaattgaaaatgcgtaaattggaaggcaagttctgaaattaaacgttgtactttggcctgatgttctgacctttaaggaagcaagagtttgtaaacttccaaatatttactattctgaactgccgtgtaaacctgacgtattcccaagtcaacataccagtataccaataggatgtgaataatgtgtgtgttgagtttaaaaccatagcagttttgctctggcaagtaatgaaagcgttctcgcttcctgagtgtgagctccagcagactgcagagtggccagtccacagttgtagcctgacttcagtgagttctgatgtgtgctttttgcaaatacatgttctcagaacagtgagatcatccagcagtggcctggactgcactcacataaaaatcatgagacagccatggctacttgtttctgtaatacatgcatgtgtgttttttaaaacctatgataggcctctgattctgcagctgcaacttttatggaatgttttccttctccacatctcatgtgatgcctttactccatcattaaaataatccagtaaacttacaaatttggaaaccataatctaagacatacctggcttagattcttcagaatttctgatcctatgccaaagcctaaaaagaaagagtcatattcacaaagtcattgtaagcatttataactctgaactctcgtcagaccctctgctccgaactcaatcgcacctctataatcactcatcacgaagaagtcctcaagataccataacttgccaatccacgggtcataggtaaaatagtacatggcaacccaacaatgctgtgtcctcatttatcatgatcatctactttattgtgtaaaggatcttttagttacctccccgcccatccatgtacacggaagggccatgtacatggcgaagctagagactgtaaccttccggagtccagtgctctttcggcacttctgcaaccaggcagtggtaaaaggggtgctctccaaaccatcttctagcagatctttttcagttaagattacttgttcttccatgtattcatatttagccagctccttgatcagccgcagtatgtcactgcagtcggcggcagtggctgggcggatcacgaatttagccattttcgtcttttgcttttcttccctttgcggaccaggcccctgtacttgaacagtaggaggaggtggttcctcattcgtctcccgggagcgtcctcttctcagtcaggctggcaccatgacccaaggaacctcggcgagtgacggataaacaccagtcggc

SEQ ID NO: 22162 - DNA, 1960 bp, Homo sapiens
  misc_feature 1, 2, 8, 1960: n = A,T,C or G
nncgaacncccataggtagggacgcgcgccattgtgttggtacccgggaattcggccattatggccgggggcagcaggcgtgcagtttcccggctctccgcgcggccggggaaggtcagcgccgtaatggcgttcttggcgtcgggaccctacctgacccatcagcaaaaggtgttgcggctttataagcgggcgctacgccacctcgagtcgtggtgcgtccagagagacaaataccgatactttgcttgtttgatgagagcccggtttgaagaacataagaatgaaaaggatatggcgaaggccacccagctgctgaaggaggccgaggaagaattctggtaccgtcagcatccacagccatacatcttccctgactctcctgggggcacctcctatgagagatacgattgctacaaggtcccagaatggtgcttagatgactggcatccttctgagaaggcaatgtatcctgattactttgccaagagagaacagtggaagaaactgcggagggaaagctgggaacgagaggttaagcagctgcaggaggaaacgccacctggtggtcctttaactgaagctttgccccctgcccgaaaggaaggtgatttgcccccactgtggtggtatattgtgaccagaccccgggagcggcccatgtagaaagagagagacctcatctttcatgcttgcaagtgaaatatgttacagaacatgcacttgccctaataaaaaatcagtgaaatggcaaaaaaaaaacaagacagagaccaacaggcagcgaccgcacaacaacacaaacgagcaccggagggcgcgctgaaacggcagagacaccgccaaacaatacatataagcggacgcaaagaaagaaacaaaccggcagagacaagggaagatacatactagagtaagttacgcggacgcaggtctttcttgtgtctttcgtttttatctcgaggtggcaaaacaagacgatgagagaagaacgaaacagcagaagagagagcagaaagaagaaaaagcaaaagagaagaagacaaacaacaagagaaaagcaaaaacagagggaaacgaagaaggcagcaagagacagtgaggcacgagagagcgacgaaagggagaagaaagaagcaggaaagcgagaagggggcagagaagagagaggagcagagcaggagacggaacgcgagaaggaagcgagccgacagcagaagacagaaagaggaggacgcgagaaagcgaagagcacgagagaggcagagaaaagaaagcagccgagagagagaagacgagagacaggaaggaagagagggggaagaaggggaagacaacaaggggagagcgagagaagagcaaggaaagaaagagaagcagaggacggccggagaggcgaggaggggcgggagagaggggagggagagaagagcggagcagaaggagcgagacggggagggggggagcggaagagagagggaggacgaaagcgaagccgaaggagacgacgagagaagggagagagaggggcgagagagagaagaggacagggatgaacggagcgaggaagagcggcgaggagagcaaaggaggagacggggggtcgaggaggagagagggagggcggaggcgaaggcggaggagggagcgaaaggagagggagagggaagaggcacgagagaagcgaagagagcgcaggacgagaagaacagcgaacaaagaagcaacgagcgcaggagagcgaggcgcagagcaagagaaaacagagggaggcagcgaacagaagaagacacgaggggaggaagagagcgaaggaggtaggcggaggacgagcgagcgacgcaggggagagcagaagaaaggaaagcggaagaatgaacgcagagagagaaaggagagagccggagagcagacgagagggcgcaagaaggacggagaaaggcagaaggagagagaagan

SEQ ID NO: 22163 - DNA, 3470 bp, Homo sapiens
acaatttacgtcctaagggggggctactctaattatcccattcaaatggaatttttttcaaaattggatagaaggaattgaagagttgtaagtagtgattagtctgctaatcagttcttcagatgagatattgaatggtaacactctgagcttaaaactcagcagtgtgtctgtgacctccacgcaaatcagaggaagcaatgcatccacgctgagcctcaccatgtcttcctcccaactctcttcatactctctgtgtcttccagctcttctttctctggccggctctctttcctcttctctctgcatatgtgagaacgcctgggcatcctgggtaacagcagccccagctgccctctcctgttccctgttccaagtcccctgcactgacctttcttgagtctctctggctctgtgcatgtctttgggactctcctcatctggcttttcctctgtgtgtgcctctctgtttgcttatgtctctggctctgtcttccccacccctcccctcacacacacacatactcccaaatgtaaggctctgtggcaggttggaatcggagtaaggcttgagattcactgagttctgtaggtagggaaagaagtcaagggagtggaggttctataaggaattaacagctgaggacggaagggtttgtttcccgtttgaacctaaacgcaagtggaaaagaatactcagaatgtatttttctactttacatctgctggggaaggaaatgtgtcaggaagccgctgcatctggtcatttcatcgcatcagaatcacagcagacgtggaagattccatgtggtggggaataaagaaataactttatgctctcctgaaaaacagcgggagcctatgtgtgtgtgcgacactgtaatctcaaggagattcactcagagctgtctcagtccaactcctgcatgaccagatcttcccttagcatcttttctgtgatgaaatattatcttgtgttagagttaggaataggaactaacctgtaggagcatgtccccaaatggacatttgaatggactaacaaaaacaactggaaagactgaatttccgacacaaaggaatgatgggatcaaaaagaaagcagtgaggagttcttgagtcttgtagtacctattcttattttaacttgcttcatccttgatctacctgagacactaagaaggaaattagttttccaagagctctttgaacctgtctaggactgtagttaaacctatttgccctatgggggttcttcacactcgaaaaactatttccttatcaccaacgacccacccagaaaggccaatgaggccaaatgtaacaatttttaacatttaaatataactattaaaattgcattaattgtgaacagtgaattaaagggttgtcttctccaggagacagtatgtggcacttttcgtaaatttcatttaatatataaaaatttaaatcactcactgcaacatgcatttaaaatcttccaagaaggtagaggtatcattttctgttttgctttgttttaaaacagttgcctcaagcttctgtcttaagagtagtgacttagaatccagatatcttttgttttagaaaaacaagcaaaactatgttgcaagactgacagttgtaatgtttatttgccacagatcaaaggttcacaaagtatatcaaatttacatctacttggggtaccttgatagattattattgtttttcttttatctttcccttcaggaatttggaaactcgttgtcactttttttaattttaaaaatactaaattgtaatagttttcttttgccaaatgtgtgcgtacatattcaaagcaatgaaactatttcaagccatacaaccacaggggtgggaacccttttcacaaattttaatgtgtttgtatgtaaatagatgtttgtatgaaatattttcatgatagaatgaatatatttaaatgaagttgaattattccagtgctacttaaacacattacaaaaattttggtgagaattatctgagtctattgagatgtaatgcagatcaattttgatttttaaaaatcaaaagcctacaataactctgactctcagcaacttcctcggcgttgttgcacctgacgtggagagagctcgtaggcttccccagtgcctcagccgcttcctggtggaagttaggtgctaatggaggtgtgttcaccttttagtgatatcactgcaggcctttgaggggcctgagagtgaatcagaggcattagagacaccggtgcagttatctggagcacaatttctttgcagggcagcagaatcagaagccagacttggccatgtgaacctcgaaactcggtttcccggccgccatcaaccgccacccttactgcctagtcacacacgtcagggaggctgccctcagtggagttggggttgagaccccagggtgggacttcacagttttgccagcaatctctaccttctgacttctgcctcgcagagaggaaggagaggggagcatctggcaaggggcccatttctcagcacagtacatttcctgtctcagctctggaagactatgcacccaagcaccaaacttccaaccagagagagagacgtcctccgataacaaaaatccttgcttcctctgtctgtgactttacacacagttgttcaaagttgttaaatgtcaagagtcaatcacatccctaggacatacctcccaactctcctgactcttatgttattgaaaaaacaaacaaacaaaaactcctttatgatgatattcaacttgagtggggttttttttccactttggtcctggatataatgaaatgatacatattaggataaattttcactgtgtatagtagcaatacgaacacacatgccaatgtatcaacatatctacttggttacattttggtttatgataattaaccttgattcatgtattgggaagctacagggactacgtaatacctgcttatcacataggaaaattatgtccatgattctgagctcccttcttcaaaagtttcctcctgggtgttctatgttctctctttatcctgaaatacatttattaggttgtgaggtatgttgaagaagtagaagccaggggtatgctttcagcatttattgcaaccaaaagttaaccccatcacggttaacgagcatctttggtctcttgtggaatttgaactaaaactatgagccttattcaatatctataattctatgatttttttaaattatgggaaattaatgaaagatgtttacatgaataatgtttgcccttactgtgttatgaatgagttttttgtagtgtgtctgggtgcatgatgcaagagagtaggaaaaatgtttctgaaacaaaacttgacaaatatttgtaatgaaagtaaatttaaagattgctataattgcgctatagaaacaatgcaagtattaaacaaaatatacaatcaaaaaaaaaaaaaaaaaaag

SEQ ID NO: 22164 - DNA, 2216 bp, Homo sapiens
  misc_feature 1, 2, 3, 2215, 2216: n = A,T,C or G
nnncacgaggaaattgcagagaaaggagggcatcaagcttaggggaccaatccctgtctttctaccagtccctgataactactcaagctccctttaaagaggctcatattggaatactctgttgacaagtagataccacttcacctctgctagggtgagcgctggtagctcctccctgttaaatgcccatctcaatgcctctgccctaagtgagttgtgcaataaatgagctgtcactctgaacaggtgggaaagaagtgaactgcttgttcacttgctgctgttgccactgctggtacagaaatagaagcacaaaaaaacaaagacaaaaaacctccaagctcccttcagtagttgctacaccttcagattgagacatccttcctcatttacaaacctcagctgtgtctggggcagggccacagtgaaactgccaggagcaaaaaggcttccaagaaaaagtaccacatcagattggaaactggggacagatcattcctgggatgtgacgggcaccagaatgctccctctccaaaggatctaaggaccaaagctgacagtttctttacttgggtagctgacagcatctactcctgaagaccggaaacatggcttgtaccatccaaaaggcagaagcacttgacggggctcatttgatgcagatcctctggtatgatgaggaagagtctctctacccagctgtatggttgagagacaactgtccgtgctctgattgctacctggattctgcaaaagcacggaaacttctagtggaagctcttgatgtgaacattggaattaaaggcttgatatttgacagaaaaaaggtgtacatcacatggcccgatgagcattacagtgaattccaggctgattggctgaagaaaagatgcttttccaagcaggccagagcaaagctccaaagagaattgttttttccagaatgccaatactggggctcagagctccagctacccactttggattttgaagatgttttaagatatgatgaacacgcatacaagtggctctccaccctcaagaaagtaggcatagtaagactcaccggagcatctgacaaaccaggagaagtttcaaaacttgggaaaaggatgggtttcctctatctcacattttatggacatacttggcaagtgcaagacaaaatcgatgcaaacaatgtggcttacacaactgggaagctaagctttcacactgattatccagccctccatcatccacctggggttcagcttcttcactgcataaagcaaacagtcacagggggtgattcagaaattgtagatgggtttaatgtgtgccaaaaactaaagaaaaataatcctcaggcattccagattttgtcctctacctttgtggactttacagacattggagtggattactgtgatttttctgtacaatcaaaacataaaattatagagttagatgataaaggccaagtggttcgcatcaacttcaataacgcaactagggacacaatatttgatgtgcctgttgaaagagttcagcctttttatgctgctctgaaggagtttgttgacctcatgaacagcaaagaatccaagtttaccttcaagatgaatccaggtgatgtgattacttttgataactggcgcttacttcatggccgacgtagctatgaagcaggaactgagatatcccgccatctagaaggagcttatgctgactgggatgtggtcatgtcaaggcttcgtatcttaaggcagagggtggagaatggaaactgaagtcacctgtagataattttaataagattccaatgaccatattttgtgagatatggcacattattcacagaccatgatctttgtgatttacatataatttccttaacaatgaacatgtaacttctctcacaagagtactctttactttgtaatcatatacaatgtcaactttttagatgtttcaccactcttttgcaaataaagcatcctttctgctctgttgcatgcctgctctaatttcttttgcccatatatgagtatctccagaatgtctacaaatagtttttgtagcaaatgaaaatttcttcaaataagccttttgtttcaaataaaacttgtctcaaaacatgctaactaccactgaacatgactttacaaaaaacacataatttgaatcaacacaaccacccacagcctaattattagcatcatccctctactann

SEQ ID NO: 22165 - DNA, 1242 bp, Homo sapiens
  misc_feature 1, 2, 3, 4, 5, 6, 7, 8, 1241, 1242: n = A,T,C or G
nnnnnnnncggggtacttctagcatcaagtaaaacctcttctcctcaaatatattgtccctttaaaaaaattatcccacagggagaaaaacatttagggaattggcacatttccaagtctcttcaattcgttgcctaggtttctttcaaaaataggcattattgaagacttgagatgcaagtcttagtaaatacatcaagcacattaatttttctcccttgggctaattcagcataagtatcttaaaagtatgttagaaagtactgactttaacttgctctgactgaatgctttctggatggaaccctgtataccacttttatctgatttggagatgagacactatgaaatgtgactccacaagctttctgctgcttgctgtgtcttgataacattaatgctatgtttaacagaacaattgctgaaatgacctaaagggcctggcaagaggaagccatcctcccagccctgtgcgcatgcgagctttagtgtaaggctattctggtgctattcagtattatttcacgtggctttttctttatccttctaccaagtattggttttaccaggggatagaaattgtaatcccctaaacatctctgctacattaaatggacttttgtatgtctcctttgaacactgattttttttttttaaattgtcaaacttggtaaaaagcaccagcatggccaagtttctctagggacttcatttcattttcaggttttcaatccagctataaggaatatgtaatggacttatatacagcacacagcaggcagcaaggctgactgacatgtcatagttttcatagtagtcacaaatactatgatgggtttcatggtcttggttgtgaaatagatatctgaaacaccgtgagcttagaataaaaagtagtagtgagattttccactttctgcctgtatacctttgagctcttaaatatttaaaaaaaaaaaaaaaaagtttccctgtgatacaactaattagctactaaaagtagagtctcagattgttaatttgaaaatagataactttttttggattgctgtaataacaggtagaagagagtattttgacctcatgttaaaaggctctgtatagcttcgggcgcggttgctcacccctgtaatcccagcgctcttggtggctgaggtgggtggatcacttgagatcaggagttcgagaccagcctggtgaaaaccagcatgagaccagcatggtgaaaccctatctctacnn

SEQ ID NO: 22166 - DNA, 2224 bp, Homo sapiens; identical to SEQ ID NO: 21832
  misc_feature 1, 2, 3, 4, 5, 6, 2220, 2221, 2222, 2223, 2224: n = A,T,C or G

SEQ ID NO: 22167 - DNA, 2216 bp, Homo sapiens; identical to SEQ ID NO: 22164
  misc_feature 1, 2, 3, 2215, 2216: n = A,T,C or G

SEQ ID NO: 22168 - DNA, 1268 bp, Homo sapiens; identical to SEQ ID NO: 21760
  misc_feature 1, 2, 3, 4, 5, 6, 7, 8, 1266, 1267, 1268: n = A,T,C or G

SEQ ID NO: 22169 - DNA, 9785 bp, Homo sapiens
gccttgtgccttctggaggatttctctctagctcgactcactctggactgactcgctccctggctttctcagttcgttttgggagataacttgttttgctccaagccgcatccgttgaccccttacagtcggatggtctagatgactgaatggagttttgagttggacttttgtgtccctgacggagttgggcctgatcccagagcactgggggtggggaggaggtgttactgtaaaatgcaagttggataaaaggaggacctctcgccaagggccccaatgagtggcacacagtctactatcaccgacaggtttcccctcaaaaaacctataaggcatggaagtattttgaaccgagagtcaccaacagataagaagcagaaagttgagcgcattgcatcacatgattttgaccccacagatagctcctccaagaagacaaagtctagttcagaggagagtagatccgagatatatggtcttgttcagcgttgcgtaatcatccagaaagatgacaatggatttgggctgacggtcagtggagacaatccagtcttcgtacagtctgtcaaagaagatggagcagccatgcgggctggagtacagacaggtgatcgaatcatcaaggtgaatggaactctggtgactcattcaaatcatctggaggtggtgaagctaatcaaatctggttcctatgtagctctcactgttcagggacgcccacctgggtcgccccagattccacttgccgactctgaagtagagccgtcagtcattggacatatgtctcccatcatgacatctcctcattcacctggagcatctgggaatatggagagaatcactagtcctgtgctcatgggggaggaaaacaatgtggttcataaccagaaagtagaaattctgagaaaaatgttacagaaagaacaggaacggctacagttattgcaggaagattacaaccgaacacctgcccaaagattgctaaaagagatccaagaggccaagaaacacattcctcagctgtcaagagcagttatccaatagccacaggctctgctcaggatggagctgtagttacaccctccagacctttaggggacaccctaacagtcagtgaggcagaaacagatcctggagatgtactgggcaggactgactgtagcagtggagatgcttctcggcccagtagtgacaatgcagatagtcccaagagtggcccaaaagagagaatttatctagaggaaaacccagagaaaagtgaaacaattcaggacactgacactcaatcacttgtcggaagtccctcaacccgtatagcacctcatattattggagcagaagatgatgattttggtactgaacatgaacagatcaatggacagtgcagctgtttccagagcattgaattactaaaatctcgcccggctcatttggctgttttcttacaccatgtagtttcacaatttgaccctgcgactttgctctgttatctctattcagacctgtataaacataccaattccaaagaaactcgtcgcatcttccttgagtttcatcagttctttctagatcgatcagcacacctgaaagtttctgttcctgatgaaatgtctgcagatctagaaaagagaagacctgagctcattcctgaggatctgcatcgccactatatccaaactatgcaagaaagagtccatccagaagttcaaaggcacttagaagattttcggcagaaacgtagtatgggactgaccttggctgaaagcgagctgactaaacttgatgcagagcgagacaaggaccgattgactttggagaaggagcggacatgtgcagaacagattgttgccaaaattgaagaagtattgatgactgctcaggctgtagaggaagataagagctccaccatgcagtatgttattctcatgtatatgaagcatttgggagtaaaagtgaaagagcctcgaaatttggagcacaaacggggtcggattggatttcttcccaaaatcaagcaaagtatgaagaaagataaagaaggggaagaaaaagggaagcgaagaggattccccagcatcctgggacccccacggagaccaagccgtcatgacaacagtgcaattggcaagagccatggaactacagaaggcgcgccaccctaagcacttatccacaccctcatctgtgagtcctgaacctcaggactctgccaagttgcgccagagtgggttagcaaatgaaggaacagacgctggatacctgcctgccaattccatgtcttctgtagcttcaggggcctctttttcccaggaaggagggaaagagaatgatacaggatcaaagcaagttggagaaacatcagcacctggagacaccttagatggcacacctcgtactctcaatactgtctttgatttcccaccacctccattagaccaagtgcaggaggaggaatgtgaagtagaaagggtgactgaacatgggacaccaaagccctttcgaaagtttgacagtgtagcttttggagaaagtcaaagtgaggatgaacaatttgaaaatgacttagagacagacccacccaactggcagcagcttgttagtcgagaagtgttactgggactaaaaccttgtgaaatcaaaagacaggaagtgattaatgaattgttctacactgaaagagctcatgttcgaacactgaaggttcttgatcaagtgttctatcagcgagtatccagagaaggaattctgtcaccctcagagctacggaaaattttttcaaacttggaagatattcttcaacttcatattggattgaatgaacaaatgaaggctgttcgaaagagaaatgagacctctgttatcgatcagattggggaagatttgctgacatggttcagcggaccaggagaggagaaattgaaacatgctgctgctaccttttgcagtaaccaacctttcgccctggaaatgatcaaatctcgtcagaaaaaggattctcgatttcagacttttgtgcaagatgctgaaagtaatccactgtgtcgtcgtcttcaactgaaggatattattcccactcaaatgcaaaggcttactaagtacccacttctgttggataatattgccaaatacacagaatggccaacagaaagggagaaggtgaagaaagctgcagatcactgtcgtcagatcttaaattatgtaaatcaggctgtcaaggaggcagaaaacaagcagcgcctagaagattatcagcgtcgccttgatacctccagcctgaagttgtcagagtacccaaatgttgaagagctcaggaatttggatttaacaaaaaggaagatgattcatgaagggccattggtttggaaggtgaatagagataaaactattgatttatacacgttgctgctggaagacattcttgtattgttacaaaagcaggatgatagactggttttaaggtgtcatagtaagattctggcatctacagctgatagcaaacacacgtttagccctgtcattaagttgagtacagtgttggttcgacaagtggcaacagataacaaagctttattcgtcatttccatgtcagacaatggcgctcagatttatgaactggtggcacagacagtttctgaaaagactgtctggcaggacctaatctgtcggatggctgcatcagtgaaggagcaatccacaaagccaattccattaccacagtcaacacctggcgaaggagataatgatgaagaagatccttcaaaattaaaagaggagcagcatggcatttcagtcactggtttgcagagtccagacagagatttgggattagaatctaccttaatatcgtcaaaacctcagtctcattcactgagtacctctgggaaatcagaggtacgtgatctgtttgtggctgagagacagtttgcaaaggaacaacatacagatgggacactaaaggaagttggagaagattatcaaatcgcaatcccagattcacacctgcctgtctcagaagaacggtgggcattggatgcactaagaaatttgggtttgttgaagcagttgctggtgcaacagctaggtttgactgagaagagcgttcaggaagactggcaacatttcccaagatacagaacagcctctcaggggccgcagacagacagtgtcatccagaactctgaaaatattaaggcctatcattctggtgaaggacatatgccctttagaactggaactggtgacattgcaacttgttacagtccacggacttcaactgaatcttttgctccacgggattcagtgggactggcaccccaggatagccaggcaagtaacattttagtaatggaccacatgattatgaccccagagatgcctaccatggagccagaagggggtcttgatgacagtggagagcacttttttgatgcccgtgaagcacatagtgatgagaatccatcagaaggtgatggagcagttaacaaggaagagaaggatgttaatttacgcatctcaggaaactatttgatccttgatggctatgacccagtgcaggagagttccacagatgaggaggttgcttcctcacttaccctgcagcccatgacaggcatccctgctgtggaatccacccaccagcagcaacattctcctcagaatactcactccgatggggcaatttcaccattcacccccgaatttctggtgcccagcagcgctggggagctatggagtattcctgttttgagatccagagtccctcctcttgtgcagatttcacagagccagatcatggagtacattcataagatagaggctgaccttgaacacttaaagaaggtggaggaaagttacaccattctttgccaaaggctggctggatcagccctcacagacaagcactcagataaaagttagagccgcatgtcctggaggtgactgcaggttgttggatttggagtatcggccgtgtctcaccacatcctggctccagtgtggatgcagagagagtgtgacagaggatctgcctgtgaaccacctgggattagtcaagtcccaaggtgcccagagtgggactagttcttcacagtgtggcagctgcactaatctgtttgtgagggaatatccattccctcactctactctcctcactatcggaaattcattttgattcagaataaaaaccaaatgtatagagctttgggtgtaggatatgaaattgtacttagatttaagaaaaagagaaaatcagatgtatttatttgacttcattccgtatttgaaagcacattttaatttttatttgccttgttttgttttaattgagtagtgagagttttagacctttgtctttagtacacccaaggatcaactgctcctgaagcaaagaggtcaggatggagtatgcagaagttgggtagagaggttaagaagaggaggaagtgagacggggaagggaggagcaccttgcttcactatacagtattccaagctctctgctgtccagtaggctgcttctctgagggtcacctcaaaggtatgctatgccgtgtggctcttatgtgcccaggtggtgtggtcagagagtggatgggcttcctcccgccctgaggcaagcacctcttctctgtagctgggatcaaccacaattaataggaatcctcaacatactaaatagcaggcacttgaaaatgggtgtgttttcttccattgtcgtcttttctattgagggttgggattttgggtgggagaggaaagcaaattttattttcttgactataaatttgttattcttggtatcatttcatttttataattatacattagacattggcacttgtgtaaaactgtccctgcagattgagcaggaagtaaaaacaaatggaaatgcttcggatagtggcaggggtgggggttgctaaggaaagggtgggatgggagtgggtaaagagtttgggaaggttatctaactgaatcactactgagttgaatcatggctatcattagccacaggtactgctgattataaggccagtaaaattttagtacctggaggtttgactctaatttttgcactgatggtgccaaagggccctgagtcaaaaggatagccaagggtggagtggaaaaagatatggtgaaggcagaactgctcacaccagctccagaagcacgtcctctgacttcactgccgcagctctttccacacggggccgtgattgaccctaaaaattgcagaccagcacatacactggacactgcaggcaaggtgttggtaactgcctgctctaggatgaatagtagcgttagcagcaccctacagagggtaagtttcagaattgtaatttgagaactccttcaattatattgactttctttggttttccttgtgcattaggtatatattttttgaagtatttttgccaactaaaatgaagtctgtaaattctgttaataaacaaggagttcatccgttgctcacatctttcattggtgccctctgaactctgtgggttgctaggatgtaattttaatgcttccctgcagtccaaagatgattttttcaccacaaatggtaagggatgcccacctacttttataaacaccactgcaacttaacaagtttatttatctatgtccagatttctgtttctgtcctaaattgatctgtgtttttaggtggatcaacttggatctttagacctcatctataaattgaaattatatttttagtcataagccaagtacaatctaactcagaatgggattaaaaattttagaagcagaagctaatatataaatgaagtttgggatttggaactttctgtatctcttaggaggaacaagtaaaaaccaaatggttacattgtgctgctagaaataatgtcattctcaattaaaagggttacacctgtagccacttgacactaacaccatcgagggcaattaatcaggagaaaagtaaatataaaaactttgctcttaacgtcacacactacagggtaattatgtaattctctagcactcaattaagaagcttgtaggttagcaaaatttcagtttctctagttcagccagtgtcttgtccttagtaattatttgctttccctgcagttcaatttctccttggaactctaacaggactaactggaaaaatactttgaccatagctctagtacttccaaataaattcatatctagattttcaaacaaagccccaagatgaagtctaattctgaaaatatctcacaatttttgaatgttctttttatcttaccgacctaacttctcttttccctcccaacttggcctcccacacgttccatttcattttggccattatagtcacatccgtttgactttggttgtgacatcttcctttcaggatgatggaattagatgcagtctgtctttgagtgagactggtcaccatcagaggagttttttctaagtgacgtgactagaagttgaaatctacttccctgctaaagggcacaggggtggtgtacaaagaaagctaccttcccagagcaagcaggctgcattttagctatggaagtgacctgctgtgacactgtgctctcttctgtgggcttaatggttcctttgctatgaagtggcaaattacatgtagagtgtctccttccttttcagagaacagttaatcaaggcaaatcagcaagcccccaaagtgctgtaatttaacatcatgattaccaccttcgaagctatatattttgcatactttaaaatcacctaacttggactgcttgaattacattggcttttagaaccgaaattgtaactatgtattgtatttcatgggaggtatattttatgagctttttggctttcttttttcccacagcaactgccaatgaaggatgaatcccctttttaaaaagttgttgttgttgttgtttatttgattttgagttaggagggataatagagaagtccatttaaaaattatttttagaagctaaagaaagtaattatgcttcctgtgaattgtcttttactggcatctttgttttcctctttgatgttagtaaatttggtgtaatacgtggggcttccatatttcaaagtggaagctttcttctctgaagtcgatatatggttttgaattactagagctttggtcagtatttccttccctatatgtcacagagggcaccactgagaactgcgtgcataggacctcaaaatacaaaattagcagggcctcacagtcagcttcctcatggctagtttttcccccttatattacaatttttgttttataagtcatttttttcctgatatttccaccacttttcagagtcatctacaaaatttttctttcctcaagaaaagagttccttttgccttattccttatgccttccccactggtattgagggttttgataataaattggtaggaaaaaaaagtacctcctagaaggaagccttccccaccatttccaggtgccaactgctaagcagatatattccaaaaatggtaactgtcatgtgcacactgttggttatttttaataagcctcttcctactagaacattttattttccttgttcaccatacaatcatgtactctttaacagaaattgcttttaaaaaatatctggaactatctttaaaaaaactttattaataatcatgtatttttactgatcacattttgaaatgcctaaaagactttattgttctaattatccagatgtacctttgtaaaatagctcttttatgaattagctgataaggctgtatgtttctggaacaaaatattggtcatctaaaaactttctgttttctggggtctgggaaaatagaaaataagatttcaaatattaaataagcttaaaggaaccaagcatgtgacttttactttgtattctggttgatttgtcttgtccaagttatattagaaaagttgaggagtcgaggagcctgtaattaattttcctgtcagtgactgtcagacatcttcctgcttattagagcatccctagcaacaaggctaaaccttcatgacagtgctggcaggtgggcttgccctagcatgtggggcaggtttgttgtttttttaatagctttattgagatattcacatatcatataattcatccatttaaagtgtataatcagatgggttttggtatattattgatttttaattgtggtgaaatatatatataacaaaatttgctattgtaactatttttaagtataaagttcagtgaggtaggccagcttttatgacgcacctgaagataactttggttttaatcctaccctaaatgaagcatatgcctctatttttcctgtccccagtgctgggcttcttcacataccaacatttctgtgcttttaccaacagcattttagctcagaaggctcgcttactttgggcatttgctgtattttggttttgaaatacttgtaatttgacttattcttgggataatattttagttttcagtcattcaagggcacatttggctgacggagctaataagcgtaataaaatgcttagtagtttataccatcttttagttaaacattttaaagattaagactattcaaatgtactttgcggaaattaacctgtttgtatgcctggctttgtttacaaacatatatctatatctatatatatagatacagatacagatacatatctggtggaacaaagaaatacctgtaccattcccacttgctctttgatagccacctcctaggaatggagacaataaaactctgtatttgcatgtgagcag

SEQ ID NO: 22170 - DNA, 2258 bp, Homo sapiens
cggacgtggcgcacatggtgagctccgggggcgctccgactgcgtgccccaaatccccggacctgcccaactccgtctcggcgccgaccgacgccggtgcagaagcgcccaggagcccttccgcgaaggctgggagcgggagcgcgacgcccgcgaaggctgttgaggctcgagcgagcttctccagaccgacctttctgcagctgagccccggggggctgcgacgcgccgatgaccacgcgggccgggctgtgcaaagccccccggacacgggccgccgcctgccctggagcacaggctacgccgagcctggcagggtcatcaatgctggcaagagtcggcacaatgaggaccaggcttgctgtgaagtggtgtatgtggaaggtcggaggagtgttacaggagtacctagggagcctagccgaggccagggactctgcttctactactggggcctatttgatgggcatgcagggggcggagctgctgaaatggcctcacggctcctgcatcgccatatccgagagcagctaaaggacctggtagagatacttcaggacccttcgccaccacccctctgcctcccaaccactccggggaccccagattcctccgatccctctcacttgcttggccctcagtcctgctggtcttcacagaaggaagtgagccacgagagcctggtagtgggggccattgagaatgccttccagctcatggatgagcagatggcccgggagcggcgtggccaccaagtggaggggggctgctgtgcactggttgtgatctacctgctaggcaaggtgtacgtggccaatgcaggcgatagcagggccatcaagccctttctctcctgcttccctgaggtacgagtgtatgacctgacacaatatgagcactgcccagatgatgtgctagtcctgggaacagatggcctgtgggatgtcactactgactgtgaggtagctgccactgtggacagggtgctgtcggcctatgagcctaatgaccacagcaggtatacagctctggcccaagctctggtcctgggggcccggggtacccccccgagaccgtggctggcgtctccccaacaacaagctgggttccggggatgacatctctgtcttcgtcactccccctgggagggccaggcagttactcctgaggggctgaacaccatccctcccactagcctctccatacttactcctctcacagcccaaattctgaagttgtctccctgacccttctttagtggcaacttaactgaagaagggatgtccgctatatccaaaattacagctattggcaaataaacgagatggataaaggaaaactcgtgcagttttagcgggtacatgatctaccccggacacgggaggcgctacgccaggaccgacgggaaggttttccagtttcttaatgcgaaatgcgagtcggctttcctttccaagaggaatcctcggcagataaactggactgtcctctacagaaggaagcacaaaaagggacagtcggaagaaattcaaaagaaaagaacccgccgagcagtcaaattccagagggccattactggtgcatctcttgctgatataatggccaagaggaatcagaaacctgaatgttagaaaggctcaagcgagaacaagctatcagggctgctaaggaagcaaaaaagggctaagcaagcatctaaaaagactggcaatggctgctgctaagctacttctaggagcgtcaaagggcctcacccagagactacagaccctccggtggagaagtgtactaggccgtgtctgcagctggagccctcggcctgaaatgttctggctttagcaaagcggcgacagtgtccaaccccagtccccgaggagggatgtcagccctgggcccctgtgagcgctgcagattcgtcccaggaaagggtgaccggggtcgctgctccgggattaccagctaaatacctgtattagcatcctcagcacgcactgggagacgcagctcaagtccgctccccttcttgcaccctcatatatatttggtgcaaaatggagaaccttttcccctacgtttgtgtaaaaatatatgtaaataaagccttaaaatagtgttaccgacccccttttccactcgcaataacattgactataaatgctgataattccaaaagaatctcgactcttccttgagtagtctggagcaagcagaaagcaagtttagaaacaataactcatcactgagggaggcacggaaaa

SEQ ID NO: 22171 - DNA, 414 bp, Homo sapiens; identical to SEQ ID NO: 21407

SEQ ID NO: 22172 - DNA, 33 bp, Homo sapiens
  misc_feature 1: n = A,T,C or G
nactggccaccacctctctcgcctgctgagtgc

SEQ ID NO: 22173 - DNA, 3365 bp, Homo sapiens
gggagtcgacccacgcgtccgccggcggttagtgctgagagtgcggagtgtgtgctccgggctcggaacacacatttattattaaaaaatccaaaaaaaaatctaaaaaaatcttttaaaaaaccccaaaaaaatttacaaaaaatccgcgtctcccccgccggagacttttattttttttcttcctcttttataaaataacccggtgaagcagccgagaccgacccgcccgcccgcggccccgcagcagctccaagaaggaaccaagagaccgaggccttcccgctgcccggacccgacaccgccaccctcgctccccgccggcagccggcagccagcggcagtggatcgaccccgttctgcggccgttgagtagttttcaattccggttgatttttgtccctctgcgcttgctccccgctcccctccccccggctccggcccccagccccggcactcgctctcctcctctcacggaaagggtcgcggcctgtggccctgcgggcagccgtgccgagatgaaccccagtgcccccagctaccccatggcctcgctctacgtgggggacctccaccccgacgtgaccgaggcgatgctctacgagaagttcagcccggccgggcccatcctctccatccgggtctgcagggacatgatcacccgccgctccttgggctacgcgtatgtgaacttccagcagccggcggacgcggagcgtgctttggacaccatgaattttgatgttataaagggcaagccagtacgcatcatgtggtctcagcgtgatccatcacttcgcaaaagtggagtaggcaacatattcattaaaaatctggacaaatccattgataataaagcactgtatgatacattttctgcttttggtaacatcctttcatgtaaggtaagccaaaaatgtccgatacacatgtttacattgttgagctacatttagtttagtgcttgaaataggaactgtgcagtaatggatatctttatttcacaaatatccaggttagatggctaacagattgtctctcaacactgaacaaatgttaaatcaatagtaaataaagaaaaatgggtatatgtttttccctaggtggtttgtgatgaaaatggttccaagggctatggatttgtacactttgagacgcaggaagcagctgaaagagctattgaaaaaatgaatggaatgctcctaaatgatcgcttagtctttgatggactattcaagcttggtaaagatcgataagctgatctctgtgctagggcaaaagaattcaccaatgtttacatcaagaattttggagaagacatggatgatgagcgccttaaggatctctttggcaagtttgggcctgccttaagtgtgaaagtaatgactgatgaaagtggaaaatccaaaggatttggatttgtaagctttgaaaggcatgaagatgcacagaaagctgtggatgagatgaacggaaaggagctcaatggaaaacaaatttatgttggtcgagctcagaaaaaggtggaacggcagacggaacttaagcgcaaatttgaacagatgaaacaagataggatcaccagataccagggtgttaatctttatgtgaaaaatcttgatgatggtattgatgatgaacgtctccggaaagagttttctccatttggtacaatcactagtgcaaaggttatgatggagggtggtcgcagcaaagggtttggttttgtatgtttctcctccccagaagaagccactaaagcagttacagaaatgaacggtagaattgtggccacaaagccattgtatgtagctttagctcagcgcaaagaagagcgccaggctcacctcactaaccagtatatgcagagaatggcaagtgtacgagctgttcccaaccctgtaatcaacccctaccagccagcacctccttcaggttacttcatggcagctatcccacagactcagaaccgtgctgcatactatcctcctagccaaattgctcaactaagaccaagtcctcgctggactgctcagggtgccagacctcatccattccaaaatatgcccggtgctatccgcccagctgctcctagaccaccatttagtactatgagaccagcttcttcacaggttccacgagtcatgtcaacacagcgtgttgctaacacatcaacacagacaatgggtccacgtcctgcagctgcagccgctgcagctactcctgctgtccgcaccgttccacagtataaatatgctgcaggagttcgcaatcctcagcaacatcttaatgcacagccacaagttacaatgcaacagcctgctgttcatgtacaaggtcaggaacctttgactgcttccatgttggcatctgcccctcctcaagagcaaaagcaaatgttgggtgaacggctgtttcctcttattcaagccatgcaccctactcttgctggtaaaatcactggcatgttgttggagattgataattcagaacttcttcatatgctcgagtctccagagtcactccgttctaaggttgatgaagctgtagctgtactacaagcccaccaagctaaagaggctgcccagaaagcagttaacagtgccaccggtgttccaactgtttaaaattgatcagggaccatgaaaagaaacttgtgcttcaccgaagaaaaatatctaaacatcgaaaaacttaaatattatggaaaaaaaacattgcaaaatataaaataaataaaaaaaaggaaaggaaactttgaaccttatgtaccgagcaaatgccaggtctagcaaacataatgctagtcctagattacttattgatttaaaaacaaaaaaacacaaaaaaatagtaaaatataaaaacaaattaatgttttatagaccctgggaaaaagaattttcagcaaagtacaaaaatttaaagcattcctttctttaattttgtaattctttactgtggaatagctcagaatgtcagttctgttttaagtaacagaattgataactgagcaaggaaacgtaatttggattataaaattcttgctttaataaaaattccttaagcagtgaaaaaaaaaaaaaaaaaaaaaaaaaaaaaacgtgttggcggcgcgccggccctgggcccagtagaaaaaggcttcacagaactcaattcggttggggcgcgcggggcgcccaagatgtgaattgtagacactgtggcaacaaagcagggtccagaggagaagacccggcgccacggacaatgtcgtgggggttccccccaaaaaaaaagcggcgtgggacccggcggtctgacacactccaagggggtctcgacggcatcgggggtcaccacgagagtgcaagcaggccgta

SEQ ID NO: 22174 - DNA, 665 bp, Homo sapiens
  misc_feature 1, 2: n = A,T,C or G
nnacgcgtccggagcgctgtagggagcctgtgctgtgccgcgcagttaggcagcagcagccgcggagcagtagccgccgtgggagggagccatgaagcattacgaggtggagattctggacgcaaagacaagggagaagctgtgtttcttggacaagtacctccccatcctgagtctgggctccccgcagagctgacgtccctgcgcctgtgcttcccccaggtggagccccacgccaccattgcggagatcaagaacctcttcactaagacccatccgcagtggtaccccgcccgccagtccctccgcctggaccccaagggcaagtccctgaaggatgagcgatgttctgcagaagctgcccgtgggcaccacggccacactgtacttccgggacctgggggcccatggatcagctgggtgacggtcttccgtaacagagtccagctgtggctcatctattatcctgctggaatataaactgattttgggtctattatcttatgccactgcttggcttggtttaagctagcattttgggaatccaaatgagataagtgaaaacattatttccctacaaatctaaaatttgaataatcctttttttagtttcttctcttcctcagatttggataaatcatgttggcacttcaaggaaaatgagt

SEQ ID NO: 22175 - DNA, 474 bp, Homo sapiens
cggggaccctaaggccgccattgtcctgtccttctcccgcgtaccagacccgacaggaccagtgcatctataacaccacctacctgaatgtccagcgggaaaatgggaccatctccagatacgtgggaggccaagagcatttcgctcacttgctgatcctcagggacaccaagacctacatgcttgcttttgacgtgaacgatgagaagaactgggggctgtctgtctatgctgacaagccagagacgaccaaggagcaactgggagagttctacgaagctctcgactgcttgcgcattcccaagtcagatgtcgtgtaccacgcagtccttgaggcagtcctgtgtgattccatgatcagttgtttttgtattttaactattcttccaaaccagcagatgtttggaaattaaggaaaaaattaaattctcatcaatggttgctgttatagttaaatcagtaaagatcttgagt

SEQ ID NO: 22176 - DNA, 407 bp, Homo sapiens; identical to SEQ ID NO: 22145
  misc_feature 407: n = A,T,C or G

SEQ ID NO: 22177 - DNA, 1276 bp, Homo sapiens
  misc_feature 1273, 1274, 1275, 1276: n = A,T,C or G
gcgtccggcaataacttgctttgtcacctcggcaagtcatttccaaatcaggaaggggtcagtttcaggaaacagaaacttctccagctgtttttggcagaaggggatttaagggaatcagggtacttaaagtacatgggaaggctggagaagtcgcctccaggaagctcccactggagctgggatcagaacgtactgtcctgcctgccatcccctgtaagcacccaggaagctgggcttgggccctgggacatggggtgggactgccactcctgcctcctgacacccacaaagccagaagcgtggtgctgctgcagaaggactgaacatctccaaggctgggcccgcagagcaaacttccttggccctgtgtcctccatccatatccttcaaaggacacctcattagtggactccatttctctcttccacggaactccagtggcaagggaatccagaaacgttttctttttgcctggagatgctaatccttagcctaagaataaggaaactggtccatgtaaggactgaccatcctttcacccatctgtctgcccacttgtgcatccatcccattttatccatccattcctccagttgtggacaccagatgactttcagctccccctaccccaaccagaactttgctgcaatggccattcttatatgcccctatggacccatgggacaattctctgggatacatgctaggagcagaattgctgaatcatagggaatgcatgtgcttagcttggctaagcaatgttggagtaaaagcttttggttttgcatcttctcagcacttctagggaggcaccaaaagggaggatggcactgactgagcccacctgagatagctcctagaccccagccctctgtgtcctcagaatcacacactgctgctcatcacttcagcttcccgaagatcatggcaatagcagcatgcctgtaactgtcccaagtacaaccaaaaattcttcctaaagagagggaaccaaagtcacacgggtcaccttgtccacctgtgtggacgttgctcatgttcacatacccttccttgcctccttcaaggcaggtctggccacaagcccacacctggctaatttgtaaaattttttgtagagatgggttcttactatgttgtccaggctggttaaggcctcctgggttcaagtgatcctcctgccttggcctcccaaagtgctgggattataggtgtgggccacccggcccagccttacccttttttaggaattaagtcctcccctccaaannnn

SEQ ID NO: 22178 - DNA, 373 bp, Homo sapiens
  misc_feature 364, 365, 366, 367, 368, 369, 370, 371, 372, 373: n = A,T,C or G
acgcgggtgggagatacctccccagtgtccccaggcggtctaatgatagagacaccttgacgaccacaggcattattatgagagacacactttgccaaacccaggcagtctaatggctagagacaattgggcgacaagcattctagcgggaaaaattcccggctgaccccaggcattgtaataaaagaaaagcctgagtgatcccagccattttcatgggagagactcttgttcgaccccaggcatttcttatgggagggactactggccaacaccagacagtctaataaaaaagacatgtagatgaccccatgcattcttttttttttcacactttaaatactttatttatataaaaactaannnnnnnnnn

SEQ ID NO: 22179 - DNA, 2423 bp, Homo sapiens
  misc_feature 1, 2402, 2403, 2404, 2405, 2406, 2407, 2408, 2409, 2410,2411, 2412, 2413, 2414, 2415, 2416, 2417, 2418, 2419, 2420,2421, 2422, 2423: n = A,T,C or G
nggagttggactgtgaagaaacatggcggccgcgacgttgacttcgaaattgtactccctgctgttccgcaggacctccaccttcgccctcaccatcatcgtgggcgtcatgttcttcgagcgcgccttcgatcaaggcgcggacgctatctacgaccacatcaacgagggggtgagggcctgtgccatccctgaccttggacccgcctgaggggtgacagtggagtagagaagctgtggaaacacatcaagcacaagtatgagaacaagtagttccttggaggcccccatccaggccagaaggaccaggtccacccagcagctgtttgcccagagctggagcctcagcttgaagatgatgctcaaggtactcttcatggaccaccattcgctctacccccttttatacctcatggaccaccattcgctgttggcaagaaacggctttacttactaaacagactctttaccttctgctgtgtttgaagtatgtttagtcagcatgctcaggaaataaatgtgaattgcccttgtacaaggatacttactgctctgccttgggggcaggaaccccggaagggaaataatattgaatacattcaacttgtggattggaaagtggctgacgctagaatgaggttatgaagctgctggaagagctttggcgaggacaaaatcgaagatgaaagtcgtgagcctgctggactccacatcatccatgcataataagagtgccacatactccgtgggaatgcagaaaacgtactccatgatctgcttagccattgatgatgacgacaaaactgataaaaccaagaaaatctccaagaagctttccttcctgagttggggcaccaacaagaacagacagaagtcagccagcaccttgtgcctcccatcggtcggggctgcacggcctcaggtcaagaagaagctgccctcccctttcagccttctcaactcagacagttcttggtactaatgtgaggaaacaaacatgttcaggccccgaacatttccggtgctgactcggccttaaacgtttgtgccataatggaaaatatctatctatctgttctcaaatcctgtttttctcatagtgtaaactcacatttgatgtgtttttatgaaggaaagtaaccaagaaacctctaggaattagtgaaaaaagaacttttttgaggtgtgttactatactgctgtaagttatttattatataaagtattgtaaatagaatagtgttgaagatatgaaatatggctatttttaatggtgacaattatgacttttagtcactattaaattggggttacctatatcagtacaatttgtagttgtttccaggtttggctaataatcattccttaacctagaattcagatgatcctggaattaaggcaggtcagaggactgtaatgatagaattaaattagtgtcactaaaaactgtcccaaagtgctgcttcctaataggaattcattaacctaaaacaagatgttactattatatcgatagactatgaatgctatttctagaaaaagtctagtgccaaatttgtcttattaaataaaaacaatgtaggagcagcttttcttctagtttgatgtcatttaagaattactaacacagtggcagtgttagatgaagatgctgtctacaaggtagataatatactgtttgatactcaaaacatttttcattttgtttaaagtagaagttacataattctatattttaagtcttgggtaaaaaagtagttttacattttataaagtaaagatgtaaatgattcaggtttaaagctctatttgacttcctttttttgtttgagatagcgtcttgctgtgttgcccaggctggagtgcagtggtgtgatctcagctcagtgcaacctccgccccctgggatcaagcgattctcctacctcagcctcccaaatagctgggactacaaggtgccctccagcatgcctggctgatttttgtatttttagttgaggtgaggtttcaccatgttggccaggcgggtttcgaaatcctgacctcaaatgatccacccacctcagcctcccaaagtgctgggattacaggcatgagccaccacaaccgtcccactattttactttttaaaatgacattcctactgattgatttttatcttgctataagttcgatgacaccgtgaatctaataaggttcactgttgacacagtacaagttacatagctaaaatacatagcattgaagactaattttaaggattgacaagagtttattttctattgtgcaatatcttaaaggaagcaaccacctttgggaaagtgtatctgctgctcctagggccatgcttgtatacatatttaaataaacatattcatttacccgaaaaaaaaaaaaaaaannnnnnnnnnnnnnnnnnnnnn

SEQ ID NO: 22180 - DNA, 371 bp, Homo sapiens
acgcggggacactgactagtggtgacggcgttggacagtgcagatacagaacatttctgtcatcacagaaagttcctttggacagagccatgttaagtgatgttatcacaagatggacagaaacattcctgtttgatttatttttcagacccagtttgtggagaaaaataatgatgctttacatatgtctcttgaatccttaatatgtgaatccagagataagtttatacgggaattatttgaatcatccacaaataacaacaaagatactaaacaaaaagcaggaaaacttagcttcatcagcgtgggaaacaagtttaagacacagttaaaattgcttctggataaacttcgaagtacctcggccgccc

SEQ ID NO: 22181 - DNA, 543 bp, Homo sapiens
  misc_feature 1, 538, 539, 540, 541, 542, 543: n = A,T,C or G
nagtcgacccacgcgtccggctgctcccaagtgtcaggaagctgctcaggaggaagaccctcgagcgggagactgcaagccccaagacttcaaaggtactgcaaaaatcaccctcggcaagacgaatgtctgacgtgccggaagggagtcatacgggtccatgctccacttctctccaaggtgtccatggccattcaactcaacaatcaaaccaaagccaaagacatattggcaaaatttcaatatgaaaacagaatactgcactggcagcgagctgcactttccttcctaaatggaaaatgggttaaaaaagaaagagaagagtcgacagagaccaacaggagccccaaacatgtattcctcttcactattggcctggacatctccacataggcagtcatatagagacttgaaatatcattcaagggatttgggtatccagtagacttttagttacatatactacaaaactgactttgtactctcaagtagacctttcgtagaaagaaaatgtttctaataaaaatgtattagaacnnnnnn

SEQ ID NO: 22182 - DNA, 3132 bp, Homo sapiens; identical to SEQ ID NO: 20928
  misc_feature 3132: n = A,T,C or G

SEQ ID NO: 22183 - DNA, 2085 bp, Homo sapiens; identical to SEQ ID NO: 22086
  misc_feature 2081, 2082, 2083, 2084, 2085: n = A,T,C or G

SEQ ID NO: 22184 - DNA, 3132 bp, Homo sapiens; identical to SEQ ID NO: 20928
  misc_feature 3132: n = A,T,C or G

SEQ ID NO: 22185 - DNA, 743 bp, Homo sapiens
  misc_feature 740, 741, 742, 743: n = A,T,C or G
acatgttaaagggatccgtttgattcctttcggcaaggaattgcaaaaatagtttttaccaataccagttaaaataggataggttagactttgggggcagggtgagacagtgcagccttttcactctgaaatggcaaatcagctgtacgcggggagagctgtttccgttcctctgcccgccatgccgttcctggagctggacacgaatttgcccgccaaccgagtccccgcggggctggagaaacgactctgcgccgccgctgcctccatcctgggcaaacctgcggaccgcgtgaacgtgacggtacggccgggcctggccatggcgctgagcgggtccaccgagccctgcgcgcagctgtccatctcctccatcggcgtagtgggcaccgccgaggacaaccgcagccacagcgcccacttctttgagtttctcaccaaggagctagccctgggccaggaccggtgcgtaggggtagtaggggatccatgtgggactgccgcagactggagccactgatcctgcctcagggggaaaaacccatttcttgccctgcccagtaaggacacatcagggtctggagctttggggccccctgaccccttaggttcctgctgttaggaccatcttcaaagtgcgagcaggattgaatgaatttctggctctgctcctcagtgtgtaagtctgtgaaccgggaaggctctcttttaacacccccggggcagtgcaagggtcatgnnnn

SEQ ID NO: 22186 - DNA, 1896 bp, Homo sapiens; identical to SEQ ID NO: 21007
  misc_feature 1, 2: n = A,T,C or G

SEQ ID NO: 22187 - DNA, 1598 bp, Homo sapiens
  misc_feature 1, 2, 3, 4, 5, 1597, 1598: n = A,T,C or G
nnnnnaggtgccactatagaagagctatgacgtcgcatgcacgcgtacgtaagcttggatcctctagagcggccgcctactactactaaattcgcggccgcgtcgacaactgtatgtgcgagggcaggagtatttttgtattagaagaggcctattaaaaaaaaaagttgttttctgaactagaagaggaaaaaaatggcaatttttgagtgccaagtcagaaagtgtgtattaccttgtaaagaaaaaaattacaaagcaggggtttagagttatttatataaatgttgagattttgcactattttttaatataaatatgtcagtgcttgcttgatggaaacttctcttgtgtctgttgagactttaagggagaaatgtcggaatttcagagtcgcctgacggcagagggtgagcccccgtggagtctgcagagaggccttggccaggagcggcgggctttcccgaggggccactgtccctgcagagtggatgcttctgcctagtgacaggttatcaccacgttatatattccctaccgaaggagacaccttttcccccctgacccagaacagcctttaaatcacaagcaaaataggaaagttaaccacggaggcaccgagttccaggtagtggttttgcctttcccaaaaatgaaaataaactgttaccgaaggaattagtttttcctcttcttttttccaactgtgaaggtccccgtggggtggagcatggtgcccctcacaagccgcagcggctggtgcccgggctaccagggacatgccagagggctcgatgacttgtctctgcagggcgctttggtggttgttcagctggctaaaggttcaccggtgaaggcaggtgcggtaactgccgcactggaccctaggaagccccaggtattcgcaatctgacctcctcctgtctgtttcccttcacggatcaattctcacttaagaggccaataaacaacccaacatgaaaaggtgacaagcctgggtttctcccaggataggtgaaagggttaaaatgagtaaagcagttgagcaaacaccaacccgagcttcgggcgcagaattcttcaccttctcttcccctttccatctcctttccccgcggaaacaacgcttcccttctggtgtgtctgttgatctgtgttttcatttacatctctcttagactccgctcttgttctccaggttttcaccagatagatttggggttggcgggacctgctggtgacgtgcaggtgaaggacaggaaggggcatgtgagcgtaaatagaggtgaccagaggagagcatgaggggtggggctttgggacccaccggggccagtggctggagcttgacgtctttcctccccatgggggtgggagggcccccagctggaagagcagactcccagctgctaccccctcccttcccatgggagtggctttccattttgggcagaatgctgactagtagactaacataaaagatataaaaggcaataactattgttttgtgagcaacttttttataacttccaaaacaaaaacctgagcacagttttgaggttctagccactcgagcttcatgcatgtggaaacgtgnn

SEQ ID NO: 22188 - DNA, 745 bp, Homo sapiens; identical to SEQ ID NO: 20943
  misc_feature 1, 2, 3, 4, 5, 6, 7, 8, 9, 10, 11, 12, 741, 742, 743, 744,745: n = A,T,C or G

SEQ ID NO: 22189 - DNA, 889 bp, Homo sapiens
  misc_feature 1, 2, 3, 4, 5, 6, 7, 8, 9, 10, 11, 12, 13, 14, 15, 16, 17: n = A,T,C or G
nnnnnnnnnnnnnnnnnggcagctttcaggttaaaagtcctccgggtaacggcagaaaccaaatagtcaatcattaaggtgcctgactgcacgtaggcaatagttatcgcaggactgaagccccctttgcagtacaatttatcctttcctagatgcccctgagtacggaggactggaggaggtagaaagggaaagaaaacctccttctggcaggatgtagcttctgctgcacaaggtaggatgatgacaaaaggttttcactgctggggaatggatgattgcgggagaaaaagaatctcggaaaagagtcgggagggaactaggagggagtggccagaaggaaaggaacaaatacttgagacgtgaaaaatgtgagatggatgaggctaggtttggagtcaaatgttggctgagagggagaatttaagtgatggatggatgatcattgtctaaaagaggaatgaatttagaagtttgtcctcatgccctcataaacaaacacgaaatgatggattatgggatacattttccataacatggcaagcgtggtacttggacggataaataaaagcctgagtaatattttctaaattcttaaaagtaagaaagagggtctaagaaagtaaactcagagccagggacttggcccatgttaaaccccaagcactacagctggcttttactcaacccgtggaaactgaccagggtatagagcctgatatatcttcttaggtgaaggtgagacaccagacctaaatctgtcatctcaagagtagaaggatgaaccacacatacaaacccatcacagatgaatgcaaataaaaaagtcagctccgaagttgggttctgagcagtgtagattctactgctaaggcttggactacaagcc

SEQ ID NO: 22190 - DNA, 1896 bp, Homo sapiens; identical to SEQ ID NO: 21007
  misc_feature 1, 2: n = A,T,C or G

SEQ ID NO: 22191 - DNA, 301 bp, Homo sapiens; identical to SEQ ID NO: 20951
  misc_feature 301: n = A,T,C or G

SEQ ID NO: 22192 - DNA, 432 bp, Homo sapiens
  misc_feature 422, 423, 424, 425, 426, 427, 428, 429, 430, 431, 432: n = A,T,C or G
acaagccgtccactgcaggaatgacgtgctgtaaaagggatgcagtgtcaagtgtagtcatggatgggtgggaagaccagacaaaggcatccaatgggactgacttacctaaacaaaccagaaggaagtcagaacagtgggaagatctgatagataagcagtattctgcaggcagatgaaggagcaagctttgggcccccaaatcttcaccagtgcatccacattacagaggataatgcctgagggaggggaagatcatctcaggattctggaacactgggccctccctttcttattccaaaaggctggagcagttctgcatgtaggcttctctggaaatggtctaggaaccagctcgtccaggccaggagcacctgatcattctcagagttacgtacctcggccgctctagactagtggannnnnnnnnnn

SEQ ID NO: 22193 - DNA, 1432 bp, Homo sapiens; identical to SEQ ID NO: 22032

SEQ ID NO: 22194 - DNA, 826 bp, Homo sapiens
  misc_feature 826: n = A,T,C or G
cttcttcctgctgtcgccgaagaatttcctcctgttgtcttcggagttcttcctgcctctttcgctcttcctcttcccgttttgccctcatttctgcctctcttctctcttgctctgcgatctatgcatttctctgccacctcctcgaccaaaaacaccctctacttcatcaaaacttctttggtagaaaccacattcacctctgcctctgcctcgccctcttgaagaacttcgacctctaggagcccccaccactgttcctcctcctcctcgtcctgtcaatcgcaggacagcagcgctatttacagacatggaaaagtttctctgttcttcttctgtaaagggtaccagagccaatggtggaaggggttcctcttggaggataggcagaaattctttatccagaaggtctgaaggtatcttgttgtctttaaggaaaagtgctaacatttcttctctgccgtaacgataatctgctaatttatacttcggcaatgctggagaaagaggaggggatgtaatactcccaccactggacagagctcggagccattcaggcccaaagttcagtgtctgcgtttccgctgccattcttttccgtatttttacaatagatttttatatgtgaagaaacctgttcaaaaattctgctggttcacagcaggagatttgagcagactttgttcagatccttttaacgctctaagagacctgggttaacaccaacataggctgtagattcaacctaatgagactggtcccactataatctgccgtccgggacagggagtctcacaaccccagtcagtcccggacgctgggcgan

SEQ ID NO: 22195 - DNA, 4646 bp, Homo sapiens; identical to SEQ ID NO: 22055
  misc_feature 1: n = A,T,C or G

SEQ ID NO: 22196 - DNA, 720 bp, Homo sapiens; identical to SEQ ID NO: 22084

SEQ ID NO: 22197 - DNA, 835 bp, Homo sapiens
  misc_feature 1, 2, 3, 4, 834, 835: n = A,T,C or G
nnnnatgatgaaaacatctgagactcagggctaagcaccttgcccaaggccacacaacaagtaggtgatggagagtgttggcgtgtacggattctgtgggtgtaaagcaaagaacaaaatgaagtgtgattcaaggtgggaaatagccgcttcagctcccccaggctgcagcagctaccacacaaagaagcagtcctatggcaatgacaggacatctgtgtccaggatttggatttgacgaactggcagttcctgcagggatgacggtactccctagttgtgtctgaattggacgcaccagcacttgagcacacacaaatgcacgtgaacagacggaacatgttatgggcctgttagccaaggaatgacagaattaatccatgggcatttgcggccagtgttgtgttaaactaaagggaaaaagtgaactggaaaaagcaatgtttgttttatgaaaatctcagacccaatccttaggtgacagttctggaaatgaggggtgtctaaaacaaagggcatctgaaacttcggtttttcagcttcctttccttgtctcatgacctctttcctacccgctgcctctgttttctctaatatggaacagtgaaaatgggggccagcaaaagagattgctgatgtctgttgattttatcaaaggaaggttagattgagtaagacggcataaataagcacacataggacaatacctggcatatatcaggtgctcaatagcagtgaattctctccctgctgtcatgaattcttgaaggttggagaccatgcgctgttctgcgtgccaagttattttttcggcctgatagcaggtgagctacnn

SEQ ID NO: 22198 - DNA, 304 bp, Homo sapiens
catgataagtttccaaggaaccttagtgatggggactgtctcttttaaaattaaattgtgtaaataactcccagagccatgctggtaagaaacaaaacaaaacaaaaagaactagaaacttgaaacaaacgtaggatttctgctggtaaaaggatgcaaagcaggcctgcctgctgcacttccccagagctaatccttgagccaaaagagcttcctggtgaagcctcgcactctccgtaacagggtgtggggggaccgagacatgtgggctccagacttgaccatctttacctagttatgggat

SEQ ID NO: 22199 - DNA, 452 bp, Homo sapiens
  misc_feature 451, 452: n = A,T,C or G
acccaccagatgtgtctgtcacttccctacatccacctctattgtggttctcatgtttctgcctccctagagaccatttctctgtagagcagcgctttcgaatagaaatacaatgccagacacataagttgttttagattttctagtagtcactttagaaaagttaaaaagaaacaggtgaaattaatgttttatttcacctaaaatgttagcattatccaaaatatcacttcaacatcttatcaaaataaaattattaatgagattggttaccgttccgataaataggtgaactgagagcatacacagtagtattctgttctaatttctgcttcactgtgagtgtcttgacatagtcttaaaagagtattgctgtgaaatattatacatgtaactcataacctctacaattctgcagttgtaattggttgtcttacctaataatcagttnn

SEQ ID NO: 22200 - DNA, 304 bp, Homo sapiens; identical to SEQ ID NO: 22198

SEQ ID NO: 22201 - DNA, 344 bp, Homo sapiens
  misc_feature 1, 341, 342, 343, 344: n = A,T,C or G
natgccttcctctttgatgcacaggaaggccccttggctatggaaatagccaaagatgagatccagagccagtggcagcacctgaaggagacccttttcatcaacaactgcctgtgagaaaagctagaacgtcatcacagcagctttgatgaagaaaatggtaggagaggcccaagtcagcctgcttctggcaatatgtatttttctaaaggatgcacctctaacctctacaggcaaatcatagattccattgtccagctgtataatgaaaacagagttctcagagaagaataccggagactcccccgacttgcctgaatcaaatttccagaggctctgannnn

SEQ ID NO: 22202 - DNA, 4332 bp, Homo sapiens
acgcgtccgcggacgcgtccggcggggcctgggctgtcagccggcctaggaggaggaaggagcctgcggcgtgcagtgtgaggggcgggacccggctgccggcggtgggtctagctgggggaggtcgggccatgctggtgggccagggcgcggggccgctggggcccgcggtggtcaccgccgcggtggtgctgctgctgagcggcgtggggccggcgcacggctcggaggacatcgtggtgggctgcggtggcttcgtcaagtcggacgtggagatcaactactctctcatcgagataaagctgtacaccaagcatgggactttgaaataccagacagactgtgcccctaataatggttactttatgatccctttgtatgataagggggatttcattctgaagattgagcctcccctagggtggagttttgagccgacgaccgtggagctccatgtggatggagtcagtgacatctgcacaaagggtggggacatcaactttgtcttcactgggttctctgtgaatggcaaggtcctcagcaaagggcagcccctgggtcctgcgggagttcaggtgtctctgagaaacactgggaccgaagcaaagatccagtccacagttacacagcctggcggaaagtttgcattttttaaagttctgcctggagattatgaaatcctcgcaactcatccaacctgggcgttgaaagaggcaagcaccacagtgcgtgtaaccaactccaatgccaatgcggccagtcccctcatagttgctggctacaatgtgtctggctctgtccgaagtgatggggagcccatgaaaggcgtgaagtttcttctcttttcttctttagtaactaaagaggatgtcctgggctgcaatgtctcaccagtgcctgggttccagccccaagacgagagtctggtgtatttgtgctacacggtctccagagaagatggctcgttctctttctattccttgccaagtgggggctacactgtgattccgttctatcgaggggagaggattacctttgatgtggcgccttccagacttgacttcacagtggagcatgacagcttgaaaatcgagcccgtgttccacgtcatgggattctccgtcaccgggagggtcttgaacggacccgaaggagatggtgttccagaagcagtagtcaccctgaataaccaaatcaaagttaaaacaaaagctgatggctcattccgccttgagaacataaccacagggacatacaccatccatgctcagaaagagcacctctactttgaaacggtcaccatcaaaattgcaccgaacacacctcagctggctgacattattgcaacagggttcagtgtctgtggtcagatatcaatcattcgcttccccgacaccgtcaagcagatgaataaatacaaagttgtcctgtcatctcaagacaaggacaagtctttggtcaccgtggagacagatgctcatggatcattttgttttaaagcaaaaccagggacttacaaagtgcaggtgatggttcctgaggcagaaaccagagcagggctgacgttgaaaccccagacatttcctcttactgtgaccaacaggcccatgatggatgtggcctttgtacagttcttggcatcagtttctgggaaagtctcttgtttggacacctgtggtgacttgctggtgactctacagtccctgagccgccagggtgagaagcggagcctccagctctccggcaaggtcaacgccatgactttcacctttgacaacgtgctccctggaaaatacaaaataagcatcatgcatgaggattggtgctggaagaacaagagcctggaggtggaagtgctggaggatgacatgtctgcagttgagttcaggcagacgggctacatgctgagatgttccctgtctcacgccatcactctggaattttatcaggatggaaatgggcgtgagaatgtggggatttataacctctccaaaggagtcaaccgattctgcctgtccaagcctggtgtgtacaaagtgacccctcgctcctgccaccggtttgagcaagcgttctacacctatgacacgtcttcacctagtatcttgacattgacagccattcgccaccatgtccttggaactatcaccaccgacaaaatgatggatgtcactgtgactatcaagtcttccatcgacagtgaacccgccttggtcttaggccctctgaagtctgtgcaggagctgcggagggagcagcagctggctgagatcgaggcccgcaggcaggagagggagaaaaacggcaatgaggaaggcgaagaaagaatgaccaagcctcccgtgcaggagatggtagatgagttacaaggccccttctcgtatgatttctcttactgggcgcggtctggagagaaaatcactgttacaccgtcatctaaagagctgctcttttatcccccttcaatggaagccgttgtcagtggagaaagctgcccagggaagctgatcgagatccatgggaaggcaggcctgtttttagaaggccagatccaccccgagttggaaggagtcgagattgtcatcagtgaaaagggggcaagttcaccgctgatcacagtctttactgatgacaaaggtgcctacagtgttggccccctgcacagtgacctggagtacacggtgacctcacagaaggagggctatgttctgactgcggtggaaggaaccatcggagacttcaaggcctatgccctggcaggcgtaagctttgagataaaagctgaggatgaccagcccctcccgggagtcctcttatccctgagcggtggcctgtttcgttccaacctcttgacccaggacaacggcattctgacattctcaaacctgagccctggccagtattacttcaaacccatgatgaaggagttccggtttgagccatcctcacagatgatcgaggtgcaggaaggccagaacctgaagatcaccatcacggggtaccgaaccgcttacagttgctatggcacagtgtcttccttaaacggagagcccgaacaaggggttgccatggaagcggtgggccagaacgactgcagcatttacggagaagacaccgtgacagacgaagagggcaagttcagattacgtggattgctgccgggatgtgtgtaccacgttcagctcaaggcagaaggcaacgaccacattgagcgggcgctcccccaccatagggtgattgaggttgggaataatgacatcgatgatgtaaacatcatagttttccggcagattaatcaatttgatttaagtggaaatgtgatcacttcctctgaataccttcctacattatgggtcaagctttacaaaagcgaaaacctcgacaatccaatccagacagtttcccttggccagtccctgttcttccatttccccccactgctcagagacggcgagaactatgttgtgcttctggactccacactccccagatcccagtatgactacatcttgcctcaagtttctttcaccgcagtgggctaccataaacacatcaccttgatttttaatcccacgaggaagctgcctgaacaggacatcgcacaaggatcctacattgccctgccattgacgctgctggttctgctggccggttacaaccatgacaagctcattcctttgctgctgcagttgacaagccggctacagggagtccgcgcgctcggccaggcagcctctgacaatagcggcccagaagatgcaaagagacaagccaagaaacagaagacaaggcggacttgaggaggaaggggacagttgcagtctcacttgggacaggccacagccaggggtccggccactacccgcccgtgggataaaagccaaaagcatgcgtcagctaacttcagcctgtgctgctgggcccgcaccccatgtcccttgtcactgtggcatcctgcacccatcctcacccctccgtagagcccctcgtgcaatgcaatgaatggaccctcctgtcactctgctgaacagaatttattttctgagtcaaatataatttattattatttttgtcaaagaagtatttaagctgtgctgtggtgtgagaatgtcattcttgatcttcagccttcgtttgcaagaagagttccagttgacgtggtgtttggttccatggcggggtaccctagggattcatctgttttcttcacttccctttgcatctgagatcctgctggaaaccacagcaacctgtatccactattaggaggtaaaaatcaataaaatggcccattcatttgtgttgtagctcaaaaaaaaaaaaaaaaaaaag

SEQ ID NO: 22203 - DNA, 1632 bp, Homo sapiens
  misc_feature 1, 2, 3, 4, 5, 6, 1620, 1621, 1622, 1623, 1624, 1625, 1626,1627, 1628, 1629, 1630, 1631, 1632: n = A,T,C or G
nnnnnnaaaacaggcatcggccgggtccgcggaaaccgtgccccgcggattggaaggccagcaattcaaagggaacgcacaacggctccggcaaagacggtcggagaagccctgccctaccgaagcaccaaacacggagccgggagaaggagtttctgttcaatatgtaccttactcgagagcggcgcctagagattagccgcagcgtccacctcacggacagacaagtgaaaatctggtttcagaaccgcaggatgaaactgaagaaaatgaatcgagaaaaccggatccgggagctcacagccaactttaatttttcctgatgaatctccaggcgacgcggttttttcacttcccgagcgctggtcccctccctctgtcttcaggctctgcccaggaactcgcacctgtgctggagccctgttcctccctcccacactcgccatctcctgggccgttacatctgtgcagggctggtttgttctgactttttgtttctttgtgtttgcttggtgctggtttatttgttgttttctgggggaaaaagccatatcatgctaaaattctatagagatagatattgtcctaagtgtcaagtcctgactgggctgggtttgctgtcttggggtcccactgctcgaaatggcccctgtcttcggccgagctggtttcctgcccagcctggggcaaacctagccggaaggccgaggtcccattgttggcgctgaggtgtctggcctgaggtcaatggtgcaaaggagccgccaccgggcatgtctgcctggagtgctgtgctgtgtttaatcaggggatacaggcccctgggtttcttttttctttcttcctttcttccttggccaagagaagggcttacaggcatggacatgcaggttggcaaacgggcttgactttggctgatttaaaaagtgagaaagaaagtaaaaaaggttaatttttccttcctctgtaagatatcccagctttaaaaagaaaaaaaaagaattaccaagagaaggggacttctcttccagtttctgtaaggtcttacattgcctgactaaaatgtttcatttacctctaaatttccatatccttctggctgtagataaataatgtagttttgtttatgcatttggaattagtggatttttttgtcattaaaattgttaccactggtaacatgtgacaagcacaccacaattctccctatcttgtgaagttgtttttttaaatcgccttgaacaaaaagttttttttttgtttgtttttgctttctgaaattcacagaagcctaggaggactggggtaagcggaataaactagagaagggagacattgtttggatttcctttatactgtgaagttacatgcataaaagggtcaaacctgtagatgcagaaaaagaaaaaaactataaatacaaatctgtataaatgtctattattatgaagaattgccaatcttgttttaagcaaatgcattctatcgttattataaatgttagttctagctctatttacttctaatcttaaatcagaataaattaatattgtattgctgctgtgcgtggaaaaagacgatgtttatgttcttatagaataaaagctgtggaatgaagcnnnnnnnnnnnnn

SEQ ID NO: 22204 - DNA, 253 bp, Homo sapiens
  misc_feature 248, 249, 250, 251, 252, 253: n = A,T,C or G
acgcggggaagtgaggcagcggaggacgacctttttccggttccggcctggcgagagtttgtgcggcgacatgaaactgcttacccacaatctgctgagctcgcatgtgcggggggtggggttcccgtggctttccccctggcgccttgcagggccacccgaggttccggtatcttggccctgtggggaattcaaccccaacttcgtggcgcgtttgatacctaaagtggagtgggtcgggcgttccnnnnnn

SEQ ID NO: 22205 - DNA, 1632 bp, Homo sapiens; identical to SEQ ID NO: 22203
  misc_feature 1, 2, 3, 4, 5, 6, 1620, 1621, 1622, 1623, 1624, 1625, 1626,1627, 1628, 1629, 1630, 1631, 1632: n = A,T,C or G

SEQ ID NO: 22206 - DNA, 438 bp, Homo sapiens
  misc_feature 1: n = A,T,C or G
nagttctagagcggcccgagggtacgcgggggagagataagagctttcccggagacggcggaagcggagagcaacagcgcgccgagacggagttttgccatgttgtccaggctggtgtcgaaatcctgagctcaagtggtctgcctgcctcggcttcccaaagtgctgggattacaggtgagggcttgcttgtccagaaaaggaaaccttttacacagtttgccttcagagaacagtctatcggcatgttgtagagttttattactaagaaaataaatgttacttacatgattgtggtggtgccatgcagcaagaatcagagagatgcagagttagagccagaaggcctgacatggcactttatgtacctaaagctcgtaggggtgcagtactccttaagacaggtgatgaagaagaaagctgtggttcacctaactc

SEQ ID NO: 22207 - DNA, 426 bp, Homo sapiens; identical to SEQ ID NO: 22157

SEQ ID NO: 22208 - DNA, 953 bp, Homo sapiens
  misc_feature 944, 945, 946, 947, 948, 949, 950, 951, 952, 953: n = A,T,C or G
acaaaaaattctacatgctgtggccatagctggcgagccactaggaccttgcacttttcctattaccttaaggcctgatccaaataatccacagcagtttattcatgaacacactccagtaaaatttaaattattgaaagaattaaaagctagtgtggttaataatggaatacagagcccatttactttaggattgttagaatctgtattcagcactatgcgcctcccacccttggatataaagcatttagcttgcacttgtttctctgctagtgcatatttgacatggaatttaaattggcaagaaatgtgtgcagaccaggctagacagaatctcaccgctggacatgggaacattacagaggaaatgctattgggtagtgactcttattcagatctggtgcaacaattgacacttccagatgctgcttaccatcagtgcgcctggccgctaagcgtgcctgggccaccattcctgagaaaggggtctcaataaaatctttcccgcatatcaggccaaactcacaggagcccttgccacaatttattccacagttccaacagtcagtggggcatcagtttcctcatactgctcctgcgaaaatgctttactttgaccctagcttttgaaaatgcaaatgcagattgtaaatgtgcattagcacccgtgagatgtacaaacagcttgggaaattttctcaaagcctgtcaggatgtgggaactgaactccatcgttcaactgtgttagctcaagtaatagctaatttagtagtgaacaaatctgaaaagggccaagggttgagccctaaagtgggaaaatgttataattgtggaaaaattggacatttcaaaaaagaataccatcagacctctgggcagaagggatcttacaatgcaataccgcccccccctccgcgccccgctccccccaacacacacacannnnnnnnnn

SEQ ID NO: 22209 - DNA, 1398 bp, Homo sapiens
  misc_feature 1392, 1393, 1394, 1395, 1396, 1397, 1398: n = A,T,C or G
cgacccacgcgtccggcttcctgggcctcacggcggcggaggcgtggccacagcctgagaggcgggtttcctgtccagttgggggggacttccgacgtgtgccggaagtttcctcagtgacaccacgcgtccgggcgtgtcgagtggctcttcctggctgctgaggcgggttaaggtctgagggtcttgtggggccacggcgctgatcaccaggtgtttggcttggtcggttcttatttctcgcctggcaatggcgacgtacacctgcataacttgccgggtggcgttccgcgacgcggacatgcagcgggcccactataagacggactggcaccgctacaacctgcggcggaaggtggccagcatggccccagtgaccgccgagggcttccaggagcgagtgcgggcgcagcgggccgtcgcggaggaggagagcaagggctcggccacctactgcaccgtttgcagtaagaagtttgcctctttcaacgcctacgagaaccacctcaagtcccggcgtcacgttgagctggagaagaaggccgtgcaggcagtgaatcggaaagtggagatgatgaatgaaaagaacttggagaaaggactgggcgtggacagtgtggacaaggatgccatgaacgcggccatccagcaggccatcaaggcccagccgtccatgtctcccaagaaggcgcccccagcgcctgcaaaggaggccaggaatgtcgtggccgtgggtactggtggccgtgggacccacgaccgagacccgagtgagaaaccaccccggctccagtggtttgaacagcaggcgaagaagttggcaaagcagcaggaggaggacagcgaggaggaggaagaggacctggatggagacgattgggaagatattgattctgatgaagaattggaatgtgaggatactgaagcaatggacgatgtggtggagcaggatgcagaggaggaagaggctgaggaaggcccaccccttggtgccatccctatcacggactgcttattttgttcccatcattccagctcgctgatgaagaatgtggctcacatgaccaaagaccacagtttctttattcctgatatagaatatcttcagatttaagggcgattaatactggagagaaactgggcgtggacaacatgtccggggggccaacggaagcagggaacatatcgcacagaagggtaggccatgaatcaacagagcgagtaggacacagagaggcagccggcacatgcgcacacatagggcgcaacacaccagcggagggacacagccggagagccagaacggacgaaccagaggcccgatccggcctccacacaagactgagagcaaaggcaacacgaggcgtacaacaccactgtctcgtcccatcnnnnnnn

SEQ ID NO: 22210 - DNA, 2711 bp, Homo sapiens
  misc_feature 1, 2, 2711: n = A,T,C or G
nnacttccggggcggcggttgcatcagattctaggaagtgtctgtagccgcagctgcgggtccgggattcccagccatggcagattcctccgggcagcagggcaaaggccggcgtgtgcagccccagtggtcccctcctgctgggacccagccatgcagactccacctttacaacagcctcaccaggaacaaggaagtgttcatacctcaagatgggaaaaaggtgacgtggtattgctgtgggccaaccgtctatgacgcatctcacatggggcacgccaggtcctacatctcttttgatatcttgagaagagtgttgaaggattacttcaaatttgatgtcttttattgcatgaacattacggatattgatgacaagatcatcaagagggcccggcagaaccacctgttcgagcagtatcgggagaagaggcctgaagcggcacagctcttggaggatgttcaggccgccctgaagccattttcagtaaaattaaatgagaccacggatcccgataaaaagcagatgctcgaacggattcagcacgcagtgcagcttgccacagagccacttgagaaagctgtgcagtccagactcacgggagaggaagtcaacagctgtgtggaggtgttgctggaagaagccaaggatttgctctctgactggctggattctacacttggctgtgatgtcactgacaattccatcttctccaagctgcccaagttctgggagggggacttccacagagacatggaagctctgaatgttctccctccagatgtcttaacccgggttagtgagtatgtgccagaaattgtgaactttgtccagaagattgtggacaacggttacggctatgtctccaatgggtctgtctactttgatacagcgaagtttgcttctagcgagaagcactcctatgggaagctggtgcctgaggccgttggagatcagaaagcccttcaagaaggggaaggtgacctgagcatctctgcagaccgcctgagtgagaagcgctctcccaacgactttgccttatggaaggcctctaagcccggagaaccgtcctggccgtgcccttggggaaagggtcgtccgggctggcatatcgagtgctcggccatggcaggcaccctcctaggggcttcgatggacattcacggaggtgggttcgacctccggttcccccaccatgacaatgagctggcacagtcggaggcctactttgaaaacgactgctgggtcaggtacttcctgcacacaggccacctgaccattgcaggctgcaaaatgtcaaagtcactaaaaaacttcatcaccattaaagatgccttgaaaaagcactcagcacggcagttgcggctggccttcctcatgcactcgtggaaggacaccctggactactccagcaacaccatggagtcagcgcttcaatatgagaagttcttgaatgagtttttcttaaatgtgaaagatatccttcgcgctcctgttgacatcactggtcagtttgagaagtggggagaagaagaagcagaactgaataagaacttttatgacaagaagacagcaattcacaaagccctctgtgacaatgttgacacccgcaccgtcatggaagagatgcgggccttggtcagtcagtgcaacctctatatggcagcccggaaagccgtgaggaagaggcccaaccaggctctgctggagaacatcgccctgtacctcacccatatgctgaagatctttggggccgtagaagaggacagctccctgggattcccggtcggagggcctggaaccagcctcagtctcgaggccacagtcatgccctaccttcaggtgttatcagaattccgagaaggagtgcggaagattgcccgagagcaaaaagtccctgagattctgcagctcagcgatgccctgcgggacaacatcctgcccgagcttggggtgcggtttgaagaccacgaaggactgcccacagtggtgaaactggtagacagaaacaccttattaaaagagagagaagaaaagagacgggttgaagaggagaagaggaagaagaaagaggaggcggcccggaggaaacaggaacaagaagcagcaaagctggccaagatgaagattccccccagtgagatgttcttgtcagaaaccgacaaatactccaagtttgatgaaaatggtctgcccacacatgacatggagggcaaagagctcagcaaagggcaagccaagaagctgaagaagctcttcgaggctcaggagaagctctacaaggaatatctgcagatggcccagaatggaagcttccagtgagggggcacaggactgactttttaaaccattgtggactagtggctgctgtctgcctcagtgacaatgtcccagcgctcctatcatgtttacagtcacccttgggtcctaaattaagagttgtgttcatgtaggttcgtgtcgtcgttggctctgagacattgataataaatttttctcaacagtgagacccaaaaaaaaaaaaaaaaaaaattttggggcggccgggcctggagaatttttagaacattttgtttggggggggcgccgtgttttttgaaatgggcatagggtccagaaactcggtcataaaggctgggtttccacataaaaaaccgggggcccggggttggaacaccaggggttggggctcggggttcagggccggcgn

SEQ ID NO: 22211 - DNA, 2986 bp, Homo sapiens
  misc_feature 2986: n = A,T,C or G
acgcggccctcctggccccggtgtgtgggtctgtgacagggtccaacagggcctggtccgtgtccggtcccccaaatctgtcgtccctgcccccaggcattggcatcaacaaaagtcagaattcccgggaacttgaacagaggctgctaaattcccagtaattgctcctttggccttctagggactgacttcaaagaaggaaggaaagaatcaggcagtgcttcctcattctcttttaaaacccgcttcccgctgagtctgcacccaggagaccagagagcaccttgcccttccatggaaactcaggctgatctcgtatctcaggaacctcaggccctgcttgacagtgctcttccttcaaaagttcctgccttttccgacaaggacagcctgggggatgagatgttggcggctgcgctcctaaaggccaagtcccaggagctggtaacctttgaggatgtagctgtgtacttcatccggaaggagtggaagcgtttggaacctgctcagagggacctctatagagatgtgatgctggagaattacgggaatgtgttctcactggatcgtgagaccaggactgaaaatgatcaagaaatttctgaagacacaagatcacatggggtcctactgggaagatttcaaaaggatatttctcagggtctcaagtttaaagaagcctatgaacgagaagtcagtctgaaaaggccgctggggaactcccctggagaaagactgaacaggaaaatgccagattttggtcaagtgacagttgaggagaagctaacccccaggggagagagaagcgagaaatataatgattttgggaacagcttcactgtgaattccaaccttatctcacatcagagactccccgtgggagacagaccccataagtgtgatgaatgtagcaagagctttaatcgaacttcagaccttattcaacatcagagaatccacactggggaaaagccctatgaatgtaatgagtgtgggaaggccttcagccagagctcacaccttattcagcatcagagaatccacactggggaaaaaccttatgaatgtagtgattgtgggaaaaccttcagctgtagctctgccctcattctgcatcggaggatccacacgggggagaaaccctatgaatgtaatgagtgtgggaagaccttcagctggagctccaccctcacccaccatcagagaatccacactggtgagaaaccctacgcctgcaatgaatgtgggaaggccttcagcaggagctcaacccttattcaccatcagagaatccacactgaagctcttcccacattcgttacactgataaggcttctccccagtgtggatccgatagtgacgaatgaggctgcctttcccgctgaaagccttgccacaatctttgcactgatatggcgcctcttctgtgtgcattctctgatgtttaagaaggtctgagctctgcccaaaagcttttccacacttacagtcatagggccggtccaccaagtgtgttctgtaatggagggtgaggtttgagctgtggctgaaagctttcccacacttggtgcacacgtaaggtttctccccagtgtgtgttctcctgtgtttggtgagatttgagctattactaaaggctttgccacattcagcacatatataacgtctctctcctggggtaggtttagtaggaactgattctctacctttcttggagcctgcctcttgaagagggggttttgttcctttttcattttcaaggtttacgcactgcctctctaagctggcctcaggtttattggcgataatcacagaaattatatcccctttgagcccctctgcttcagaacctttctgctcatctgctgattcctcgtgctgggtactcaatctgcaatctcggacctttcttggatcttgagcgaactcctgctcctcaccagactcttggatgtacaggggcccccaagactcgtatttgtgactggtctccaagggctgtggctgcatgctgctcggggattcctttgcagttcctgaggaggatatcttctcccacaccggtttctgttcgtttggaggagttgagacctggtgtcctggctcatccagttcccgctccagatcttcgaggagagtgacagcctcttcagcgctctccgggcaatgctcctgcacccaggcctggagctcctggggcaggatggtcaggaactgctccagcaccagtagctccaggatctgctccttggtgtggatctcgggcctcagccactcacagcagagcacccggagttggctcagggcctctcggggtccaggggtatcatggtacccaaactgcctgaagcgctggcggaacatctccaggctaggaaggtacttgcctttctcttctttctcctcgacttttaccatcagaggccccacctgctcctgtggaggcctagggcccagaactggggccatgcctagtaccttggtcatcatgtaaactccagaaacagcctcaccaaagatgggactctgtggggcaggaatattcgttcctttgggtttccagttctttagggccacaagttaaacctgaaaatccctagggggcccggcgccgtggctcacacctgtaattccagcactttgggaggcccgaggcgggcagatcacgaggtcaggagatcgagaccattctggctaacacggtgaaaccccgtctccatttctccatagcagccttccaacacttgaaaacaattatcttgcctcttaattcttttcctctccacagctcaactgttccttagatttcgtgggtttccaagtacctcacccatcaaatcaacgttcttttttttttgtgagaccaagtgttgctctgtcgcccaggctggagtgcagtggcgtgatctcggttcagtgcaacctccaccatgaatcagagccgctcccccacgcgtccgcggacgcgtggtcgactccctatagn

SEQ ID NO: 22212 - DNA, 2090 bp, Homo sapiens
  misc_feature 1, 2, 3: n = A,T,C or G
nnnattctcgccgcagtgggtgcgtgtgtttgtgtggcgcttgcgcgccgcgttgttgctacgtctggccgggttgggagcggctgtttgtattgcggtagtcctactgttctcacccgtcctgcaccatgggcttccgtcttttaacactgggggttgttgtagatcctggccgggacccgtgtcccgaatgggtagcaccatgggattttccggccgcccgaggcgtgtggagctccgtcatgggtgctgtgttgccccctaagggaggggattaggctttattccccgcgacttgaccgctttcgagacgcgttaatttctataaacagggcatccgctccatattttaagatgttgctgttcccattttaaggggagtccctttctgttcgacgtgtgtttgttttttcttgagatggagtctcgctctgttgccaggctggagtgcagtggcgtgatcccggctcactgaaacctccatctcctgagttcaagtgattctcgtgcctcagcctcctgtgtagctgggattacaggctcctgccaccacacccagctaatttttatatttttagtagagacggggtttcaccatgttggccaggatggtctcgaactcctgacctcgtgatctgcctgccttggcctcccaaagtgctgagattacaggcgtaagtcactgcgcctggccagggagtccttttctaactgagcctatttttctcttaggtacaaatggaataagtgacaactctaatttgtagaaacattttaggccatgtataagttacactgattttagcactaagctatatttttatcacagatgggtcaccttaaaagaaaactaaggagatggaatgaatctgaaatctttctaaatacaaggtagttaacaccatactcaagcagaaaattataatcctgtatttagagatactttttttttgagacagagtctcactctatcactcaggctggagcgcagcgagaccgtctcaaaaaaacaacaaaacaaaaacaatcatagacagcactgtatttcagtaggaaatatgcaaggaggaggagaaacaactgtcttgctgagggctagacgtgtgctctgaagaatggtgttcctttgtgtctgttgggtctgaacccacaagttcttaccagtcggagaccctccacggtgaacgggaagatctatgtattatgcccgcatgggcacctggccgacttatcttccccttggatgcgcacttaatcggtccccgttaacgagatggtgtgccttttttcaagttacccaaggtgtagtgtccaagtttttagaaaaatactgacttgtacgtaattaaagtgtccatgaaagttcacctgggaaagacgaatgctaaagaggatttaattattttcaaataccagatttgacagaggattgcttgttaaggcactacacatcttctttggttaaatgattaactatttaaatcacttgaaaaaaagaggtaatacaaaatatacaagttcgcattcttcttttcaaacacacacgattttcgtttttcaatttccagtactccagtgtctatatatctctgggacctttttaactcatcagaaagctgtatgggtagccatgatatttagatctaaaaatagagagcatccaactgaagaataatacaacaagtccaataccagccacacacattatctttcgctttccaatatccatgtcagaggtagcagcttcacataaaagcaccattcctaaggtaactccaccattaaacagaagaacaatgtgtgtttcagctacaaactgggcttgactgcttccatggatataattcacatgtcccgtgtggggattcttatgggcatatggtggtcctcttatatggttccacatttgaccagatgtcatagcaagcacaaaacacaaagctgcaaaagcccatccagttttattaaagagaaattccatattacttcttcgaagatacacagtccaccataacagccaaagcatcccaacataaggggaccagcataatttgggggtctaatcactttaatattgacatcatcggacg

SEQ ID NO: 22213 - DNA, 2946 bp, Homo sapiens
  misc_feature 1, 2945, 2946: n = A,T,C or G
natagggagtcgacccacgcgtccgggacaggaagtgtcaggactttacgacccgcgcctccagctgaggtttctagacgtgacccagggcagactggtagcaaagcccccacgcccagccaggagcaccgccgaggactccagcacaccgagggacatgctgggcctgcgccccccactgctcgccctggtggggctgctctccctcgggtgcgtcctctctcaggagtgcacgaagttcaaggtcagcagctgccgggaatgcatcgagtcggggcccggctgcacctggtgccagaagctgaacttcacagggccgggggatcctgactccattcgctgcgacacccggccacagctgctcatgaggggctgtgcggctgacgacatcatggaccccacaagcctcgctgaaacccaggaagaccacaatgggggccagaagcagctgtccccacaaaaagtgacgctttacctgcgaccaggccaggcagcagcgttcaacgtgaccttccggcgggccaagggctaccccatcgacctgtactatctgatggacctctcctactccatgcttgatgacctcaggaatgtcaagaagctaggtggcgacctgctccgggccctcaacgagatcaccgagtccggccgcattggcttcgggtccttcgtggacaagaccgtgctgccgttcgtgaacacgcaccctgataagctgcgaaacccatgccccaacaaggagaaagagtgccagcccccgtttgccttcaggcacgtgctgaagctgaccaacaactccaaccagtttcagaccgaggtcgggaagcagctgatttccggaaacctggatgcacccgagggtgggctggacgccatgatgcaggtcgccgcctgcccggaggaaatcggctggcgcaacgtcacgcggctgctggtgtttgccactgatgacggcttccatttcgcgggcgacgggaagctgggcgccatcctgacccccaacgacggccgctgtcacctggaggacaacttgtacaagaggagcaacgaattcgactacccatcggtgggccagctggcgcacaagctggctgaaaacaacatccagcccatcttcgcggtgaccagtaggatggtgaagacctacgagaaactcaccgagatcatccccaagtcagccgtgggggagctgtctgaggactccagcaatgtggtccatctcattaagaatgcttacaataaactctcctccagggtcttcctggatcacaacgccctccccgacaccctgaaagtcacctacgactccttctgcagcaatggagtgacgcacaggaaccagcccagaggtgactgtgatggcgtgcagatcaatgtcccgatcaccttccaggtgaaggtcacggccacagagtgcatccaggagcagtcgtttgtcatccgggcgctgggcttcacggacatagtgaccgtgcaggtccttccccagtgtgagtgccggtgccgggaccagagcagagaccgcagcctctgccatggcaagggcttcttggagtgcggcatctgcaggtgtgacactggctacattgggaaaaactgtgagtgccagacacagggccggagcagccaggagctggaaggaagctgccggaaggacaacaactccatcatctgctcagggctgggggactgtgtctgcgggcagtgcctgtgccacaccagcgacgtccccggcaagctgatatacgggcagtactgcgagtgtgacaccatcaactgtgagcgctacaacggccaggtctgcggcggcccggggagggggctctgcttctgcgggaagtgccgctgccacccgggctttgagggctcagcgtgccagtgcgagaggaccactgagggctgcctgaacccgcggcgtgttgagtgtagtggtcgtggccggtgccgctgcaacgtatgcgagtgccattcaggctaccagctgcctctgtgccaggagtgccccggctgcccctcaccctgtggcaagtacatctcctgcgccgagtgcctgaagttcgaaaagggcccctttgggaagaactgcagcgcggcgtgtccgggcctgcagctgtcgaacaaccccgtgaagggcaggacctgcaaggagagggactcagagggctgctgggtggcctacacgctggagcagcaggacgggatggaccgctacctcatctatgtggatgagagccgagagtgtgtggcaggccccaacatcgccgccatcgtcgggggcaccgtggcaggcatcgtgctgatcggcattctcctgctggtcatctggaaggctctgatccacctgagcgacctccgggagtacaggcgctttgagaaggagaagctcaagtcccagtggaacaatgataatccccttttcaagagcgccaccacgacggtcatgaaccccaagtttgctgagagttaggagcacttggtgaagacaaggccgtcaggacccaccatgtctgccccatcacgcggccgagacatggcttgccacagctcttgaggatgtcaccaattaaccagaaatccagttattttccgccctcaaaatgacagccatggccggccgggtgcttctgggggctcgtcggggggacagctccactctgactggcacagtctttgcatggagacttgaggagggagggcttgaggttggtgaggttaggtgcgtgtttcctgtgcaagtcaggacatcagtctgattaaaggtggtgccaatttatttacatttaaacttgtcagggtataaaatgacatcccattaattatattgttaatcaatcacgtgtatagaaaaaaaataaaacttcaatacaggctgtccatggaaacagcgaacgcgtcttccagcacatggcggccgttatagtggaaccgagccgggtaccaagtcnn

SEQ ID NO: 22214 - DNA, 1204 bp, Homo sapiens
gggcgaattggagctccccgcggtggcggccgaggtacatgaaacccccagcacacgaagaggccaaggcaccttccagaggctttgtggtgcgggacgcaccctggaccgccagcagcagtgagaaggctcctgacatgagcagctctgaggaatttcccagctttggggctcaggtggctcccaagaccctcccttggggccccaaacgataatgatcaaaaagaacagaaccctctccagcctgctgacccaaacccaaccacacaatggtttgtctcaatctgacccagcggctggaccctccgtaaattgttgacgctcttcccccttcccgaggtcccgcagggagcctagcgcctggctgtgtgtgcggccgctcctccaggcctggccgtgcccgctcaggacctgctccactgtttaacactaaaccaaggtcatgagcattcgtgctaagataacagactccagctcctggtccacccggcatgtcagtcagcactctggccttcatcacgagagctccgcagccgtggctaggattccacttcctgtgtcatgacctcaggaagtggaatacctagctgacgtggtggacagtgaggcgctgcaggtatacatgaaacccccagcacacgaagaggccaaggcaccttccagaggctttgctggtgcgggacgcaccctggaccgccagcagcagtgagaaggctcactgacatgagcagctctgaggaatttcccagctttggggctcaggtggctcccaagaccctcccttggggcccccaaacgataatgatcaaaaagaacagaaccctctccagcctgctgacccgaacccaaccacacaatggtttgtctcaatctgacccagcggctggaccctccgtaaattgttgacgctcttcccccttcccgaggtcccgcagggagcctagcgcctggctgtgtgtgcggccgctcctccaggcctggccgtgcccgctcaggacctgctccactgtttaacactaaaccaaggtcatgagcattcgtgctaagataacagactccagctcctggtccacccggcatgtcagtcagcactctggccttcatcacgagagctccgcagccgtggctaggattccacttcctgtgtcatgacctcaggaaataaacgtccttgactttagaaaaaaaaaaaaaaaaggactac

SEQ ID NO: 22215 - DNA, 1185 bp, Homo sapiens; identical to SEQ ID NO: 21532
  misc_feature 1, 2, 3, 4, 5, 6, 7, 8, 9, 10, 11, 12, 13, 14, 15, 16, 17,18, 19, 20, 21, 22: n = A,T,C or G

SEQ ID NO: 22216 - DNA, 1086 bp, Homo sapiens; identical to SEQ ID NO: 22050
  misc_feature 1, 2, 3, 4, 5, 6, 7, 8, 9, 10, 11, 12, 13, 14, 15, 16, 17,1082, 1083, 1084, 1085, 1086: n = A,T,C or G

SEQ ID NO: 22217 - DNA, 531 bp, Homo sapiens
cctctaagtctccgccacgcaggaaacaaaagcgatagaaggtccgttcctgtcctccggtgctttgatgagttcaggctgaagccgatgggggaggaggagaagctgcaagttaacagctgaagaataagttcatgaaaaaattgccacgtgatgcagaagcttccaacgtgcttgttggggaggttgactttttggatactcctttcattgcctttgttaggctacagcaggctgtcatgctgggtgccctgactgaagttcctgtgcccacaaggttcttgttcattctcttaggtcctaaggggaaagccaagtcctaccacgagattggcagagccattgccaccctgatgtctgatgaggtgttccatgacattgcttataaagcaaaagacaggcacgacctgattgctggtattgatgagttcctagatgaagtcatcgtccttccacctggggaatgggatccagcaattaggatagagcctcctaagagtcttccatcctctgacaaaagaaagaatatgt

SEQ ID NO: 22218 - DNA, 505 bp, Homo sapiens
  misc_feature 504, 505: n = A,T,C or G
actgatgacacaaacatggcagacactttcaccgagattatgaccatgatgtcgccttcacagttcttgagttcatctcctttgagaatgacaaataatgaagacagtctgagtcccaccagcagcactctgtcaaacctggaactggatgcagccgaaaaggatcgcaagcttcaggagaaagagaagcgcatcgaagagctgaagaggaaactggaacaagagcagaagctcgtggaagtgctgaaaatgcaacttgaggttgaaaaacgagggcagcagccatcggcccctgtaagcccagcccagtgccccaggtcattctgtcaagtcagatcagaaacaccgcagccttggctccttcatcaaagatgaggcctaactccctgactgttccagcttcaggcagcccatcccagtagccagccacgctgtaggccagcccgtctctacaggtggccagacccttgttgccaaaaaggctgtagttatcaagcaagaggnn

SEQ ID NO: 22219 - DNA, 2082 bp, Homo sapiens
catagtaagtgaggagtacatttcttggtcttctcccttgaccactccaagtctctgatctaccagagatggcagtttatttcctctggaagaagccagtaatgaacacctgtctgttggctttgttcacagtcatggcagggggtctgtgtactgaggatgtcttcatgttaagctcctcttcactatctgtgcaggattcacctcgtgccgaattcggcacgaggaactagtctcgagtttttttttttttttttttaattcttcagctaaaacagcggaagaggtgatttattatatggttgttacactcggccacaaataaacacagaaatagtccagaatgtcacaggtccccagggcagaggacccaacatgggcattttgtttatgaagcaaggtgggtcctcagaggtgatcggcgatcagagggcgatgaagttctagatccattgagacaagctctagacagtagcatgcagtcccacaacttgtaccagcatccccagcgtctggcattccatgtttctgctcctgtggcctccacggtgcaacaagctagcggtttacttggacctctgcctcatctttctcttttgcgcttcagcctgcgcattcgcttcttcctccacttggctctcggccttagcgccatttttttggaaacctctgcgccatgagagccaaggtgagcggttcctggtagtaagcttgggaggtaggagttggcgagtagtagcgaggagacgaaggcaagtccgccatacctcctgaactactgggtttcaagggtgcccaagagctggtgggagagagccaagtggaggaagaagcgaatgcgcaggctgaagcgcaaaagaagaaagatgaggcagaggtccaagtaaaccgctagcttgttgcaccgtggaggccacaggagcagaaacatggaatgccagacgctggggatgctggtacaagttgtgggactgcatgctactgtctagagcttgtctcaatggatctagaacttcatcgccctctgatcgccgatcacctctgagacccaccttgctcataaacaaaatgcccatgttgggtcctctgccctggacctgtgacattctggactatttctgtgtttatttgtggccgagtgtaacaaccatataataaatcacctcttccgctgttttagctgaagaggtgatttattatatggttgttacactcggccacaaataaacacagaaatagtccagaatgtcacaggtccagggcagaggaccaacatgggcattttgtttatgagcaaggtgggtctcagaggtgatcggcgatcagagggcgatgaagttctagatccattgagacaagctctagacagtagcatgcagtcccacaacttgtaccagcatcccccagcgtctgggcattccatgtttctgctcctgtggcctccacggtgcaacaagctagcggtttacttggacctctgcctcatctttcttcttttgcgcttcagcctgcgcattcgcttcttcctccacttagcaaccgatcacaagcagcagataattaaaaaaaaaaaaaaaaaaaagggatgaagcttattagtaggcttagcaaggatatgaaatgcactctttagaaccggacagattcttaaccaagaagtatgaaagattggtcgtaacaactacatcagtaacttggacaccctcccaacataagatcagaattccacccttttctaagcccaccctctctacccatagcacttaaccgctagctctctcacaaactaccttctctctcccaccagctcttgggcacccttgaaacccagtagttcaggaggtatggcggacttgccttcgtctcctcgctactactcgccaactcctacctcccaagcttactaccaggaaccgctcaccttggctctcatggcgcagaggtttctacagggaaagagagaaaggctacagttagtttgctgtgatgatgctaagtgccgaggtcagatgtctatggattgtacacggaatcccaacgcaggaaccaaaaaacactcacccaaaaaaatggcgcggacgc

SEQ ID NO: 22220 - DNA, 884 bp, Homo sapiens
cggggacacatgcgcagggttgggcgggtcttcttccttctcgcctaacgccgccaacatggtgttcaggcgcttcgtggaggttggccgggtggcctatgtctcctttggacctcatgccggaaaattggtcgcgattgtagatgttattgatcagaacagggctttggtcgatggaccttgcactcaagtgaggagacaggccatgcctttcaagtgcatgcagctcactgatttcatcctcaagtttccgcacagtgcccaccagaagtatgtccgacaagcctggcagaaggcagacatcaatacaaaatgggcagccacacgatgggccaagaagattgaagccagagaaaggaaagccaagatgacagattttgatcgttttaaagttatgaaggcaaagaaaatgaggaacagaataatcaagaatgaagttaagaagcttcaaaaggcagctctcctgaaagcttctcccaaaaaaagcacctggtactaagggtactgctgctgctgctgctgctgctgctgctgctgctgctgctgctgctgctgctgctaaagttccagcaaaaaagatcaccgccgcgagtaaaaaggctccagcccagaaggttcctgcccagaaagccacaggccagaaagcagcgcctgctccaaaagctcagaagggtcaaaaagctccagcccagaaagcacctgctccaaaggcatctggcaagaaagcataagtggcaatcataaaaagtaataaaggttctttttgacctgttgaaaaatgtatttaagcctttggatttaaagcctgttgaggctagagttaggaggcagattgatagtaggattataataaacattaaataatcaaaaaaaaaaaaaaaaaa

SEQ ID NO: 22221 - DNA, 2548 bp, Homo sapiens
  misc_feature 1, 2547, 2548: n = A,T,C or G
nataggagtcgacccacgcgtccgccgcaaggaggagccggcggtagcttggttcctgagcggatgctggggctgtaaggcgcgcgcggtcagctgttggcggtgcagggaggaggacgccggggctcgccttccctcctctgccgccgctgccgccatgattccggtgtcgctggtggtggtggtggtgggtggctggactgtcgtctacctgaccgacttggtgctgaagtcatctgtctattttaaacattcttatgaagactggctggaaaacaacggactgagcatctcccctttccacataagatggcaaactgctgttttcaatcgtgccttttacagttggggacggcggaaagcaaggatgctttaccaatggttcaattttggaatggtgtttggcgtaattgccatgtttagctcattttttctccttggaaaaacgctgatgcagactttggcacaaatgatggctgactctccctcttcttattcttcctcctcttcttcctcttcctcctcttcttcctcttcctcttcttcatcttcttcctcttcctcgcttcacaatgaacaggtgttacaagttgtggttcctggtataaatttacccgtcaatcaactgacctatttcttcacggcagttctcattagtggtgttgtacatgaaattggacatgggatagcagctattagggaacaagttcgatttaatggctttgggatttttctcttcattatttatcctggagcatttgttgatctgttcaccactcatttgcaacttatatcgccagtccagcagctaaggatattttgtgcaggtatctggcataattttgtccttgcactcttgggtattttagctcttgttctcctcccagtaattctcttgccattttactacactggagttggggtgctcatcactgaagttgctgaggactctcctgccattggacccagaggcctttttgtgggagaccttgtcacccatctacaggattgtcctgttactaatgtgcaagattggaatgaatgtttagataccatcgcctatgagccccaaattggttactgtataagtgcatcaactttacagcagttaagtttcccagttagagcatacaaacgactagatggttcaactgaatgctgtaacaatcacagcctcacagatgtgtgcttttcctacagaaataattttaataagcgtttgcatacatgtcttcctgcccggaaagcagttgaagcaactcaagtttgcagaaccaataaagactgtaaaaaaagctcaagttcaagtttctgtataataccttctttggaaactcacactcgcttaataaaagtaaaacacccacctcagattgatatgttatacgtaggacatcctctgcatcttcactacacagtgagcatcaccagttttatcccacgttttaactttctaagcatagatctgccagtggttgtggagacatttgtcaagtacctgatttccctctcaggagctctggctattgttaatgcagtaccctgctttgctttggatggacaatggattctaaactctttcttggatgccacccttacctcagtgattggagacaatgatgtcaaagatctaatagggtttttcatcttgctgggtggcagtgtacttttggctgccaatgtgaccctgggactctggatggttacagcacggtaatgtttgcactcatctgacagaatccctgagttacagtatacagctatgtggtaatattcattgccattgaaattcttacttggtatgaaatataaagtgtttccttaaaattacatcttagccaacaaccctgagctcctcccatatccagagtacccaaactctgtggtagaagataagcagaagaaatgaaaggcatagtccctgactatattctaatttaggactgaatgtacccagatgcttgtggaataatatctaagcaagtgcaaattcatgtaataccgttttgtctgattacatattgtgttgaaatagtataaaggagaacagaactgggtggaattaattgggaaaaacttcttacaaaagcatcattaatcaaaatttgaaggagaccagactttggccaagtggaaggatgaccattgtcttggcctgtatctcttgtcctttgtcttgtttgaaaagtattttaaaacttaatggtgtattattttgtgctctgaaagctgaggtctgattacaattagtaaaattctatagaagaatctgctgacgtgaaagggaaaaatctttgtcaaatgataccaaataaatggaccaaacaggaggtagggctatgcatttcggaaacagttttgccccacacagctgtcccaaaggggcccgcccctgttaaaggacgctgctttgcctccgggccggggaatcacacactggtcgtgaccaggggccggggcattcaacaccggccttccaaaacgcgagaaggcacaccccaaggggggacccagaaatggcggaaggaggcgggccaaacacatccnn

SEQ ID NO: 22222 - DNA, 2655 bp, Homo sapiens
  misc_feature 1, 2, 2650, 2651, 2652, 2653, 2654, 2655: n = A,T,C or G
nnacgcgtccgcgcgacggggcggtgcgcggagcctccagccgagcctagccctgcccggccccggaggacttgcaacactccgaggccaggaacgctccgtctggaacggcgcaggtcccagcagctggggttccccctcagcccgtgagcagccatgtccaaccccagcgccccaccaccatatgaagaccgcaaccccctgtacccaggccctccgccccctgggggctatgggcagccatctgtcctgccaggagggtatcctgcctaccctggctacccgcagcctggctacggtcaccctgctggctacccacagcccatgccccccacccacccgatgcccatgaactacggcccaggccatggctatgatggggaggagagagcggtgagtgatagcttcgggcctggagagtgggatgaccggaaagtgcgacacacttttatccgaaaggtttactccatcatctccgtgcagctgctcatcactgtggccatcattgctatcttcacctttgtggaacctgtcagcgcctttgtgaggagaaatgtggctgtctactacgtgtcctatgctgtcttcgttgtcacctacctgatccttgcctgctgccagggacccagacgccgtttcccatggaacatcattctgctgaccctttttacttttgccatgggcttcatgacgggcaccatttccagtatgtaccaaaccaaagccgtcatcattgcaatgatcatcactgcggtggtatccatttcagtcaccatcttctgctttcagaccaaggtggacttcacctcgtgcacaggcctcttctgtgtcctgggaattgtgctcctggtgactgggattgtcactagcattgtgctctacttccaatacgtttactggctccacatgctctatgctgctctgggggccatttgtttcaccctgttcctggcttacgacacacagctggtcctggggaaccggaagcacaccatcagccccgaggactacatcactggcgccctgcagatttacacagacatcatctacatcttcacctttgtgctgcagctgatgggggatcgcaattaaggagcaagcccccattttcacccgatcctgggctctcccttccaagctagagggctgggccctatgactgtggtctgggctttaggcccctttccttccccttgagtaacatgcccagtttcctttctgtcctggagacaggtggcctctctggctatggatgtgtgggtacttggtggggacggaggagctagggactaactgttgctcttggtgggcttggcagggactaggctgaagatgtgtcttctccccgccacctactgtatgacaccacattcttcctaacagctggggttgtgaggaatatgaaaagagcctattcgatagctagaagggaatatgaaaggtagaagtgacttcaaggtcacgaggttcccctcccacctctgtcacaggcttcttgactacgtagttggagctatttcttcccccagcaaagccagagagctttgtccccggcctcctggacacataggccattatcctgtattcctttggcttggcatcttttagctcaggaaggtagaagagatctgtgcccatgggtctccttgcttcaatcccttcttgtttcagtgacatatgtattgtttatctgggttagggatgggggacagataatagaacgagcaaagtaacctatacaggccagcatggaacagcatctcccctgggcttgctcctggcttgtgacgctataagacagagcaggccacatgtggccatctgctccccattcttgaaagctgctggggcctccttgcaggcttctggatctctggtcagagtgaactcttgcttcctgtattcaggcagctcagagcagaaagtaaggggcagagtcatacgtgtggccaggaagtagccagggtgaagagagactcggtgcgggcagggagaatgcctgggggtccctcacctggctagggagataccgaagcctactgtggtactgaagacttctgggttctttccttctgctaacccagggagggtcctaagaggaaggtgacttctctctgtttgtcttaagttgcactgggggatttctgacttgaggcccatctctccagccagccactgccttctttgtaatattaagtgccttgagctggaatggggaagggggacaagggtcagtctgtcgggtgggggcagaaatcaaatcagcccaaggatatagttaggattaattacttaatagagaaatcctaactatatcacacaaagggatacaactataaatgtaataaaatttatgtctagaagttaaaaaaaaaaaataactggccgtcgttttacaacgtcgtgactgggaaaaacctgggcgtttaccaaattaatcgccttgcagcacatcccccattcggcagctggagtaatagcgaagagggcccggacggacggccttcccaaaggtggcgcacccgtaaggggcgagggcaagggaacgcgaaatctggggaaaagccggtaacttggggagacacccacctgtaccaagacgacacgggaaaccccttcacagcacacaggccgtgggccgcgagagcannnnnn

SEQ ID NO: 22223 - DNA, 459 bp, Homo sapiens; identical to SEQ ID NO: 21058
  misc_feature 1, 2: n = A,T,C or G

SEQ ID NO: 22224 - DNA, 1556 bp, Homo sapiens
  misc_feature 1395, 1396, 1397, 1410, 1417, 1554, 1555, 1556: n = A,T,C or G
acttttttctttttttttctgtttgtggtccggccttcttttgtgtgtgcgtgtgatgcatctttagatttttttcccccaccaggtggtttttgacactctctgagaggaccggagtggaagatgggtgggttaggggaagggagaagcattaggaggggattaaaatcgatcatcgtggctcccatccctttcccgggaacaggaacacactaccagccagagagaggagaatgacagtttgtcaagacatatttccttttgctttccagagaaatttcattttaatttctaagtaatgatttctgctgttatgaaagcaaagagaaaggatggaggcaaaataaaaaaaaatcacgtttcaagaaatgttaagctcttcttggaacaagccccaccttgctttccttgtgtagggcaaacccgctgtcccccgcgcgcctgggtggtcaggctgagggatttctacctcacactgtgcatttgcacagcagatagaaagacttgtttatattaaacagcttatttatgtatcaatattagttggaaggaccaggcgcagagcctctctctgtgacatgtgactctgtcaattgaagacaggacattaaaagagagcgagagagagaaacagttcagattactgcacatgtggataaaaacaaaaacaaaaaaaaggagtggttcaaaatgccatttttgcacagtgttaggaattacaaaatccacagaagatgttacttgcacaaaaagaaattaaatattttttaaagggagaggggctgggcagatcttaaataaaattcaaactctacttctgttgtctagtatgttattgagctaatgattcattgggaaaatacctttttatactcctttatcatggtactgtaactgtatccatattataaatataattatcttaaggattttttatttttttttatgtccaagtgcccacgtgaatttgctggtgaaagttagcacttgtgtgtaaattctacttcctcttgtgtgttttaccaagtatttatactctggtgcaactaactactgtgtgaggaattggtccatgtgcaataaataccaatgaagcacaatcaagattatgtactgtgtgtctgtaaagggtcagtgacaatgaaaaagacagcttgttttgttcaaaatatagactggatttcccatagagctcttttaataggtttccatgactcaataacatagcaaaatgcctccagacctaaataaggtgtttacctactgagggctacagatttaccctacattttcacagccggattcaaggtgttctagactacttgtaggcactttcaagatcccatctgctgcacttgactgaagaagtgacctttgtgattgcgtagctccaannnaaaaaaaaaaaanaaaaaanaaaaaaaaataaaaaaaaaaaaaataataataaaaaaaatcctcgagggggggcccggtccccaattcgccctatagggagtggttttacgcgcgcccactgggccgtgttttacaacgtcgggaatgggaaacccnnn

SEQ ID NO: 22225 - DNA, 2583 bp, Homo sapiens
  misc_feature 2567, 2568, 2569, 2570, 2571, 2572, 2573, 2574, 2575, 2576,2577, 2578, 2579, 2580, 2581, 2582, 2583: n = A,T,C or G
gggagtcacccacgcgtccgggcggcgcggccgcgcgagggtgatgaaggcctacgagtgcggcgcggcctgaaggggcacgcgggggacctgcaaagctagtgaggggcggggcaggcggcgcggtgggggcgggccgagcccggaggccagatgagcggacacagccccacgcgcggggccatgcaggtggccatgaacggtaaggcccgcaaagaggcggtgcagactgcggctaaggaactcctcaagttcgtgaaccggagtccctctcctttccatgctgtggctgaatgccgcaaccgccttctccaggctggcttcagtgaactcaaggagactgagaaatggaatattaagcccgagagcaagtacttcatgaccaggaactcctccaccatcatagcttttgctgtagggggccagtacgttcctggcaatggcttcagcctcatcggggcccacacggacagcccctgcctccgggtgaaacgtcggtctcgccgcagccaggtgggcttccagcaagtcggtgtggagacctatggtggtgggatctggagcacctggtttgaccgtgacctgactctggctggacgcgtcattgtcaagtgccctacctcaggtcggctggagcagcagctggtgcacgtggagcggcccattcttcgcatcccacacctggccatccatctgcagcgaaatatcaacgagaactttgggcccaacacagagatgcatctagtccccattcttgccacagccatccaggaggagctggagaaggggactcctgagccagggcctctcaatgctgtggatgagcggcaccattcggtcctcatgtccctgctctgtgcccatctggggctgagccccaaggacatagtggagatggagctctgccttgcagacacccagcctgcggtcttgggtggtgcctatgatgagttcatctttgctcctcggctggacaatctgcacagctgcttctgtgccctgcaggccttgatagattcctgtgcaggccctggctccctggccacagagcctcacgtgcgcatggtcacactctatgacaacgaagaggtggggtctgagagtgcacagggagcacagtcactgctgacagagctggtgctgcggcggatctcagcctcgtgccagcacccgacagccttcgaggaagccatacccaagtccttcatgatcagcgcagacatggcccatgctgtgcatcccaactacctggacaagcatgaggagaaccaccggcctttattccacaagggccccgtgatcaaggtgaacagcaagcaacgctatgcttcaaacgcggtgtcagaggccctgatccgagaggtggccaacaaagtcaaggtccccctgcaggatctcatggtccggaatgacaccccctgtggaaccaccattggacctatcttggcttctcggctggggctgcgggtgctggatttaggcagcccccaactggccatgcactctatccgggagatggcctgcaccacaggagtcctccagaccctcaccctcttcaagggcttctttgagctgttcccttctctaagccataatctcttagtggattgagccctcttggaaagacttctctgccatccctttgcacctgagaggggaagttctcagctgagctgaagctggattattaaagtggattgtcactcagactctccgtgctacgcttatttggagactagaggagtgggagttgagcctggcttgaacctttggaaccagaaaagttggggagcaggtggaggaggccacactcctgggagctgatggttttaaatctggttttaaatctcttctctgtctcaagtccatgtctgaagtgggtgaagggtggactggatcctcaagcagaaggtcacttctcccacccctagtcctccacctgggaaatggcctcaacggtcttccctctttccatccccagaatgggtgtcccgctctgccttcagagatcctgttctgcactgggccaccttcagagctgctctgggcagacaaagctgtttctcaccctcccaaaatcccttcccatcccctctcaggagctgcaaagagaagggcacagtctatatcttatcacccttcatcatccacttctcagcagtccctggtattacttgattgtgaacatattatcaggaaaaaagattatcattgaaaaaattggaaaagtcaaagtctggccgggtgcagcggctcacatctgtattcccagcattttgggaggccaaggcaggtggatcacttgaggtcagagttcaagaccagcctttgccaacatgggtgaaacccatctctacttaaaaaaaaatacaaaaaaaattagcaggcatggtggcaccccacctgtaatctcagtattcaggagactgacgcggggaattggttgaacacaggaggcgttggttgcgtgagcctgagattggggccaccgggattcagcctgggcacaggagccaggtcttcttcaaaaaaggccgggtgtgggtctgctgtgtccccctttgagnnnnnnnnnnnnnnnnn

SEQ ID NO: 22226 - DNA, 980 bp, Homo sapiens
  misc_feature 980: n = A,T,C or G
acgtcggaaataaactatttccagactgatacttcagtgtttccttttattttttatagcgtataaaagtttctgaggtgggggcaatattttgataagagtagtcgtttagctaaaactaagtaacattaaggaaacacattgtctggtcttatatgttagtgcaacacacagtatatatatgtttaagcaactattggtgagtgggggctacagggattaccaggagatgatctctcaattcagaatggcattattgtgacaaaggccaccagatacccactcctcatagacccacaaactcaaggcaaaacttggattaaatcaaaggaaaaagaaaatgatttacaggtgacatctctgaaccataaatattttcgcacacacttggaggacagcctttccttgggccgaccccttctcattgaggacattcatgaagagctggatccagccttggataatgtattagaaaagaattttattaaatctggcaccactttcaaggtgaaagtcggtgataaggaatgtgatatcatggatacatttaaactttacattactacgaagttaccaaatcctgcctttaccccagagattaatgctaaaacgtcagtcattgatttcactgttacaatgaaaggacttgagaatcagttactaaggagagtcattctaacagagaaacaggagttagaggctgagagggttaaacttttggaggatgttacttttaataagcggaagatgaaagaacttgaagataacctcctctataaattaagtgctacaaaaggctcattggtagatgacgaatctctcattggtgtacttcgaactaccaagcagacagcagctgaggtaagtgaaaagttgcatgtggctgcagaaactgagatcaagatcaacgcggctcaggaggagttccggcccgcagccacccgcggaagcatcctctacttcctcatcacagagatgan

SEQ ID NO: 22227 - DNA, 3132 bp, Homo sapiens; identical to SEQ ID NO: 20928
  misc_feature 3132: n = A,T,C or G

SEQ ID NO: 22228 - DNA, 1217 bp, Homo sapiens
  misc_feature 1, 2, 3, 4: n = A,T,C or G
nnnnctctgtgctgcgagtggctagctgggcagagccctgggggcgcggtgctgccgcctccaggtctccgccccgtgtgtgcgccctgcacttagggatccctccctcactgccccggtactcacaagcttctcggccccgaccttcgccctgggaggttctggccaggtgccgggaggggcgctgtgtcgagggcgatccccccaaagcagcgtcccgtgctaaagaaacagagcctcactctgtcacctaggctggagtgcagtggtgcaattatggctcactgcagtttcaacctcccagattccagtcatcctcctgcctcagccacccaagaagctgggaccacagggatcacatgcagtggtctaaggaagaagaagcagcagccagaaaaaaagtaaaagaaaactcagctgtgcgagtccttctggaagagcaagttaagtatgagagagaagctagtaaatactgggacacattttacaagattcataagaataagtttttcaaggatcgtaattggctgttgagggaatttcctgaaattcttccagttgatcaaaaacctgaagagaaggcgagagaatcatcatgggatcatgtaaaaactagtgctacaaatcgtttctcaagaatgcactgtcctactgtgcctgatgaaaaaaatcattatgagaaaagttctggttcttcagaaggtcaaagcaaaacagaatctgatttttccaacctagactctgaaaaacacaaaaaaggacctatggagactggattgtttcctggtagcaatgccactttcaggatactagaggttggttgtggagctggaaatagtgtgtttccaattttgaacactttggagaactctccggagtcctttctgtattgttgtgattttgcttctggagctgtggagctcgtaaagtcacactcgtcctacagagcaacccagtgttttgcctttgttcatgatgtatgtgatgatggcttaccttacccttttccagatgggatcctggatgtcattctccttgtctttgtgctctcttctattcatcctgacaggatgcaaggtgttgtaaaccgactgtccaagttactgaaacctgggggaatgctgttatttcgagactatggaagatatgataagactcagcttcgttttaaaaagggacattgtttatctgaaaatttttatgttccaggagatggt

SEQ ID NO: 22229 - DNA, 459 bp, Homo sapiens; identical to SEQ ID NO: 21058
  misc_feature 1, 2: n = A,T,C or G

SEQ ID NO: 22230 - DNA, 1868 bp, Homo sapiens
  misc_feature 1860, 1861, 1862, 1863, 1864, 1865, 1866, 1867, 1868: n = A,T,C or G
gcgtccgcgcgctcgcctcggaacttgctgactgcgcggccgggaggagccgagccgggcgggcggcggcggcgggaggctacagcgcgcgggggtctcccgcgtcccctccgcctcgccgggagctcgcgccctcgcccagccgagctcccacccccgcttttttccgaaggcgctgggcggcgccaccctccggccggagcccggcactgcacaaccccctccgactttcaatgttccacactccccggccagagcctcctcggcttctttttttccctccccccccttcccccccccacagctgcctccatttccttaaggaagggtttttttctctctccctcccccacaccgtagcggcgcgcgagcgggccgggcgggcggccgagttttccaagagataacttcaccaagatgtccagtgataggcaaaggtccgatgatgagagccccagcaccagcagtggcagttcagatgcggaccagcgagacccagccgctccagagcctgaagaacaagaggaaagaaaaccttctgccacccagcagaagaaaaacaccaaactctctagcaaaaccactgctaagttatccactagtgctaaaagaattcagaaggagctagctgaaataacccttgatcctcctcctaattgcagtgctgggcctaaaggagataacatttatgaatggagatcaactatacttggtccaccgggttctgtatatgaaggtggtgtgttttttctggatatcacattttcatcagattatccatttaagccaccaaaggttactttccgcaccagaatctatcactgcaacatcaacagtcagggagtcatctgtctggacatccttaaagacaactggagtcccgctttgactatttcaaaggttttgctgtctatttgttcccttttgacagactgcaaccctgcggatcctctggttggaagcatagccactcagtatttgaccaacagagcagaacacgacaggatagccagacagtggaccaagagatacgcaacataattcacataatttgtatgcagtgtgaaggagcagaaggcatcttctcactgtgctgcaaatctttatagcctttacaatacggacttctgtgtatatgttatactgattctactctgcttttatcctttggagcctgggagactccccaaaaaggtaaatgctatcaagagtagaactttgtagctgtagattagttatgtttaaaacgcctacttgcaagtcttgcttctttgggatatcaaaatgtattttgtgatgtactaaggatactggtcctgaagtctaccaaatattatagtgcattttagcctaattcattatctgtatgaagttataaaagtagctgtagatggctaggaattatgtcatttgtattaaacccagatctatttctgagtatgtggttcatgctgttgtgaaaaatgttttaccttttacctttgtcagtttgtaatgagaggatttccttttaccctttgtagctcagagagcacctgatgtatcatctcaaacacaataaacatgctcctgaaggcaaaaaaaaaaaaaaaaaaaaaaaaaaaaaaaaaacaccaaaaaaaaaaaaaaaaaaaaaaaaaaaaaacgaaccacagaaaaagacagaaacaacaagaaaagacataagaaagaaacaagaagaaacaaaagaggggggggggggcggcataagaataatacgccagggggggcaggcacgtaggtcgggacaacgcactatattaggaagagagggggcgcccacaaggaggggggcattcaaaataacaacgagaggcgccgggcgggaaaacacacgcnnnnnnnnn

SEQ ID NO: 22231 - DNA, 5151 bp, Homo sapiens
  misc_feature 1, 2, 5151: n = A,T,C or G
nngaggacacttgggacttgcctggcgactttggccggacttttgctaactgcggcgggcgagacgttctcaggtggctgcctctttgatgagccgtatagcacatgtggatatagtcaatctgaaggtgatgacttcaattgggagcaagtgaacaccttgactaaaccgacttctgatccatggatgccatcaggttctctcatgctggtgaatgcctctgggagacctgaggggcagagagcccacctgctcttaccccaacttaaggaaaatgacacccactgcatcgattttcactattttgtgtccagcaagagtaattctcctccggggttactcaatgtctacgtgaaggtcaataacgggccactggggaatcctatctggaatatatctggagacccaacacgtacatggaacagggcagaactggccattagtactttctggcctaacttttatcaggtgatttttgaagtgataacttctggacatcaaggctatctcgctatcgatgaggtgaaggtgttaggacatccatgtaccaggactcctcacttcctgcggattcagaatgtggaagttaatgctggccagtttgctaccttccagtgcagtgccatcggcaggaccgtggcaggagacaggctctggttacagggcattgatgtgcgagatgctcctctgaaggaaatcaaggtgaccagctcccgacgcttcattgcttcatttaatgttgtgaataccaccaaacgagatgctggaaagtaccgctgcatgattcgcactgaaggaggtgttggaatatcaaactatgcagagttggtagttaaagaaccacccgttcctattgccccacctcagctcgcctctgtaggagccacctacctgtggatacagctcaacgccaactccatcaatggggatgggcccattgtggcccgagaggtggagtactgcacggccagtgggagctggaatgaccggcagccagtcgattccacgagctataaaattggacaccttgacccagatacagaatatgagattagtgtgctcctgaccaggccaggggagggtggcactggctctcctggtccagctctcaggacaagaacaaagtgtgctgatcccatgcgaggcccaagaaaactagaagtagtggaggtcaaatctcggcaaatcactatccgctgggagccatttggatataatgtaactcgttgccacagttataatctcactgtccactactgttaccaagttggaggacaagaacaagtgcgagaagaagtaagctgggatacagaaaattcacaccctcaacacacgatcactaacctgtcaccatacaccaatgtcagtgtgaaactgatcctcatgaacccagagggccggaaggaaagccaagaactcatagtgcagacagatgaagacctcccaggtgctgttcccactgaatccatacaaggaagtacctttgaagagaagatatttcttcagtggagagaaccaactcaaacatatggtgtaatcactttatatgagatcacctacaaagcagtcagttcctttgacccagaaatagatttatccaatcagagtggaagagtttcaaagctgggaaatgaaacccattttctgttttttggactgtatccggggaccacatactcctttaccatccgagctagcacagctaagggttttgggcctccagcaacaaaccagttcaccaccaaaatatcagcaccctctatgccagcttatgaacttgagacacctttgaatcaaactgacaataccgtgacagtcatgctgaaacctgcccacagcagaggagcacctgtcagtgtctatcaaatagttgttgaggaagaacgtcctcgaagaactaaaaagacgacagaaatcttaaagtgctacccagtgccaattcacttccagaatgcttctctgctgaactcacagtactactttgctgcagaatttcctgcagacagcctccaagctgcgcagccttttacaattggtgataataagacatataatggatactggaacactccccttctcccctataaaagctacagaatttatttccaagctgctagtagagccaatggggaaaccaaaatagactgtgtccaagtggccacaaaaggagctgccactccgaaaccagtcccagaacccgagaaacagacagaccatacagttaaaattgctggagtcatcgcgggcatcttgctgttcgtgattatatttcttggagttgtgttggtaatgaagaaaaggaaactggccaagaagcggaaagagaccatgagcagcacccgacaggagatgactgtgatggtgaactcaatggacaagagctatgctgagcagggcacaaactgcgacgaggctttctcattcatggacacgcacaatctgaatgggagatctgtgtcttcaccatcgtccttcacaatgaaaacaaatacactgagcacatcggtgcctaattcctattacccagatgaaacccacacaatggccagcgataccagcagcctggtgcagtcccatacttacaagaagcgagagccggccgacgtgccctatcagactgggcagctccaccccgccatccgggtggcagacctccttcagcacatcacacagatgaagtgtgcggagggctacggcttcaaggaggaatacgagagcttctttgaagggcagtctgcaccatgggactcggctaagaaagatgagaacagaatgaagaacagatacgggaatatcattgcatacgatcattcccgagtgaggctgcagacaatagaaggagacacaaactcagactatatcaatggcaattatatcgatggttatcatcgacccaatcattacattgctacccaagggccaatgcaggaaaccatctatgacttctggaggatggtgtggcacgaaaacactgcaagtatcatcatggtgaccaatcttgtggaagtgggaagggtcaaatgctgcaaatactggccagatgacacagagatatataaagacattaaagttaccctaatagaaacagaactactggcagaatatgtgataagaacatttgctgttgaaaagagaggtgtgcatgaaatccgagagatcagacagtttcacttcactggctggccggatcatggggtcccctaccatgccaccggcctgctgggattcgtgcggcaagtcaagtccaagagcccgcccagtgcaggcccactggtggtgcactgcagtgctggtgcagggaggactggctgtttcatcgtcattgatatcatgttggacatggccgaaagggaaggggtcgtagacatctacaactgcgtcagggagctgcggtcacggagggtgaacatggtgcaaacagaggagcagtatgtgtttatccacgatgcgatcctggaagcctgtctttgtggggacacctctgtgcctgcttcccaagttaggtctctgtattatgacatgaacaaactggatccacagacaaactcaagccagattaaagaggaattccggacgctaaacatggtgacaccaacgctgcgagtagaggactgcagcatcgcactgttgccccggaaccatgagaaaaaccggtgcatggacatcctgcccccagaccgctgcctgcccttcctcatcaccatcgatggggagagcagcaactacatcaatgctgccctcatggacagctataaacagccttcagcttttatagtcacccagcatcctttgccaaacacagtgaaagacttttggagactggtcctggattatcactgcacatccgtagttatgctaaatgatgtggatcctgcccagttgtgtccacagtactggccagaaaacggagtacacagacacggccccatccaggtggaatttgtctctgctgacctggaagaggacatcatcagcaggatattccgcatttacaatgccgccagaccccaagatggatatcggatggtgcagcaattccagttcctgggctggccgatgtacagggacacaccagtgtctaagcgctccttcttgaagctcattcgccaggtggacaagtggcaagaggaatacaatggcggggaaggccgcaccgttgtgcactgcttgaacgggggaggccgcagtgggacgttctgcgccatcagcatcgtatgtgagatgctccggcaccagagaaccgtggatgtctttcacgctgtgaagacactgaggaacaacaagcccaacatggtcgacctcctggatcagtacaagttctgctacgaggtggccctggaatacttgaattctggctgatggtgtaaacagctctgcaaacaatccctttcataccacaaagccaagacgttccatggtatttgtgcaaaagagatgaagacttctcaatatgcttattttgctttgcataattggctctttttaagagcccaagaaagtgtttctaaaattgcttgcactgcccaatcccagtaatgctgctgcctgacagaaacacacacacagccacagttgccaaatcccgtactccttgccaccggcttcctagagcagcgtagacagctggtaaactgaagagcacaactatattcttatgaaggaatttgtacctttggggtattattttgtggcccgtgaccctcgttattgttacagctgagtgtatgtttttgttctgtggagaatgctatctggcattatggtaatatattattttaggtaatatttgtactttaacatgttgcataatatatgcttatgtagctttccaggactaacagataaatgtgtaatgaacaaagatatgttgtatgagtcgtcgtttctgtcagatttgtattgtttccaagggaaaagcttgggggaggactcagttcacaaaatgcaaaactcaacgatcagattcacggacccagagcttttccatgtgtttatattgtaaatatttttgatttcatcaaattatttattcattaaaagaaatttttgtgaagcacagtgagtgacaatcatttttcttaaggcctggaaacgattttctgtatgatgttactttatgtgaattctcatctcaataaatgatgacccgtn

SEQ ID NO: 22232 - DNA, 2822 bp, Homo sapiens
  misc_feature 1, 2777, 2778, 2779, 2780, 2781, 2782, 2783, 2784, 2785,2786, 2787, 2788, 2789, 2790, 2791, 2792, 2793, 2794, 2795,2796, 2797, 2798, 2799, 2800, 2801, 2802, 2803, 2804, 2805,2806, 2807, 2808, 2809, 2810, 2811, 2812, 2813, 2814: n = A,T,C or G
  misc_feature 2815, 2816, 2817, 2818, 2819, 2820, 2821, 2822: n = A,T,C or G
nagagtggagcggccgccggagatgcctgacgcatctgtctgaggagcggtcagtgacgcgatggagcgggcaaggagacagggtctggctatgtgcccaggttggagtgcagtgatgcagttatagctccctgtaacctcaaactcctggatcaatctagactcctgcctcagcctcccaagtgcctgttagtacaggcttgagggatcgcttacacctgagacgaactacagaacagcacgtaccagaggtggaagtccaagtcaaacgcagaaggactgcctcactgagcaaccaagagtgtcagttgtacccgaggcgttctcagcagcagcaaagtacctgtggtggatttccaggctgaactgaggcaggcattcttagctgagacaccaagaggtggttaaagccatatggagtagcgaggaatctgattccaagcaaaaaaccaggttagagctaatgcagcaatgatcaagaataaagaatcattaaagaatggggtgtgggggtctcttaattatcagtgacacattaatttttttccttagaagcttcaatacaataaacacattgagaaagtttaagaaagtttgtggagggaccttaaaattttctgccgtgaactttcggtcatgttctgtattccagtatgtagcgaagggttcagtaagtgcattggggttttaatctctaaaatattcactataaaggctctgatacctgtatgatgttttaaattcattgggagggacatttcggcgcaggttgggaacgttataataggtgtttagtaaaattcattggagcggtcagtgacgcgatggagcgggcaagggatcgcttacacctgagacgaactacagaacagcacgtaccagaggtggaagtccaagtcaaacgcagaaggactgcctcactgagcaaccaagagtgtcagttgtacccgaggcgttctcagcagcagcaagtacctgtggtggatttccaggctgaactgaggcaggcattcttagctgagacaccaagaggtggttaaagccatattggagtagcgaggaatctgattccaagcaaaaaccaggctccatctactctttgaagcttctgcccagcttgcattgtttctaggagaacctgcgtcatacctttatctatagccttcccctaggtcttcagaagcatcaagttttaactgtggacattggatttggtggaacagcaatcatgactgttggcaagagtagcaagatgctgcagcacattgactatagaatgagatgtatcctgcaagatggccgaatcttcattggcacctttaaggcttttgacaagcatatgaatttgatcctctgtgattgtgatgagttcagaaagataaggccaagaagcgaagcaacgagagtggagcggccgccggagatgcctgacgcatctgtctgaggagcggtcagtgacgcgatggagcgggcaagggatcgcttacacctgagacgaactacagaacagcacgtaccagaggtggaagtccaagtcaaacgcagaaggactgcctcactgagcaaccaagagtgtcagttgtacccgaggcgttctcagcagcagcaagtacctgtggtggatttccaggctgaactgaggcaggcattcttagctgagacaccaagaggtggttaaagccatattggagtagcgaggaatctgattccaagcaaaaaccaggctccatctactctttgaagcttctgcccagcttgcattgtttctaggagaacccgcgtcatacctttatctatagccttcccctaggtcttcagaagcatcaagttttaactgtggacattggatttggtggaacagcaatcatgactgttggcaagagtagcaagatgctgcagcacattgactatagaatgagatgtatcctgcaagatggccgaatcttcattggcacctttaaggcttttgacaagcatatgaatttgatcctctgtgattgtgatgagttcagaaagatcaagccaaagaatgcgaagcaaccagagcgtgaagaaaagcgggttttgggtctggtgttgctgcgtggggagaacttggtatccatgactgtggaggggccaccccccaaagatactggcattgctcgggtaccacttgctggagctgctggaggccctggggttggtagggcagctggtagaggagtaccagctggtgtgccaattccccaggcccctgctggattggcaggccctgtccgaggagttgggggaccatcccagcaggtaatgactccacagggaagaggcactgtagcagctgctgctgttgctgcgactgccagtattgctggagccccaacacagtacccaccaggacggggcactccgcccccacccgtcggcagagcaaccccacctccaggcattatggctcctccacctggtatgagaccacccatgggcccaccaattgggcttccccctgctcgagggacgccaataggcatgccgcctccgggaatgagaccccctccaccaggcattagaggtccacctcccccaggaatgcgtccaccaagaccttagcatactgttgatccatctcagtcactttttcccctgcaatgcgtcttgtgaaattgtgtagagtgtttgtgagctttttgttccctcattctgcattaataatagctaataataaatgcatagagcaattaaactgtgaaaaaaaaaaaaaaaagtcgacgcggccgcgaatttagtagtagtagaannnnnnnnnnnnnnnnnnnnnnnnnnnnnnnnnnnnnnnnnnnnnn

SEQ ID NO: 22233 - DNA, 391 bp, Homo sapiens
  misc_feature 388, 389, 390, 391: n = A,T,C or G
accggaagcagcgaatggaagagatgcggcagcagcttcacaaggggccccaattcaagcaggtttttgagatctccagtggagaagggtttttagacatgattgataaagaacagaaaagcattgtcatcatggttcatatttatgaggatggcattccagggaccgaagccatgaatggttgcatgatctgccttgccgcagagtactgtttgcattaataaattaaagctccatagggtcttctcgtcttgctgtgtcatgcccgcctcttcacgggcaggtcaatttcactggttaaaagtaagggacagctgaaccctcgtggagccattcatacaggtccctaattaaagaacaagtgattatgctacctttgcacggttannnn

SEQ ID NO: 22234 - DNA, 1120 bp, Homo sapiens
  misc_feature 1, 1119, 1120: n = A,T,C or G
ncaaatttgtttctgtgtgtgtaaaaggaaaggcttcatatctaaaatgactttacctcagtatactaaattgtttgagggtaatgaatgagaagaacacaactgtaaaaggccaaaggacagagggatgggcaaatgaaggaaaggcagagagggagaccaagagctgagggggaaaattctgtggaggggtgtgggaaaggggtggagctggcacccttgccttaaaagccgaggtacgcggggactgactggttgagccgggtagggaaagcagcctaaagcccgggacaggcacacaggcccaggtgtgtaggccacagcagccgcagtcctgaaaggctgcaacacccagacctccaggagagaccaggcccaggatgcctcgcctgttcttgttccacctgctagaattctgtttactactgaaccaattttccagagcagtcgcggccaaatggaaggacgatgttattaaattatgcggccgcgaattagttcgcgcgcagattgccatttgcggcatgagcacctggagcaaaaggtctctgagccaggaagatgctcctcagacacctagaccagtggcagaaattgtgccatccttcatcaacaaagatacagaaaccataaatatgatgtcagaatttgttgctaatttgccacaggagctgaagttaaccctgtctgagatgcagccagcattaccacagctacaacaacatgtacctgtattaaaagattccagtcttctctttgaagaatttaagaaacttattcgcaatagacaaagtgaagccgcagacagcagtccttcagaattaaaatacttaggcttggatactcattctcgaaaaaagagacaactctacagtgcattggctaataaatgttgccaattggtggtcccaaaggtctctggctaaatatggtgagatgaagtaatgtgcccattttgttaatttcaccatagtctggtgaactattctgttgtttgggcgggtcctatttttgaaattgaattttaggtgaatcctgggggaaatcctgttattagttgaaactagggctgttttaaaaatgtgtgttaggggaaaaatggtttaaaaaaagggggcnn

SEQ ID NO: 22235 - DNA, 353 bp, Homo sapiens
  misc_feature 236, 237, 238, 239, 240, 241, 242, 243, 244, 245, 246, 247,248, 249, 250, 251, 252, 253, 254, 255, 256, 257, 258, 259,260, 261, 262, 263, 264, 265, 266, 267, 268, 269, 270, 271,272, 273, 274, 275, 276, 277, 278, 279, 280, 281, 352: n = A,T,C or G
  misc_feature 353: n = A,T,C or G
acctccttcagcggaaggcctcaccacccacagtgtgaatcctgaggtgccgtcattggcggttctgctgcttcgctgcagggataaggtggagctaccgaacagctgattcatatgccaagaatttggagtcttctttcaaaccagtgggggttggacaatgaatgtagttaactggttcctgctcacactccagaattaaattctattgaaaaaggaaaatcagcaattcagcnnnnnnnnnnnnnnnnnnnnnnnnnnnnnnnnnnnnnnnnnnnnnnccttgcccggagcggtccgctctagaaactaggtggtatcccccggggctgcaggaaaattcgatatcaann

SEQ ID NO: 22236 - DNA, 2361 bp, Homo sapiens; identical to SEQ ID NO: 20124
  misc_feature 1, 2, 3, 2361: n = A,T,C or G

SEQ ID NO: 22237 - DNA, 1120 bp, Homo sapiens; identical to SEQ ID NO: 22234
  misc_feature 1, 1119, 1120: n = A,T,C or G

SEQ ID NO: 22238 - DNA, 692 bp, Homo sapiens
  misc_feature 550, 551, 552, 553, 554, 555, 556, 557, 558, 559, 560, 561,562, 563, 564, 565, 566, 567, 568, 569, 570, 571, 572, 573,574, 575, 576, 577, 578, 579, 580, 581, 582, 583, 584, 585,586, 587, 588, 589, 590, 591, 592, 593, 594, 595, 596: n = A,T,C or G
  misc_feature 597, 691, 692: n = A,T,C or G
cccacgcgtccgctgttttaaggaaatagatcaacttcctaaaacatcaaatcgagatactttggtcataatcaaagttttactcaaactttttaaggttttgccaaggaaggggtacaggaaaatcagtcagatacttttggaagattagagaaatcagaaagggtggggaatgaaagagcctagtaaagaagtcccagtctgcaatgaaagcagagaattctgatgaagaatagatctgacttctttcatttaggacccaacttaccatatctgatttatttctaggtaacactggagctgactccctgggaagagaggccaaatgttacaatgaacttaatggatgcaccaagatatatgaccctgtctgtgggactgatggaaatacttatcccaatgaatgcgtgttatgttttgaaaatcggaaacgccagacttctatcctcattcaaaaatctgggccttgctgagaaccaaggttttgaaatcccatcaggtcaccgcgaggcctgactggccttattgttgaataaatgtatctgaatannnnnnnnnnnnnnnnnnnnnnnnnnnnnnnnnnnnnnnnnnnnnnnnggggggggcccgtcctttttttttaaaaaaaaaacccccccccccccccccggaggggaaaaaaaaaaaaagaaccccggtgggggggaaaccnn

SEQ ID NO: 22239 - DNA, 946 bp, Homo sapiens
  misc_feature 1, 2, 3, 938, 939, 940, 941, 942, 943, 944, 945, 946: n = A,T,C or G
nnncacccacgcgtccgctcgtcgctcgctccttgacggctgaccgacactgggtctgaggtgtaagcgctttccaggcccttccctggggcttggaggggaatggcgcaaaggacttttcttacaagcagagccactgcagttaccaaagagtatgtcgcttatgtctaagaggtggactcctgaaagcctggacagtgtcatcatcttcacctgaagagtggaaaaattcaagcaaagagtttctcaggaaatgaccaaataaaacatctggagtaagtcagcaggattcacagtgactccccccaaccagctggtggtgtttctctctgaaagcagcgctggtaccagtgtgaactctcttccttcagaagtctcatcaggtggacgtaatacgagggtctggtcccccataccttgaggactccgctgccatctgacaattacagacaatccaattgtcctcatccttgaggactctgctgccatctgacaattagagacagtccaaaacatgccacactttgatcctaaacacattcctggctttggtcacttttgaaaagtccctgagttatgagaaatcaataataagagtgttcaaaacctgaacactctttttagaaatacctgctggaactacatatatgatttatggggtactgtcttgtagtgtctgcgaaagtagaaccatctaacctggaatgatcataggcaacaatgaccaaaaatggggcatcttgatatacctaaagtactttattgtgcccaccattggcaagagctgggtttagaaccggacatgttaattaagagactgcttcactgggcctaaaactctaagaatcctgaagaaagctcctctcacagtaacacgggtttgcacattgttaaaatagagttccattgaccagacaccatttcagacggaagacccnnnnnnnnn

SEQ ID NO: 22240 - DNA, 1425 bp, Homo sapiens
  misc_feature 1, 1425: n = A,T,C or G
ngtagccatcctgttaaatttgtaaacaatctaattaaatggcatcagcactttaaccaaaaaaaaaaaaaaaggggggcccgccccactccttcccctttcggattcccgacgctgtggttgctgtaaggggtcctccctgcgccacacggccgtcgccatggtgaagctgagcaaagaggccaagcagagactacagcagctcttcaaggggagccagtttgccattcgctggggctttatccctcttgtgatttacctgggatttaagaggggtgcagatcccggaatgcctgaaccaactgttttgagcctactttggggataaaggattatttggtcttctggatttggaggcaatcagcggacagcatggaagatgtgtgctctggctcggataagagatgggacatcattcagtcactagttggatggcacaaggctcttcacagacgcatctgtagcagagtggaacttgtactaacttatgatagaatgtatcagaataaatgtttttaacagtgttaaaaaaaaaacaaaaaaaaaaaaaaaaacaccccgggcctccatgtgccggggtcgcggacacacaggggaaccgacaacgcgggccaccagggtaaacaacagacggaaaaacatgacacaacggtttacgagataagaaaggagggaaaacacagtgcagagagaccacacataatgggacagcacacaatacacatcacaaaagcgccccgggattaaaccccgtgcccaattaagagtaaaaacgcgccggcacaacgccgagcgagaacaaaaacgacaacgcgcgacacaaacacaaagcgaagaaagacatgacgaagcaccatcgacacgcaaacacaccacaagcaatactgaaaaacaccacacacaagagtacactgcgacaccacgccacctgacacaaggccgagagataagagaacgatggggtggaagtagagcggacgagaggctgtggaaaaacgactagaaagtgaatcgaacagaaggaagactagagaaagatgcgtatcggctgaaaagataagctgatgaggaagaaagcaccgagagagcgacggaggaggaagcgtcgactgcggaggcgagaggaagaggaaagaataggaccagtgccgaggtatagggaggagggcatactaataacaaaacatactataatccaaacacaacacatacactacattaaccacacttactacataaccaatacacatcaacaaacaatcaagagagaataaaaataaaatactaacaaaattaaaaacaaagcaaaacaataaaagcctacaatctaacacacaagagaaacataaccactaaatcactacaaacacacacagaataacatcaaactacataaaaatcaataatatcaatacactataagan

SEQ ID NO: 22241 - DNA, 440 bp, Homo sapiens
  misc_feature 439, 440: n = A,T,C or G
acatttccaaagtcaagagtcaaataaaaaaatcccatggaatttggagcctatttagaactcaaaataatgagaatgctgcaaatcaaaacttgtgacatcccactaaagctgttcttagagggaaatctatccaacacactaaatgcttacattagcaaagaagaaaggctaaaatgaacgagcatccaagttaacatgttagaaaaggagcaacagagaagactcaataaagtaaaaggaaggaaacaataaagataagattagaaatcaatgcaacaagaaaacaaagataaatgctggagaggatcttggttttctgaaaagacaaattaatgggtctcttggcaagactgagaaaggaaaaaagaaggcacaaacacagtaggatgtaaccactcaaaagtatcatgacctgtttcttcccatcacgtggacnn

SEQ ID NO: 22242 - DNA, 2075 bp, Homo sapiens
  misc_feature 1, 2, 2070, 2071, 2072, 2073, 2074, 2075: n = A,T,C or G
nnactgggaaatatataaggtgccagtgcccaactcattctcatacttactcccaagatggctgtttcaaatattagatatggagcagcagttacaaaggaagtaggaatggacctaaaaaacatgggtgctaaaaatgtgtgcttgatgacagacaagaacctctccaagctccctcctgtgcaagtagctatggattccctagtgaagaatggcatcccctttacggtttatgataatgtgagagtggaaccaacggattcaagtgccaactacctcaggaaccgggagtgaaactactggggttgccatttttgactatgaacacttgaaagtaaaaattggcgtcacttcgagagccatcaaacccacactgggactgattgatcctctgcacaccctccacatgcctgcccgagtggtcgccaacagtggctttgatgtgctttgccatgccctggagtcatacaccaccctgccctaccacctgcggagcccctgcccttcaaatcccatcacacggcctgcgtaccagggcagcaacccaatcagtgacatttgggctatccacgcgctgcggatcgtggctaagtatctgaagagggccgtcaacagcactgacaaatgaagaagaagaatgagtctcagggcaccttcctggagtggccctcgccatccagggaccagcgcgttgcctcccccggcgcttttacatcacatgagcagctgacagcgtatttattatgcctttgctgaaacagttgatgagaaatatgtttcccttcagttttcatttagaagacaaggcgtcgtttgaataacttgcctgatttttcttcctaccgagtagcatttctttttttttcaccatatctttccctaaggcagctccttattctgtaggaattgccaatgttgatgtgttattgttaggtatttatatcattcacagggctgtcagaaatcccgatgatcttgaagcaaggtctcatatgcacttggcaagtgcttttgctggcatcggctttggaaatgctggtgttcatctgtgccatggaatgtcttacccaatttcaggtttagtgaagatgtataaagcaaaggattacaatgtggatcacccactggtgccccatggcctttctgtggtgctcacgtccccagcggtgttcactttcacggcccagatgtttccagagcgacacctggagatggcagaaatactgggagccgacacccgcactgccaggatccaagatgcagggctggtgtggcagacacgctccggaaattcttattcgatctggatgttgatgatggcctagcagctgtgtggttactccaaagctgatatccccgcactagtgaaaggaacgctgccccaggaaagggtcaccaagcttgcaccccgtccccagtcagaagaggatctggctgctctgtttgaagcttcaatgaaactgtattaattgtcattttaactgaaagaattaccgctggccattgtagtgctgagagcaagagctgatctagctagggcttggtcttttcatcttgtgtgcataacttacctgttaccagtataggtgggatatacatttatctgtggcaggaaattccccaaaagctcagagtccagttccttccataaaacaggctggacaaatgaccactatgttagacccccaggctcgacttcaggggtcagtgttcctgtcccaaacccaacagaatactctgcctctggttcatgtagcaaaatgagcaaaaactcagtatctatcaacagtgtgaattatatttcctatgcctagtaattcacttcatgtctaaaaattatttgatagaacactaggcaccaggtacatacaagaagctggaagatgttctggagcacttttctaatattaaagatttgaggcaaaaaaaaaaaaaaaaaatggggcggccggccgagaaatttaaaattggggggggggccggataaatgaagggtatggtcgagacagggggaggtgggttacacaaaacgggagaggtggaacccaggggggggttcaggtgaaaacnnnnnn

SEQ ID NO: 22243 - DNA, 4345 bp, Homo sapiens; identical to SEQ ID NO: 21910
  misc_feature 1, 2, 3, 4, 5, 6, 7, 8, 9, 10, 11, 12, 13, 14, 15, 16, 17,18, 19, 20, 21, 22, 23, 24, 25, 26, 27, 28, 29, 30: n = A,T,C or G

SEQ ID NO: 22244 - DNA, 1458 bp, Homo sapiens
  misc_feature 1, 1458: n = A,T,C or G
natggtatatctctccatttatttacactttgtttgattccttcattagggttttgtagttttcagcatacaggtcctgtacttactttgttagatggtaaccaagaatttcatttttaaaagttgcatctgtcaatttttaacactttgtctctcttgatccatcactcatatatttgctagtgagtcttcacttactgtagaatgcttattataaagggaatttttaaatcttgcaaaagacaaagggtttcataaagttgacaggagcattattggagaaatactcaaatttacagagccagtgacaaaggaagatccagatgagttgggcaaattaacaaaaagagtatcgacaaggcagataaaaaatgacttgaaagagggaatgatttaaatatcaaaggattatgagaagcctttgggaaaactaatgagcctggaatatttgtataaaaattctcttgtgtaaatcaaagataaaatacaagtaagctacattatgttcctgtatatttatgttgggaaatatcaacacttgaattatcctttctttattttaagagttagaaaatggttgcagtaaaaatcaaaactttcttatataaaatatgaaaaatttagaataatttttggttttattttaaagtctcaatcaacccttaccttccagtaattattagaaaaatcaggtcactattttaagtagattcatttcaattagccttatagttcttactcctccagccagtagacaaaccctgggtttattagctgatccaaatggacactcaaaaatatgccaggccttcagcttaaggaatggccagatgcggaatcccagatttggtgagctgagaattcccgtgtgatggaagaactctaagatgaccccaaattatccccaccgctggtactccagccctgtgtaatcccctccacttgagtgtggcaggacttgggactcatttataatgaatagaatagaaaaggtgaccaaggtgacaggatgtcacttcagtgattgcattagataagactgcaatgtcctcttgctagtggactctctctctcgcaggctttgatgaagcaggtgagcatgttggggaggccctcagttcaacgggctgcaaggactgaattcattcaactctgtggtcttggaagtgggtccttctctagtcaaggcttgagataagattttgtggatgacactttgattgtagctttcagaggggatccatgtttagcttcagatgtcctgtcttatctcccaagccctgcccagtacatgctgctgttttgcttcagggctgttgtcaccaagttcttagtgctgtgtctgcaaatgccccggatgactttcactcttccctatgctttgcaaaatattggctgctttatgtagtgctctagggagggctgttctagctcctgcccaatgccctgtgtctatan

SEQ ID NO: 22245 - DNA, 398 bp, Homo sapiens
  misc_feature 398: n = A,T,C or G
ggatcttcggcaagactcacgtctccaacaaccaagctccccaaagtcctgacctcaagcaatccgcctgcctaggcctcgcaaagtgctgggattacaggagtgagccaccgtgcccagccaagaaagattttggaagagtgaatgaatacaaggatttccactagactgagaattagtttgtcaacagcatttcagtgtcttgagaagtgtttacatttggcgtggacaaagctggcagatgacgtagaaagtaaaaagttgcctcttcaaagtttcccttcttgttaaagaataaatcataaatgttagaaacaatagtttcttttaaaggactacttacttcaagcctccttgctttgggctaataactctgttaagccctattgtatgtaacn

SEQ ID NO: 22246 - DNA, 2929 bp, Homo sapiens; identical to SEQ ID NO: 21129

SEQ ID NO: 22247 - DNA, 2041 bp, Homo sapiens
  misc_feature 1, 2, 3, 2025, 2026, 2027, 2028, 2029, 2030, 2031, 2032,2033, 2034, 2035, 2036, 2037, 2038, 2039, 2040, 2041: n = A,T,C or G
nnnagtttcaagaagagtgactgtctcagtgccgagtgcctcagcagcttctccacatgctcttcagtccccaaagttggagaatcccatcagagagagaggacagagagcaagtcactcccggctgcctttttcacctctgacagagcccagacaccatgaacgcaagtgaattccgaaggagagggaaggagatggtggattacgtggccaactacatggaaggcattgagggacgccaggtctaccctgacgtggagcccgggtacctgcggccgctgatccctgccgctgcccctcaggagccagacacgtttgaggacatcatcaacgacgttgagaagataatcatgcctggggtgacgcactggcacagcccctacttcttcgcctacttccccactgccagctcgtacccggccatgcttgcggacatgctgtgcggggccattggctgcatcggcttctcctgggcggcaagcccagcatgcacagagctggagactgtgatgatggactggctcgggaagatgctggaactaccaaaggcatttttgaatgagaaagctggagaagggggaggagtgatccagggaagtgccagtgaagccaccctggtggccctgctggccgctcggaccaaagtgatccatcggctgcaggcagcgtccccagagctcacacaggccgctatcatggagaagctggtggcttactcatccgatcaggcacactcctcagtggaaagagctgggttaattggtggagtgaaattaaaagccatcccctcagatggcaacttcgccatgcgtgcgtctgccctgcaggaagccctggagagagacaaagcggctggcctgattcctttctttatggttgccaccctggggaccacaacatgctgctcctttgacaatctcttagaagtcggtcctatctgcaacaaggaagacatatggctgcacgttgatgcagcctacgcaggcagtgcattcatctgccctgagttccggcaccttctgaatggagtggagtttgcagattcattcaactttaatccccacaaatggctattggtgaattttgactgttctgccatgtgggtgaaaaagagaacagacttaacgggagcctttagactggaccccacttacctgaagcacagccatcaggattcagggcttatcactgactaccggcattggcagataccactgggcagaagatttcgctctttgaaaatgtggtttgtatttaggatgtatggagtcaaaggactgcaggcttatatccgcaagcatgtccagctgtcccatgagtttgagtcactggtgcgccaggatccccgctttgaaatctgtgtggaagtcattctggggcttgtctgctttcggctaaagggttccaacaaagtgaatgaagctcttctgcaaagaataaacagtgccaaaaaaatccacttggttccatgtcacctcagggacaagtttgtcctgcgctttgccatctgttctcgcacggtggaatctgcccatgtgcagcgggcctgggaacacatcaaagagctggcggccgacgtgctgcgagcagagagggagtaggagtgaagccagctgcaggaatcaaaaattgaagagagatatatctgaaaactggaataagaagcaaataaatatcatcctgccttcatggaactcagctgtctgtggcttcccatgtctttctccaaagttatccagagggttgtgattttgtctgcttagtatctcatcaacaaagaaatattatttgctaattaaaaagttaatcttcatggccatagcttttattcattagctgtgatttttgttgattaaaacattatagattttcatgttcttgcagtcatcagaagtggtaggaaagcctcactgatatattttccagggcaatcaatgttcacgcaacttgaaattatatctgtggtcttcaaattgtcttttgtcatgtggctaaatgcctaataaacaattcaagtgaaatacnnnnnnnnnnnnnnnnn

SEQ ID NO: 22248 - DNA, 2361 bp, Homo sapiens; identical to SEQ ID NO: 20124
  misc_feature 1, 2, 3, 2361: n = A,T,C or G

SEQ ID NO: 22249 - DNA, 1120 bp, Homo sapiens; identical to SEQ ID NO: 22234
  misc_feature 1, 1119, 1120: n = A,T,C or G

SEQ ID NO: 22250 - DNA, 2352 bp, Homo sapiens
  misc_feature 1, 2, 3, 4, 5, 6, 7, 8, 2351, 2352: n = A,T,C or G
nnnnnnnnaagcggccgcgcggcagctgcggggcgtgggggtggtggtggcggcggcggtggtggcggcggcggcggcggcggcagctgaggccgaggaggcggtggctgtggcggacgcagcagcaccccagctagggatagggctccgccgcgcccccttgctggccccatggaggcggcagcggcggcggcggcggcggcagcggcagcggcagcggcgggcgggggctgtggctccgggccgccgccgctgctgctgagcgagggcgagcagcagtgctactccgagctcttcgcgcgctgtgccggcgccgcgggcgggggccccgggtctgggccccccgaggccgccagagtcgcccccggcacggccactgcggccgccggccccgtggctgacctgtttcgggcatcgcagctgcccgccgagacgctgcaccagatcacagaactgtgtggtgcaaagcgggttggttattttggtccaacacagttttacattgccctgaaattaattgctgcagcacaatctggcctcccggtacggatagagagtattaaatgtgaattgcctctgcctcgctttatgatgtcaaagaatgatggtgagatacgatttgggaacccagctgagctgcatggaactaaggttcagattccatatttaactacagaaaaaaattccttcaaaagaatggacgatgaggataaacagcaggaaacacagtctcccacgatgtcacccctcgcctcccctccttcttccccgcctcattaccagagggtgcccttgagccatggctacagcaaactgcggagcagcgcagaacagatgcatccagcaccttatgaagctaggcagccccttgtccagcccgagggatcctcatcagggggcccaggaaccaagccccttcggcatcaggcttcccttatccggtccttttcagtggagagggaactacaggataacagcagttaccccgacgaaccctggaggataacagaagaacagcgcgagtactatgtcaatcagttccgatcccttcagccagacccaagctctttcatttcaggttctgtggccaagaacttcttcaccaaatcaaagctttccattccagaactctcctatatatgggagcttagtgatgctgactgtgatggagccctgaccctgcctgagttctgtgctgcgtttcatctcattgtggctcggaagaacggctacccattgcctgagggcctccctccaactctgcagccagaatacctgcaggcagcttttcctaagcccaaatgggactgtcaattatttgattcttattctgagtcactgccggcaaatcaacaacctcgtgacttgaatcggatggagaagacatctgttaaagacatggctgaccttcctgtccctaaccaggatgtaactagtgatgacaaacaagctttgaaaagtactatcaatgaagccttaccaaaggacgtgtctgaggatccagcaactcccaaggattccaacagtctcaaagcaagaccaagatccagatcttactctagcacctccatagaagaggccatgaaaaggggcgaggaccctcccaccccgccacctcggccacagaaaacccattccagagcctcctccttggatctgaataaagtcttccagcccagtgtgccagctaccaagtcaggattgttacccccaccacctgcgctccctccaagaccttgtccatcacagtctgaacaagtgtcggaggccgagttactcccacagctgagcagagccccatcccaggctgcagaaagtagtccagcaaagaaggatgtactgtattctcagccaccatcaaagcccattcgtaggaaattcagaccagaaaaccaagctacagaaaaccaagagccttccactgctgcaagtgggccagcttctgcggcaaccatgaaaccgcatccaacagtccaaaagcagtcttccaaacagaagaaggccattcaaactgctatccgcaaaaataaagaggcaaacgcagtgctggctcggctgaacagtgagctccagcagcagctcaaggaggttcatcaagaacgaattgcattggaaaaccaattggaacaacttcgtccggtcactgtgttgtgacccccccatggttcaagtgacagtgggtgaccttgtctgccaagatctttcttttgaatgttttgaacccaactacttgtcatagatgtttgactgtgtcaaaagctgtgagcagcaaaatataatccatatgaccttttaaaaaaaaaaaaaaaaaactcgagggggggcgccggtacccaattcgccactatagnn

SEQ ID NO: 22251 - DNA, 362 bp, Homo sapiens; identical to SEQ ID NO: 21109
  misc_feature 362: n = A,T,C or G

SEQ ID NO: 22252 - DNA, 1160 bp, Homo sapiens
  misc_feature 1, 2, 1154, 1155, 1156, 1157, 1158, 1159, 1160: n = A,T,C or G
nnaaggaaaaagagcaacagatccaggagcattcacctgccctgtctccaaacagccttgtgcctcacctacccccaacctcccagagggagcagctatttaaggggagcaggatcccccgagctgcaggacttggcacggggatacaactctggagtcctctgagagagccaccaaggaggagcaggggagcgacggccggggcagaagttgagaccacccagcagaggagctaggccagtccatctgcatttgtcacccaagaactcttaccatgaagaccctcctactgttggcagtgatcatgatctttggcctactgcaggcccatgggaatttggtgaatttccacagaatgatcaagttgacgacaggaaaggaagccgcactcagttatggcttctatggctgccactgtggcgtgggtggcagaggatcccccaaggatgcaacggatcgctgctgtgtcactcatgactgttgctacaaacgtctggagaaacgtggatgtggcaccaaatttctgagctacaagtttagcaactcggggagcagaatcacctgtgcaaaacaggactcctgcagaagtcaactgtgtgagtgtgataaggctgctgccacctgttttgctagaaacaagacgacctacaataaaaagtaccagtactattccaataaacactgcagagggagcacccctcgttgctgagtcccctcttccctggaaaccttccacccagtgctgaatttccctctctcataccctccctccctaccctaaccaagttccttggccatgcagaaagcatccctcacccatcctagaggccaggcaggagcccttctatacccacccagaatgagacatccagcagatttccagccttctactgctctcctccacctcaactccgtgcttaaccaaagaagctgtactccggggggtctcttctgaataaagcaattagcaaatcatgtaagaataaaaaacacaagaaagaaaaaaagttttggcctaaatgagtcgtattacagttgacgcggccggcgaatttagtagatggtgtaattcgacccgagaaattccggaaccggaactctgaggggtgacaagtttccccaagagcggcggattaaggcttgggcggacaaannnnnnn

SEQ ID NO: 22253 - DNA, 952 bp, Homo sapiens
agctcactataggagtcgacccacgcgtccgcaccacctggccgtggacacctgtgtcagcatgtgggacctggttctctccatcgccttgtctgtggggtgcactggtgccgtgcccctcatccagtctcggattgtgggaggctgggagtgtgagaagcattcccaaccctggcaggtggctgtgtacagtcatggatgggcacactgtgggggtgtcctggtgcacccccagtgggtgctcacagctgcccattgcctaaagaagaatagccaggtctggctgggtcggcacaacctgtttgagcctgaagacacaggccagagggtccctgtcagccacagcttcccacacccgctctacaatatgagccttctgaagcatcaaagccttagaccagatgaagactccagccatgacctcatgctgcttcgcctgtcagagcctgccaagatcacagatgttgtgaaggtcctgggcctgcccacccaggagccagcactggggaccacctgctacgcctcaggctggggcagcatcgaaccagaggagttcttgcgccccaggagtcttcagtgtgtgagcctccatctcctgtccaatgacatgtgtgctagagcttactctgagaaggtgacagagttcatgttgtgtgctgggctctggacaggtggtaaagacacttgtgggggtgattctgggggtccacttgtctgtaatggtgtgcttcaaggtatcacatcatggggccctgagccatgtgccctgcctgaaaagcctgctgtggactttttttttttttttttttgtaatgacctaaaagctttaacagttcttccatctgactcaggtttccttgtctggcggtcttcagtatcaacatccacacttccattgattatctgtgtgcattttggacaaagcttccaaccaggtacctcggcgcgccga

SEQ ID NO: 22254 - DNA, 3540 bp, Homo sapiens; identical to SEQ ID NO: 21108
  misc_feature 1, 2, 3, 4, 5, 6, 7, 8, 9, 10, 11, 12, 13, 14, 15, 16, 17,18, 67, 68, 69, 70, 72, 73, 3538, 3539, 3540: n = A,T,C or G

SEQ ID NO: 22255 - DNA, 4157 bp, Homo sapiens
  misc_feature 1, 2, 3, 4, 5, 4157: n = A,T,C or G
nnnnncccggccgggggggcaagatggcggcggcagtaggggttcgtggccggtacgagctgccgccttgctccggcccaggctggctcctcagcctttccgccttgctgagtgtggcggcacgaggggccttcgccaccacgcactgggtcgtcacggaggacgggaaaatccagcagcaggtggattcaccaatgaacttgaagcatcctcatgacctagtcatattaatgagacaagaagcaacagttaactacctcaaagaattagagaaacaattagttgctcaaaaaattcacatagaagagaatgaggacagagacacaggactggaacagagacataataaagaagacccagactgcatcaaagccaaggtgcccttaggggacctggatctatatgatggcacatacataactttggagagcaaagacatcagtcctgaagattatatagacacagaatctcctgtccctccagacccagagcaacctgattgtactaaaattctagaacttccatatagtatacatgcttttcagcacttgagaggtgtacaggagagagttaatctttctgcacctctgctacctaaagaagacccaatcttcacatatttatctaaacggttaggaaggagtatagatgacataggtcacctcattcatgaaggcctacagaagaacacttcctcgtgggtactgtataacatggcttcattttactggagaattaagaatgagccatatcaggtagtagaatgtgccatgcgagcacttcacttctcttccaggcacaataaagacattgccctggtcaacctggcaaacgttctacacagagcacacttctctgctgatgctgctgtcgtggtccatgcagctctggatgacagtgacttcttcaccagctattacactttggggaatatatatgcaatgcttggggaatataaccactcagtgctctgttatgaccacgctttgcaggccagacctgggtttgagcaagctataaagaggaagcatgctgtcctatgtcagcaaaaactggagcagaaattggaggctcagcatagatctctccagcgaacactgaatgagttaaaagagtatcaaaagcagcatgaccactacctgagacagcaggaaatcctagaaaaacataaactgattcaggaggagcaaatcttaagaaatatcattcatgagactcagatggcaaaagaggcacaattaggaaatcatcagatatgccgactggtcaaccagcagcatagtttacattgccagtgggaccagcctgtacgctatcatcgtggagatatctttgaaaatgtggactatgttcagtttggtgaggattcatcaacctccagtatgatgtctgtgaactttgatgttcaatcaaatcagagtgatatcaatgattcggtcaagtcttctcccgtagcccattctattctctggatttggggcagggactctgatgcatatagggacaaacagcatattctatggcctaaaagagcagattgtacagaaagctaccctagagtccctgttggtggggaattgccaacgtattttctgcctccggaaaacaaaggactcaggatccacgaactcagcagtgatgattattctacagaagaagaggcccaaacccctgactgttccataactgacttcagaaaaagccacactctgtcctacttagtcaaagaattagaggttcgcatggatctgaaagccaaaatgccagatgaccatgcacgaaaaattttgctttcccgtattaataactatactatcccagaagaagaaattgggtctttcttatttcatgctattaataagccaaatgctcctatctggctcatactcaatgaagctggactatactggagagcagtaggaaatagcacttttgctattgcctgtcttcagagggctttgaatttagctccacttcaataccaagatgttcctcttgtcaacttggccaaccttttgattcattacggccttcatcttgatgccactaagctgctacttcaagctttggccatcaatagctctgagcctctgacctttttgagcctgggaaatgcttaccttgctctgaagaatatcagtggggcacttgaggcctttagacaggccttgaaattaaccaccaaatgtccagagtgtgaaaacagcctgaagttgatccgctgtatgcagttttatccttttctgtacaacatcacttcttctgtttgcagtggtaattgtcatgagaaaaccctggacaacagccatgacaaacagaaatattttgacaactcacagtcactggatgctgctgaagaagagccctctgagagaggaacagaggaggaccctgtattctctgttgagaattcagggagggactcagatgcccttagacttgaaagtacggtggttgaggagagcaatggttctgatgagatggagaattcagatgaaaccaaaatgtcagaagaaatactggctttggtggatgaatttcaacaggcatggcctttggaaggctttgggggtgcactagagatgaaagggcggcgtctagacttacaaggaatacgggtgctgaagaaaggtccccaggatggagtggccagaagctcttgctatggagactgcagaagtgaagatgatgaagcaacagaatggattacattccaggtcaaacgtgtaaagaaacccaaaggagatcataagaaaactcctgggaaaaaagtagaaacaggtcagatagaaaatggacatcgttaccaagcaaacctagagatcactggccccaaggtggcatctcctgggccacaagggctactagactggaagaccaggaaagtgccatagacataatgtaactggatttcagcaaggcatttaacagagcctcttatgatatccttgtgaaccagatggagagatgtgggcttgaagccttcccattgcctacaggataaaattcaaacttcctagtgtggtgtacaagaccctttacagcccgcctctgtgtacccttcaacaccattctctgaaccaaccatgctcatgtttttacctcagtgcctttgcacatgctattccctctgcctggaatgccctgtgccccctctgccctctgccgtgctaaaatatcactcatccttaaacttcaaaatcaagtgccatctcttccttgttaccttcaggcagaattagttactctttcctctgtgcaattgttctatatcttcgctctagctcttttcctgttgtattgtaatgatttgtttatgtttaccttccttactagactgtgagctcaagagcaggccgtcttaattattcctttctgtacccctagtgtcttttatggttctcagccccttataacaggtgctcaataaatatttttcaaatgaaattattaaatgtaaaagaaaattaagattttttgtgaaaattatggcttatttaagttattaatttaaacagagttaatttgaaactcttccaaaactgttcctttctgttttgttaaaatctcaatctaaacccctgcctgtacctcaaacagttttctactgttcgtaaattcctataatataaaaagcgctatacagaactaaagttctccttcctgcctattccattataactccttcagaaaacccttcccagacaagacagttctgctcttttcttggggatttgatgtaagtaaagggcccacacccaaaaggtggtacttacgaaggatattaataaacagagctttaaatttttttgtagctttaaatagcttgttgattgggaacatacacgttagagtcaaacagactcctagctctgccagttgctagccaggtgacctggacaagtcacttagtctctctgagtctctgttttctcatctgagaaatgagggttaaaacctacttcaggccagatgcagtggctcacatctgtaatcccagcactttgggaggccagggtgggaggatcacttgagtccaggaggttaaggctccagaaagctagtatcatgccacggcactctagcctgggcaagaaagcaaggtgctgtctctaacttaaaaaaagaaaaatggaaaaaacttaaccacatgaggn

SEQ ID NO: 22256 - DNA, 3325 bp, Homo sapiens
  misc_feature 3319, 3320, 3321, 3322, 3323, 3324, 3325: n = A,T,C or G
tcgacccacgcgtccggcaccgggcgccgccaaggtagctgtaactgccaccgcgatgccgaaggcgcccaagcagcagccgccggagcccgagtggatcggggacggagagagcacgagcccatcagacaaagtggtgaagaaagggaagaaggacaagaagatcaaaaaaacgttctttgaagagctggcagtagaagataaacaggctggggaagaagagaaagtgctcaaggagaaggagcagcagcagcagcaacagcaacagcagcagcaaaaaaaaaagcgagatacccgaaaaggcaggcggaagaaggatgtggatgatgatggagaagagaaagagctcatggagcgtcttaagaagctctcagtgccaaccagtgatgaggaggatgaagtacccgccccaaaaccccgcggagggaagaaaaccaagggtggtaatgtttttgcagccctgattcaggatcagagtgaggaagaggaggaggaagaaaaacatcctcctaagcctgccaagccggagaagaatcggatcaataaggccgtatctgaggaacagcagcctgcactcaagggcaaaaagggaaaggaagagaagtcaaaagggaaggctaagcctcaaaataaattcgctgctctggacaatgaagaggaggataaagaagaagaaattataaaggaaaaggagcctcccaaacaagggaaggagaaggccaagaaggcagagcagggttcagaggaagaaggagaaggggaagaagaggaggaggaaggaggagagtctaaggcagatgatccctatgctcatcttagcaaaaaggagaagaaaaagctgaaaaaacagatggagtatgagcgccaagtggcttcattaaaagcagccaatgcagctgaaaatgacttctccgtgtcccaggcggagatgtcctcccgccaagccatgttagaaaatgcatctgacatcaagctggagaagttcagcatctccgctcatggcaaggagctgttcgtcaatgcagacctgtacattgtagccggccgccgctacgggctggtaggacccaatggcaagggcaagaccacactcctcaagcacattgccaaccgagccctgagcatccctcccaacattgatgtgttgctgtgtgagcaggaggtggtagcagatgagacaccagcagtccaggctgttcttcgagctgacaccaagcgattgaagctgctggaagaggagcggcggcttcagggacagctggaacaaggggatgacacagctgctgagaggctagagaaggtgtatgaggaattgcgggccactggggcggcagctgcagaggccaaagcacggcggatcctggctggcctgggctttgaccctgaaatgcagaatcgacccacacagaagttctcagggggctggcgcatgcgtgtctccctggccagggcactgttcatggagcccacactgctgatgctggatgagcccaccaaccacctggacctcaacgctgtcatctggcttaataactacctccagggctggcggaagaccttgctgatcgtctcccatgaccagggcttcttggatgatgtctgcactgatatcatccacctcgatgcccagcggctccactactataggggcaattacatgaccttcaaaaagatgtaccagcagaagcagaaagaactgctgaaacagtatgagaagcaagagaaaaagctgaaggagctgaaggcaggcgggaagtccaccaagcaggcggaaaaacaaacgaaggaagccctgactcggaagcagcagaaatgccgacggaaaaaccaagatgaggaatcccaggaggcccctgagctcctgaagcgccctaaggagtacactgtgcgcttcacttttccagaccccccaccactcagccctccagtgctgggtctgcatggtgtgacattcggctaccagggacagaaaccactctttaagaacttggattttggcatcgacatggattcaaggatttgcattgtgggccctaatggtgtggggaagagtacgctactcctgctgctgactggcaagctgacaccgacccatggggaaatgagaaagaaccaccggctgaaaattggcttcttcaaccagcagtatgcagagcagctgcgcatggaggagacgcccactgagtacctgcagcggggcttcaacctgccctaccaggatgcccgcaagtgcctgggccgcttcggcctggagagtcacgcccacaccatccagatctgcaaactctctggtggtcagaaggcgcgagttgtgtttgctgagctggcctgtcgggaacctgatgtcctcatcttggacgagccaaccaataacctggacatagagtctattgatgctctaggggaggccatcaatgaatacaagggtgctgtgatcgttgtcagccatgatgcccgactcatcacagaaaccaattgccagctgtgggtggtggaggagcagagtgttagccaaatcgatggtgactttgaagactacaagcgggaggtgttggaggccctgggtgaagtcatggtcagccggccccgagagtgaagctttccttcccagaagtctcccgagagacatatttgtgtggcctagaagtcctctgtggtctcccctcctctgaagactgcctctggcctgcagctgacctggcaaccattcaggcacatgaaggtggagtgtgaccttgatgtgaccgggatcccactctgattgcatccatttctctgaaagacttgtttgttctgcttctcttcatataactgagctggccttatccttggcatccccctaaacaaacaagaggtgaccaccttattgtgaggttccatccagccaagtttatgtggcctattgtctcaggactctcatcactcagaagcctgcctctgatttaccctacagcttcaggcccagctgccccccagtctttgggtggtgctgttcttttctggtggatttaatgctgactcactggtacaaacagctgttgaagctcagagctggaggtgagcttctgaggcctttgccattatccagcccaagatttggtgcctgcagcctcttgtctggttgaggacttggggcaggaaaggaatgctgctgaacttgaatttccctttacaaggggaagaaataaaggaaaggagttgctgccgactgataagggtggcgatcgatggactgaaggtcccagttctcagtcttgatttgctttattcagttttctagcagcttttaatagtcccctcttccccactaaatggatcnnnnnnn

SEQ ID NO: 22257 - DNA, 4467 bp, Homo sapiens
  misc_feature 1, 2, 3, 4, 20, 26, 4459, 4460, 4461, 4462, 4463, 4464, 4465,4466, 4467: n = A,T,C or G
nnnncgcggccgcgtcgacnggctgngagaagacgacagaaggggggtgacagagcgagattctatcctaaaaaaaaaaaaaaaaaaaaaaaaaaaaaagcggccgcctgcatacgcggccgcgtcgacacggctgcgagaagacgacagaagggggctctaagctgcagcaagagaaactgtgtgtgaggggaagaggcctgtttcgctgtcgggtctctagttcttgcacgctctttaagagtctgcactggaggaactcctgccattaccagctcccttcttgcagaagggagggggaaacatacatttattcatgccagtctgttgcatgcaggctttttggcttcctaccttgcaacaaaataattgcaccaactccttagtgccgattccgcccacagagagtcctggagccacagtcttttttgctttgcattgtaggagagggactaagtgctagagactatgtcgctttcctgagctaccgagagcgctcgtgaactggaatcaactgcttcagggaaaaagaaaaaaaaaaaaaaaagacttgcctgggaggccgcgagaaacttgcattggaagcttcagcaaccagcattcgagaaactcctctctactttagcacggtctccagactcagccgagagacagcaaactgcagcgcggtgagagagcgagagagagggagagagagactctccagcctgggaactataactcctctgcgagaggcggagaactccttccccaaatcttttggggacttttctctctttacccacctccgcccctgcgaggagttgaggggccagttcggccgccgcgcgcgtcttcccgttcggcgtgtgcttggcccggggaaccgggagggcccggcgatcgcgcggcggccgccgcgagggtgtgagcgcgcgtgggcgcccgccgagccgaggccatggtgcagcaaaccaacaatgccgagaacacggaagcgctgctggccggcgagagctcggactcgggcgccggcctcgagctgggaatcgcctcctcccccacgcccggctccaccgcctccacgggcggcaaggccgacgacccgagctggtgcaagaccccgagtgggcacatcaagcgacccatgaacgccttcatggtgtggtcgcagatcgagcggcgcaagatcatggagcagtcgcccgacatgcacaacgccgagatctccaagcggctgggcaaacgctggaagctgctcaaagacagcgacaagatccctttcattcgagaggcggagcggctgcgcctcaagcacatggctgactaccccgactacaagtaccggcccaggaagaaggtgaagtccggcaacgccaactccagctcctcggccgccgcctcctccaagccgggggagaagggagacaaggtcggtggcagtggcgggggcggccatgggggcggcggcggcggcgggagcagcaacgcggggggaggaggcggcggtgcgagtggcggcggcgccaactccaaaccggcgcagaaaaagagctgcggctccaaagtggcgggcggcgcgggcggtggggttagcaaaccgcacgccaagctcatcctggcaggcggcggcggcggcgggaaagcagcggctgccgccgccgcctccttcgccgccgaacaggcgggggccgccgccctgctgcccctgggcgccgccgccgaccaccactcgctgtacaaggcgcggactcccagcgcctcggcctccgcctcctcggcagcctcggcctccgcagcgctcgcggccccgggcaagcacctggcggagaagaaggtgaagcgcgtctacctgttcggcggcctgggcacgtcgtcgtcgcccgtgggcggcgtgggcgcgggagccgaccccagcgaccccctgggcctgtacgaggaggagggcgcgggctgctcgcccgacgcgcccagcctgagcggccgcagcagcgccgcctcgtcccccgccgccggccgctcgcccgccgaccaccgcggctacgccagcctgcgcgccgcctcgcccgccccgtccagcgcgccctcgcacgcgtcctcctcggcctcgtcccactcctcctcttcctcctcctcgggctcctcgtcctccgacgacgagttcgaagacgacctgctcgacctgaaccccagctcaaactttgagagcatgtccctgggcagcttcagttcgtcgtcggcgctcgaccgggacctggattttaacttcgagcccggctccggctcgcacttcgagttcccggactactgcacgcccgaggtgagcgagatgatctcgggagactggctcgagtccagcatctccaacctggttttcacctactgaagggcgcgcaggcagggagaagggccggggggggtaggagaggagaaaaaaaaagtgaaaaaaagaaacgaaaaggacagacgaagagtttaaagagaaaagggaaaaaagaaagaaaaagtaagcagggctggcttcgcccgcgttctcgtcgtcggatcaaggagcgcggcggcgttttggacccgcgctcccatcccccaccttcccgggccggggacccactctgcccagccggagggacgcggaggaggaagagggtagacaggggcgacctgtgattgttgttattgatgttgttgttgatggcaaaaaaaaaaaagcgacttcgagtttgctcccctttgcttgaagagaccccctcccccttccaacgagcttccggacttgtctgcacccccagcaagaaggcgagttagttttctagagacttgaaggagtctcccccttcctgcatcaccaccttggttttgttttattttgcttcttggtcaagaaaggaggggagaacccagcgcacccctccccccctttttttaaacgcgtgatgaagacagaaggctccggggtgacgaatttggccgatggcagatgttttgggggaacgccgggactgagagactccacgcaggcgaattcccgtttggggcttttttttcctccctcttttccccttgccccctctgcagccggaggaggagatgttgaggggaggaggccagccagtgtgaccggcgctaggaaatgacccgagaaccccgttggaagcgcagcagcgggagctaggggcgggggcggaggaggacacgaactggaagggggttcacggtcaaactgaaatggatttgcacgttggggagctggcggcggcggctgctgggcctccgccttcttttctacgtgaaatcagtgaggtgagacttcccagaccccggaggcgtggaggagaggagactgtttgatgtggtacaggggcagtcagtggagggcgagtggtttcggaaaaaaaaaaagaaaaaaagaaaaaaaatgaaaaaaaaaagatttttttcttctcttaatcggaatcgtgatggtgttggattatttcaatggtggggttaatatagcatgttatcctgtctatcttttaaagatttctgtataagactgttgagcagtttttaaaatagtgtaggataatataaaaagcagatagatggcgctatgtttgattcctacaacgaaattatcaccagctttttttcattcttaactctttaaaggattcaaacgcaactcaaatctgtgctggactttaaaaaaacaattcaggaccaaattttttctcagtgtgtgtgtttattccttataggtgtaaatgagaagacgtgtttttttccttcaccgatgctccatcctcgtatttctttttccttgtaaatgtaatcagatgccattttatatgtggacgtatttatactggccaaacatattttttcttttgtccctttttttctttcctttctttttacttcctttatttctttattccttccttttcctttttttcttttttttttctttttttttttttttttggtagttgttgttacccacgccattttacgtctccttcactgaagggctagagttttaacttttaattttttatatttaaatgtagacttttgacacttttaaaaaacaaaaaaagacaagagagatgaacccgttggattatttcctcagggtattttggtaacacaatatataaggggggtgtaatcggggtaactcgctgttggattccggatttcataacagcgcggggggttaatatctcacaccgctttagaaaatcgagcccctaattttctccatggtgtaacccttcattctgcggggttcttcaaggttgacagatatcccttaactggcaccaaggttttacccttcgggccccgttttgtttaaaggcgcgggggacattgaggcaacaaaggttgcgttttaggaacaccacaggcttttcggaaatatggcgctgtccagagggttaaattgtgcgatcagccaaaggggtgtggcttaatgtgaacccacttttggccnnnnnnnnn

SEQ ID NO: 22258 - DNA, 4040 bp, Homo sapiens
  misc_feature 4012, 4013, 4014, 4015, 4016, 4017, 4018, 4019, 4020, 4021,4022, 4023, 4024, 4025, 4026, 4027, 4028, 4029, 4030, 4031,4032, 4033, 4034, 4035, 4036, 4037, 4038, 4039, 4040: n = A,T,C or G
tccgggtcaggtggttgggtgacgccccgggaaagcgctccaggccgagggcgggcggcgccgccgcgcccgacgcctctgggggtggggacttcgcgggagtcgccggcggaggcgaggaggagctctgcgcggcgcggcgggcgatccgagccgggacgggctgcaggcgggggtgctgcagaggacacgaggcggcgggctggagacatggaccgcggcgagcaaggtctgctgagaacagacccagtccctgaggaaggagaagatgttgctgccacgatcagtgccacagagaccctctcggaagaggagcaggaagagctaagaagagaacttgcaaaggtagaagaagaaatccagactctgtctcaagtgttagcagcaaaagagaagcatctagcagagatcaagcggaaacttggaatcaattctctacaggaactaaaacagaacattgccaaagggtggcaagacgtgacagcaacatctgcttacaagaagacatctgaaaccttatcccaggctggacagaaggcctcagctgctttttcgtctgttggctcagtcatcaccaaaaagctggaagatgtaaaaaactccccaacttttaaatcatttgaagaaaaggtcgaaaacttaaagtctaaagtagggggaaccaagcctgctggtggtgattttggagaagtcttgaattcggctgcaaatgctagtgccaccaccacggagcctcttccagaaaagacacaggagagcctgtgagattcctacctttgttctgctacccactgccagatgctgcaagcgaggtccaagcacatcttgtcaacatgcattgccatgaatttctaccagatgtgcttttatttagctttacatattcctttgaccaaatagtttgtgggttaaacaaaatgaaaatatcttcacctctattcttgggaaacaccctttagtgtacatttatgttcctttatttaggaaacaccattataaaaacacttatagtaaatggggacattcactataatgatctaagaagctacagattgtcatagttgttttcctgctttacaaaattgctccagatctggaatgccagtttgacctttgtcttctataatatttcctttttttcccctctttgaatctctgtatatttgattcttaactaaaattgttctcttaaatattctgaatcctggtaattaaaagtttgggtgtattttctttacctccaaggaaagaactactagctacaaaaaatattttggaataagcattgttttggtataaggtacatattttggttgaagacaccagactgaagtaaacagctgtgcatccaatttattatagttttgtaagtaacaatatgtaatcaaacttctaggtgacttgagagtggaacctcctatatcattatttagcaccgtttgtgacagtaaccatttcagtgtattgtttattataccacttatatcaacttatttttcaccaggttaaaattttaatttctacaaaataacattctgaatcaagcacactgtatgttcagtaggttgaactatgaacactgtcatcaatgttcagttcaaaagcctgaaagtttagatctagaagctggtaaaaatgacaatatcaatcacattaggggaaccattgttgtcttcacttaatccatttagcactatttaaaataagcacaccaagttatatgactaatataacttgaaaattttttatactgaggggttggtgataactcttgaggatgtaatgcattaataaaaatcaactcatcattttctacttgttttcaatgtgttggaaactgtaaaatgatactgtagaacctgtctcctactttgaaaactgaatgtcagggctgagtgaatcaaagtgtctagacatatttgcatagaggccaaggtattctattctaataactgcttactcaacactaccaccttttccttatactgtatatgattatggcctacaatgttgtatttgttatttattaaattgtgattgttttattattgtttatgccaaatgttaactgccaagcttggagtgacctaaagcattttttaaaagcatggctagatttacttcagtataaattatcttatgaaaaccaaattttaaaagccacaggtgttgattgttataaaataacatgctgccattcttgattgctagagtttttgttagtactttggatgcaattaaaactatgtgctatcacatgtgaaaagcttaataaattccatctatcagtagtataggtctcaatatttattatgagaccagtggtctggaaacagcttgttgtaccgaatcaactggagtctatgcttaaaaaaaaaaaattttttttttaaccatccttaaattattgcttaatggtatcatattaacatattctaaataagggctttaaggcacaggctgttgaagcattttctcagaggagtggatctgtagaagtctgtctttctatagaaatattgtgcttactcaagtgttaaattattttttctatgaactagtctacttcttaaaattcaaacatattcttttgatcacattgtttcttgagcatcctgccctgctactaacttttcaacaaggcaaaatggagtaaagtggcaatttctttagatgagtgaaataccctcaagtctcttttctgcccaaaaagggaaaagtgatagaaatgggggtggcaagtggggtgagtggatgaaggtgggtattgggggtggctgtgaaagaaaataatggagaatcacttttctagacatctacctatacttaatctaagaaacaaagtaatctactgtaaagtactctgccccttgaaagaagtattaaaaagagtgaggatggatttagaaaaaaacatgaatttagaaatattcaaaatggtttttgtggcagattcaatattatgaattcacagatatttaaagaatgagaaacatagtaattagtagaaatgccagaaacagttcctggttcctcttgtgtttgacactaagaaaatagcaagagtgtgaaatctcagatacttatgaaatctcacagatgtaaggactcaagtgtagaagaaaatatccccttcttacaaaaagaaatgtcaatttatggagtttgtgggaaatagggcaagaattcttatgcttatgagagccaagtagtcagtggaagagagtagagctcaaaactggattatcaccttagcaacttagaatagtttgaaatagaaaaaaagtatttaatttggatctggatctgttaagatatgcacagtctattttttgtatagtattggaaaataaaaatgctataatttgggtatgggttcttttgtatacattacctgcccattgaggaaaggggcaagtccattatgcaacttctctccaaacccttcatattctggatatgatacttaaagagccatgagcagctacattctgcctatcagaaggcatttattaaatgactgcttgctgaagatgtgtccaaagagatcctacattaaggtcatttgtcagaatgatgtttgtgtttgtttagagttggctgacctccaactcctggggtcaaggaatcctactgccttagcttcccaaatagctaggactataggcatgcacccggccatgtgttttatttatagctcttaaagcccagatgaagaaatcacatttttgcccatagtgaagaaacatttggccattgattagtccttattttcagtgactgtcctgttttcattagattagagagaccctgtgtgggccacagttaatataaaccattatcacttttaagtaaacctgcacatcttagatttcataatttccttattgttctgactcaaaatgaactaagagcttttcactttttgtttgtaagttctcagagagtcgggtctgcaagtgcttttgcctgccaggattttgtactcaaataaatgctatttggcaactannnnnnnnnnnnnnnnnnnnnnnnnnnnn

SEQ ID NO: 22259 - DNA, 3389 bp, Homo sapiens
  misc_feature 1, 2, 3, 4, 5, 3389: n = A,T,C or G
nnnnnccgagagggcgggccagggccgcactccggagactcgcggttgctacgcgcaccatggctggagacggagtttcgctcttgatgcccagcaggctggagtgcgatggcgcgctcgcggttgcctcccgcaccatggctggagaggtacttctcagccctctagctccaactgagaacccagccagtcaggaagtcgctacttcgggaacaccaaccagtcgcggggccgtgtctgttcccaggagtccttcggcggctgttgtgtcagtggcctgatcgcgatggggacaaaggcgcaagtcgagaggaaactgttgtgcctcttcatattggcgatcctgttgtgctccctggcattgggcagtgttacagtgcactcttctgaacctgaagtcagaattcctgagaataatcctgtgaagttgtcctgtgcctactcgggcttttcttctccccgtgtggagtggaagtttgaccaaggagacaccaccagactcgtttgctataataacaagatcacagcttcctatgaggaccgggtgaccttcttgccaactggtatcaccttcaagtccgtgacacgggaagacactgggacatacacttgtatggtctctgaggaaggcggcaacagctatggggaggtcaaggtcaagctcatcgtgcttgtgcctccatccaagcctacagttaacatcccctcctctgccaccattgggaaccgggcagtgctgacatgctcagaacaagatggttccccaccttctgaatacacctggttcaaagatgggatagtgatgcctacgaatcccaaaagcacccgtgccttcagcaactcttcctatgtcctgaatcccacaacaggagagctggtctttgatcccctgtcagcctctgatactggagaatacagctgtgaggcacggaatgggtatgggacacccatgacttcaaatgctgtgcgcatggaagctgtggagcggaatgtgggggtcatcgtggcagccgtccttgtaaccctgattctcctgggaatcttggtttttggcatctggtttgcctatagccgaggccactttgacagaacaaagaaagggacttcgagtaagaaggtgatttacagccagcctagtgcccgaagtgaaggagaattcaaacagacctcgtcattcctggtgtgagcctggtcggctcaccgcctatcatctgcatttgccttactcaggtgctaccggactctggcccctgatgtctgtagtttcacaggatgccttatttgtcttctacaccccacagggccccctacttcttcggatgtgtttttaataatgtcagctatgtgccccatcctccttcatgccctccctccctttcctaccactgctgagtggcctggaacttgtttaaagtgtttattccccatttctttgagggatcaggaaggaatcctgggtatgccattgacttcccttctaagtagacagcaaaaatggcgggggtcgcaggaatctgcactcaactgcccacctggctggcagggatctttgaataggtatcttgagcttggttctgggctctttccttgtgtactgacgaccagggccagctgttctagagcgggaattagaggctagagcggctgaaatggttgtttggtgatgacactggggtccttccatctctggggcccactctcttctgtcttcccatgggaagtgccactgggatccctctgccctgtcctcctgaatacaagctgactgacattgactgtgtctgtggaaaatgggagctcttgttgtggagagcatagtaaattttcagagaacttgaagccaaaaggatttaaaaccgctgctctaaagaaaagaaaactggaggctgggcgcagtggctcacgcctataatcccagaggctgaggcaggcggatcacctgaggtcaggagttcaagatcagcctgaccaacatggagaaaccctactaaaaatacaaagttagccaggcatggtggtgcatgcctgtaatcccagctgctcaggagcctggcaacaagagcaaaactccagctcaaaaaaaaaaagaaagaaaagaaagctggagctggtggcttaggccatcacccttcccttggctggaactactggacagacccttttgagatgtgcctgtggtgctgtggagatgtgtgtagtggtcttagctctttgttgagcttgtgtgtgtgttgtgtagtcttagctgtatgctgaaattgggcgtgtgttggagggcttcttagctctttggtgagattgtatttctatgtgtttgtatcagctgaatgttgctggaaataaaaccttggtttgtcaaggctcttttttgtgggaagtaagtaggggaaaaggtctttgagggttcctaggctcctttgtacaacaggaaaatgcctcaaagccttgcttcccagcaacctggggctggttcccagtgcctggtcctgccccttcctggttcttatctcaaggcagagcttctgaatttcaggccttcattccagagccctcttgtggccaggccttcctttgctggaggaaggtacacagggtgaagctgatgctgtacttgggggatctccttggcctgttccaccaagtgagagaaggtacttactcttgtacctcctgttcagccaggtgcattaacagacctccctacagctgtaggaactactgtcccagagctgaggcaaggggatttctcaggtcatttggagaacaagtgctttagtagtagtttaaagtagtaactgctactgtatttagtggggtggaattcagaagaaatttgaagaccagatcatgggtggtctgcatgtgaatgaacaggaatgagccggacagcctggctgtcattgctttcttcctccccatttggacccttctctgcccttacatttttgtttctccatctaccaccatccaccagtctatttattaacttagcaagaggacaagtaaagggccctcttggcttgattttgcttctttctttctgtggaggatatactaagtgcgactttgccctatcctatttggaaatccctaacagaattgagttttctattaaggatccaaaaagaaaaacaaaatgctaatgaagccatcagtcaagggtcacatgccaataaacaataaattttccagaagaaatgaaatccaactagacaaataaagtagagcttatgaaatggttcagtaaaaaaaaaaaaaaaaaaaaaaaaaaaaaagcacggcactaaagaaggagtctccgatcggcacacaggttgaagtgcaggcgatgctcttggcacctggaacctccgctccgggtcagcagccctggcacgattctagtcggn

SEQ ID NO: 22260 - DNA, 2598 bp, Homo sapiens
  misc_feature 2595, 2596, 2597, 2598: n = A,T,C or G
ctatagggagtcgacccacgcgtccgcgctaggcgcctggttctgcgcgtactggctgtacggagcaggagcaagaggtcgccgccagcctccgccgccgagcctcgttcgtgtccccgcccctcgctcctgcagctactgctcagaaacgctggggcgcccaccctggcagactaacgaagcagctcccttcccaccccaactgcaggtctaattttggacgctttgcctgccatttcttccaggttgagggagccgcagaggcggaggctcgcgtattcctgcagtcagcacccacgtcgcccccggacgctcggtgctcaggcccttcgcgagcggggctctccgtctgcggtcccttgtgaaggctctgggcggctgcagaggccggccgtccggtttggctcacctctcccaggaaacttcacactggagagccaaaaggagtggaagagcctgtcttggagattttcctggggaaatcctgaggtcattcattatgaagtgtaccgcgcgggagtggctcagagtaaccacagtgctgttcatggctagagcaattccagccatggtggttcccaatgccactttattggagaaacttttggaaaaatacatggatgaggatggtgagtggtggatagccaaacaacgagggaaaagggccatcacagacaatgacatgcagagtattttggaccttcataataaattacgaagtcaggtgtatccaacagcctctaatatggagtatatgacatgggatgtagagctggaaagatctgcagaatcctgggctgaaagttgcttgtgggaacatggacctgcaagcttgcttccatcaattggacagaatttgggagcacactggggaagatataggcccccgacgtttcatgtacaatcgtggtatgatgaagtgaaagactttagctacccatatgaacatgaatgcaacccatattgtccattcaggtgttctggccctgtatgtacacattatacacaggtcgtgtgggcaactagtaacagaatcggttgtgccattaatttgtgtcataacatgaacatctgggggcagatatggcccaaagctgtctacctggtgtgcaattactccccaaagggaaactggtggggccatgccccttacaaacatgggcggccctgttctgcttgcccacctagttttggagggggctgtagagaaaatctgtgctacaaagaagggtcagacaggtattatccccctcgagaagaggaaacaaatgaaatagaacgacagcagtcacaagtccatgacacccatgtccggacaagatcagatgatagtagcagaaatgaagtcataagcgcacagcaaatgtcccaaattgtttcttgtgaagtaagattaagagatcagtgcaaaggaacaacctgcaataggtacgaatgtcctgctggctgtttggatagtaaagctaaagttattggcagtgtacattatgaaatgcaatccagcatctgtagagctgcaattcattatggtataatagacaatgatggtggctgggtagatatcactagacaaggaagaaagcattatttcatcaagtccaatagaaatggtattcaaacaattggcaaatatcagtctgctaattccttcacagtctctaaagtaacagttcaggctgtgacttgtgaaacaactgtggaacagctctgtccatttcataagcctgcttcacattgcccaagagtatactgtcctcgtaactgtatgcaagcaaatccacattatgctcgtgtaattggaactcgagtttattctgatctgtccagtatctgcagagcagcagtacatgctggagtggttcgaaatcacggtggttatgttgatgtaatgcctgtggacaaaagaaagacctacattgcttcttttcagaatggaatcttctcagaaagtttacagaatcctccaggaggaaaggcattcagagtgtttgctgttgtgtgaaactgaatacttggaagaggaccataaagactattccaaatgcaatatttctgaattttgtataaaactgtaacattactgtacagagtacatcaactattttcagcccaaaaaggtgccaaatgcatataaatcttgataaacaaagtctataaaataaaacatgggacattagctttgggaaaagtaatgaaaatataatggttttagaaatcctgtgttaaatattgctatattttcttagcagttatttctacagttaattacatagtcatgattgttctacgtttcatatattatatggtgctttgtatatgccactaataaaatgaatctaaacattgaatgtgaatggccctcagaaaatcatctagtgcatttaaaaataatcgactctaaaactgaaagaaaccttatcacattttccccagttcaatgctatgccattaccaactccaaataatctcaatatttcccttaaacggaaagttttggaatagataaaaaaaaatggatggcgcttttaaaatcctcatccagaacggaagtgccgggcgccaaagaacaacgcgggacacaccgcgtcagggccnnnn

SEQ ID NO: 22261 - DNA, 1120 bp, Homo sapiens; identical to SEQ ID NO: 22234
  misc_feature 1, 1119, 1120: n = A,T,C or G

SEQ ID NO: 22262 - DNA, 461 bp, Homo sapiens
acgcgggggttggagaaaactaaacaatttgttataaaacatccttaaaagcatcagaaagttaatacagcaatgaagaattacaggaccaaattaagaatgcaaccaggttgccaagaactgagtgatgtgtccacatcccgggagagagaagccaccagaagctggaagagctaaatcagactgctccctagagcttcagaaggagccagaactgatgactccaagatcttagcccagtgaaactgatctggacttctgaactatgagagattccattcctgttgtttgaagctaccacattattgagaacttgttacagtagcccgaggacactaacacaaatggggctccgggaaaatccagactaaaggtgttgtgttggtttgcaatctccttgcttaactttctgatactagacataaatagattggtgaaaaattttgtgattgaagaaatgt

SEQ ID NO: 22263 - DNA, 600 bp, Homo sapiens
aaagtgctgggattataggagtgagccaccacacccggacccacagtcatatatattactaaagccaaccgacaaaaagaaatattgtaacagtaagacaagattgacaagagcaaacattcacgcaatcaccgttaacagaaaacggcaacaagaaataattaaaatcccacaatcttattttcaagtcagtgaaataaaaaatactcccaactcacccttgaatcaccaacggcaaatactttaggttttctttcttcccaaactgttttggcctcgctgctagggctgtcgccgagcttacacggactccaggtgatgagtttttcttgagtcactgcaaaggcagtttcactaggcttcacttttctttctcgcggttttcggccaggtctctcctgagacactcctatctcccggtcccgacaccagcaccaagcgctcaggtaaacgtcccaagtaagacaaaggcaatctacatcagggcctgctagcggcgtgaaggagggagggactcagagcatcaaagtcagtccacaacgggcggggttcagttaaattgtgtctccagcgatctattagacccgtcctcccccgcgt

SEQ ID NO: 22264 - DNA, 498 bp, Homo sapiens; identical to SEQ ID NO: 21110

SEQ ID NO: 22265 - DNA, 1120 bp, Homo sapiens; identical to SEQ ID NO: 22234
  misc_feature 1, 1119, 1120: n = A,T,C or G

SEQ ID NO: 22266 - DNA, 816 bp, Homo sapiens; identical to SEQ ID NO: 21390

SEQ ID NO: 22267 - DNA, 334 bp, Homo sapiens
acaaagatttcctgtggtaaaccatctagtataaacactcaaataatcacttcaatccttagactatctaattcaagtgccactaaagtatgcctaaaactctcataggaaactgatgactctaccctaaatgtcctgcatgtctccagtttatctgatggagctgaactaatctgagtatattatgaacacaagcaaaaattgtgccatccttcatcaacaaagatacagaaaccataaatatgatgtcagaatttgttgctaatttgccacaggagctgaagttaaccctgtctgagatgcagccagcattaccacagctacaacaacatgt

SEQ ID NO: 22268 - DNA, 1120 bp, Homo sapiens; identical to SEQ ID NO: 22234
  misc_feature 1, 1119, 1120: n = A,T,C or G

SEQ ID NO: 22269 - DNA, 598 bp, Homo sapiens
  misc_feature 1: n = A,T,C or G
nctaaggtgggtatcgtcgtgggacttggaaattgttgttccatgaaatcctgcgcagggtcgctcactaccgccgctgttgccttcggtgatgaggcaaagaaaatggcggaaggaaaagcgagccgcgagagtgaagaggagtctgttagcctgacagtcgaggaaagggaggcgcttggtggcatggacaggtacgcacctccatcacccgcctggttggctggcgatactctccgggaaggcctggacgcagcttgcccacgttgatgacggggtcatcctcagcttggcactcaccaatctgtcgctgtcgctcttggactcgggaaggagcaagtcactggctttctcagaccattaacaagctctgtgtctctctctctacagccgtctcttcgggttcgtgaggcttcatgaagatggcgccagaacgaagaccctactaggcaaggtaaaagcaaccagacgcaaagtctttggtccgcactttgctctaccagggccccgcgttccttaccgcccagccagtatttattttggctctgctccatggccaaggggtcggaaaagtgtttcttgcctttgctgtccccgt

SEQ ID NO: 22270 - DNA, 1120 bp, Homo sapiens; identical to SEQ ID NO: 22234
  misc_feature 1, 1119, 1120: n = A,T,C or G

SEQ ID NO: 22271 - DNA, 1120 bp, Homo sapiens; identical to SEQ ID NO: 22234
  misc_feature 1, 1119, 1120: n = A,T,C or G

SEQ ID NO: 22272 - DNA, 2063 bp, Homo sapiens
tgatctcattctcatgggcacgcagctcctgaagagttttgggcattttttttggcaattccttcagctgattcttggacagataaagtcgttccaacttcaccaaaggtgtaaatgctccaggactaactttgctaattttattgttgacaagaatcaatgcgtgaaggttcttcaggttcttaaagtctccatctttgatttcggttattttgttgttttgcaggtctagcagagttgtgtcagggggaagatcctttggcactttgtccagacccaaatcagaacactggaccactcgaagatggcattgacagcggaaggggcacactgggcctagggagggctcgaagtcgcggtcatcaggaacttctgggcctatcccagaagcctcatcttctagcataaagtcaaataagcctctctgttgaaacggtccagcccaggaaacttgtgcaagcagaaggaggatgatagtggccttcatgatttatctcatgtattttcacaaccagggctggaccgtttcaacagagaggcttatttgactttatgctagaagatgaggcttctgggataggcccagaagttcctgatgaccgcgacttcgagccctccctaggcccagtgtgccccttccgctgtcaatgccatcttcgagtggtccagtgttctgatttgggtctggacaaagtgccaaaggatcttccccctgacacaactctgctagacctgcaaaacaacaaaataaccgaaatcaaagatggagactttaagaacctgaagaaccttcacgcattgattcttgtcaacaataaaattagcaaagttagtcctggagcatttacacctttggtgaagttggaacgactttatctgtccaagaatcagctgaaggaattgccagaaaaaatgcccaaaactcttcaggagctgcgtgcccatgagaatgagatcaccaaagtgcgaaaagttactttcaatggactgaaccagatgattgtcatagaactgggcaccaatccgctgaagagctcaggaattgaaaatggggctttccagggaatgaagaagctctcctacatccgcattgctgataccaatatcaccagcattcctcaaggtcttcctccttcccttacggaattacatcttgatggcaacaaaatcagcagagttgatgcagctagcctgaaaggactgaataatttggctaagttgggattgagtttcaacagcatctctgctgttgacaatggctctctggccaacacgcctcatctgagggagcttcacttggacaacaacaagcttaccagagtacctggtgggctggcagagcataagtacatccaggttgtctaccttcataacaacaatatctctgtagttggatcaagtgacttctgcccacctggacacaacaccaaaaaggcttcttattcgggtgtgagtcttttcagcaacccggtccagtactgggagatacagccatccaccttcagatgtgtctacgtgcgctctgccattcaactcggaaactataagtaattctcaagaaagccctcatttttataacctggcaaaatcttgttaatgtcattgctaaaaaataaataaaagctagatactggaaacctaactgcaatgtggatgttttacccacatgacttattatgcataaagccaaatttccagtttaagtaattgcctacaataaaaagaaattttgcctgccattttcagaatcatcttttgaagctttctgttgatgttaactgagctactagagatattcttatttcactaaatgtaaaatttggagtaaatatatatatgtcaatatttagtaaagcttttcttttttaatttccaggaaaaaataaaaagagtatgagtcttctgtaattcattgagcagttagctcatttgagataaagtcaaatgccaaacactagctctgtattaatccccatcattactggtaaagcctcatttgaatgtgtgaattcaatacaagctatgtaaaatttttactaatgtcattattttgaaaaaataaa

SEQ ID NO: 22273 - DNA, 1120 bp, Homo sapiens; identical to SEQ ID NO: 22234
  misc_feature 1, 1119, 1120: n = A,T,C or G

SEQ ID NO: 22274 - DNA, 1120 bp, Homo sapiens; identical to SEQ ID NO: 22234
  misc_feature 1, 1119, 1120: n = A,T,C or G

SEQ ID NO: 22275 - DNA, 570 bp, Homo sapiens
  misc_feature 1, 2, 3, 459, 479, 480, 564, 570: n = A,T,C or G
nnngccatggttgcttccatctgtggcacctccatttcaacagatgcttcactgttgtcttcttctcttgatagtaaattttaggagactggggccacatcattttgttcatctttgaatactcagtgcttacagcagtgcctggcatacatcaggggctcaaaaatgtccaccgggacttccacttccagccaagatggaggaacgggggtcagatttaccctcacacctcatcctcctgagtagctgggactacaggtgcacgccaccatgctgggctaattcttgtattttttggtagaggcagggtttcactatgttggccaggctggtcttgaactcctgacttcaagtgatccatctgccttggcctcccaaagtgctgggattacaggcatgagcacccgccacctgttctgtagtttaattatgtttctccccctcaggcatttcttggtngtatagagcccacagaatannatcgagtccttgtcaagaagcattcatcttgcgcctctttcgccagaaaaacaaacgtggttttattaaagctttcacagaccnccgcgn

SEQ ID NO: 22276 - DNA, 498 bp, Homo sapiens; identical to SEQ ID NO: 21110

SEQ ID NO: 22277 - DNA, 1120 bp, Homo sapiens; identical to SEQ ID NO: 22234
  misc_feature 1, 1119, 1120: n = A,T,C or G

SEQ ID NO: 22278 - DNA, 1120 bp, Homo sapiens; identical to SEQ ID NO: 22234
  misc_feature 1, 1119, 1120: n = A,T,C or G

SEQ ID NO: 22279 - DNA, 1120 bp, Homo sapiens; identical to SEQ ID NO: 22234
  misc_feature 1, 1119, 1120: n = A,T,C or G

SEQ ID NO: 22280 - DNA, 1120 bp, Homo sapiens; identical to SEQ ID NO: 22234
  misc_feature 1, 1119, 1120: n = A,T,C or G

SEQ ID NO: 22281 - DNA, 1120 bp, Homo sapiens; identical to SEQ ID NO: 22234
  misc_feature 1, 1119, 1120: n = A,T,C or G

SEQ ID NO: 22282 - DNA, 1120 bp, Homo sapiens; identical to SEQ ID NO: 22234
  misc_feature 1, 1119, 1120: n = A,T,C or G

SEQ ID NO: 22283 - DNA, 1120 bp, Homo sapiens; identical to SEQ ID NO: 22234
  misc_feature 1, 1119, 1120: n = A,T,C or G

SEQ ID NO: 22284 - DNA, 1188 bp, Homo sapiens
agccagcataaccacctcacactgagaacatctgacctttcccagaacgaccgcccactcgacacttcctgtccctccccagatcttgttccggggcacctactcgcgtctaatcactcccctcattcactctttagggtccattggctgtttctttgaggaagcggagcatcttctgtcgttgattggtttccgtcattgttgataggttggtaacaaacaaggtgtgcctggtctccctggtaacgtcctgccgatagtcctgattggtcggtgtcttaatcccatcttccgtcccaactgctagtggctgagtccctggcggggcgcggcggtggaaggtgtcgcgtacgggcttcccgagctgacgtggcttgaattgggaggggggcagctggagcctcaggcggcagcgcttctaggtgagtaggggacgctacccaactcttccctctgcgagtccaataacggtcacccccgccagaggggccgcgggagctgcccaagcagctacaccggagtcccctcctcgccccgcctctcccggattcagtcctggatccggcccttcacccgcctccttcacctaccaggcctagttctagtagcccacaagcctcggcctctccggtgggccttcggggtcaccctgcgcagacttggaccacttgctcacggtctgtcccctccccggtacgtttctcctctgggagcgacggggaaaagcgcctaggtcagtcctgtccgcacggccttgttcctggagcggcctgcctaagtcggcctccgtacgcagccgctgacgtcggaaagaacctgctgggcccctgtgctcaggccctaaacaaacttggtgtcccgaaggggaggcgcgaccaaaagaaatcaaaggtctttagggcggagatcacagaatcattggagatattaatgcaaacgggggcctgtccaataatcctgctaatgctaatgggttactggaaagatgagaagagaggaaagatcccaacgatcccgtcaacacgaaaatcccaggaatcagagaaatgctgagccgattatcaggattagcaaatgttgttttgcatgaattatcaggagatgatgacactgatcagaatatgagggctcccctagaccctgaattacaccaagaatctgacatggaatttaataatactacacaag

SEQ ID NO: 22285 - DNA, 1120 bp, Homo sapiens; identical to SEQ ID NO: 22234
  misc_feature 1, 1119, 1120: n = A,T,C or G

SEQ ID NO: 22286 - DNA, 2053 bp, Homo sapiens
  misc_feature 2052, 2053: n = A,T,C or G
tgggaagtgaggtgtgggaacccggcggcggtctgatgaattcagtggcagtgaattgagaccggagggaatctggcccctagaggctggtacttgggcccgaaacccccatctccggcggagagaccgtccgaggtaattgtctgccacgagtgcacattctgaaaacaggagattttagttcctaaaaatgggaagaacctacattgtagaagagactgttggccagtatctttcaaacataaatctccaaggaaaggcttttgtctctggccttttaataggacagtgttcgtcacaaaaggattatgtgattcttgccactagaacgccacccaaagaggagcaaagtgagaacctcaaacatcccaaagctaagttggataacttggatgaagaatgggccacagaacatgcctgccaggtatccagaatgctaccagggggacttttagttcttggagtatttattattactactttagaactggcaaatgattttcaaaatgccctgcgtagactaatgtttgctgtggaaaagtctataaatagaaagagattgtggaatttcacagaggaggaagtctcagaacgagtgacacttcacatttgtgcttctacaaaaaaaatattttgtcgaacttatgatatccatgatccaaagagttcagcaagaccagcagattggaagtatcaaagtggattatcatcctcatggctttctttagagtgtacagttcacattaatattcacatcccactttctgctacttctgtcagctatactctggagaaaaatacaaagaatggacttacacgctgggccaaggaaatagaaaatggtgtttatttgattaatggacaagttaaagatgaagattgtgacctattagaaggacagaaaaaatcttctagaggaaatactcaagcaactagtcattcttttgatgtcagagtgctaacgcagttgctcctgaattcagaccacagatccacagccacagtccagatatgtagcggttctgtaaaccttaagggtgctgtgaaatgcagagcttatatccacagcagtaaacccaaagttaaagatgctgtgcaggcagtaaagagggatatattgaacacagttgctgatcgttgtgaaatgctatttgaggatctgcttttgaatgaaattccagaaaaaaaagattctgaaaaagagttccacgtcctcccttatcgagtctttgttccccttcctggatccactgtaatgttgtgtgattataaatttgacgatgagtcagctgaagaaatcagggaccattttatggagatgttggatcacacaattcaaatagaagatttggaaattgcagaggaaacaaacacagcttgtatgagttcttctatgaatagtcaagcttcattggacaacacagatgatgaacaaccaaaacaaccaattaaaactacaatgttattgaaaattcagcaaaacataggtgtgattgcagcatttacagttgcagtccttgctgcgggtatctcctttcattacttcagtgattagggtgaggcacaaagagtttcttgatcatccagagaacattgacagacaattatgaataataaagatgttaacaatccatctgtatttaaaacactagcagccagatctgctgccatgatgcctatttggtgtgtttctgattaaaatgaaatcacaagctgccttgtttagcctgctttacattgtaggtggcccgcatttccagaaataacgttatgcatctagatggaagctgcatgtaacaaatcattattatctatttttaaaagcttcaaaatgatgggatatgatcatagattttagtcttactaatctgaatcacatattaatcaggacattaaaaactttaacagaggcatgatggctcacacgtataatcctaatgctttgagaggctgaggtaggagcatcacctggggctgggagggagttggagaccagcctggatgacataatgagattctgtctcttctggaaaaaaaaaaaattagctggann

SEQ ID NO: 22287 - DNA, 1214 bp, Homo sapiens; identical to SEQ ID NO: 20119

SEQ ID NO: 22288 - DNA, 2361 bp, Homo sapiens; identical to SEQ ID NO: 20124
  misc_feature 1, 2, 3, 2361: n = A,T,C or G

SEQ ID NO: 22289 - DNA, 939 bp, Homo sapiens
  misc_feature 927, 928, 929, 930, 931, 932, 933, 934, 935, 936, 937, 938,939: n = A,T,C or G
acgcgggatacaggaaatacggtaagagcgaaacaggtggaagccagctctgtgcctggaggggactcgccgccatctcaggtctcttggctttgccagggcccaccggagaaaactgacgacccgtttctgtaatccttatgggagaccaaccttgtgcctccgggagatccactctcccacctggaaacgcacgggaagccaagcctccaaaaaagcgctgcctcctcgctccgcgttgggattatccggaaggaactcccaacggaggtagtaccactctaccctccgcacctcctcctgcatcagccggcctgaagtcgcaccctcctcctccggagaagtagagaaataaatttctcccaccctaaaccagtctttgagtgattgcagtatgactccatttccctggtgcattcatataatagttcacctggtgaaaacaatgaagattatttacaatgctaccctgctttttctggtgtcctgaacctggaagttgtgctttttaagtcttatgatgtaatcagcacgatttcacttcctgaatttcgatgaattctaagacatgggcaagatcgggttgtaagacctctgagatttaaggccatgccctggatcatggtgaacttaccaaagcaaacaatgcctgtgagatggtcctgcagcagccaaccagtgaactcttttggtgacatcctgttcttgttgtataactttatattcctataaatccattaaggccccaataaagtttgtctctaaaaaaaaaaataaatgtttggggctcgccggagaatttcaaacactcctggggcgcgcaccaggaagaaaattcagttccccaacggtctcaaggggtccccaaagcgggcggtgcacaccggttggctcgctagccctcctgcccgccaggcacgggctcgnnnnnnnnnnnnn

SEQ ID NO: 22290 - DNA, 651 bp, Homo sapiens
acgcgggatttcaggtcagccacagcttcccacacccgctctacgatatgagcctcctgaagaatcgattcctcaggccaggtgatgactccggccacgacctcatgctgctccgcctgtcagagcctgccgagctcacggatgctgtgaaggtcatggacctgcccacccaggagccagcactggggaccacctgctacgcctcaggctggggcagcattgaaccagaggagttcttgaccccaaagaaacttcagtgtgtggacctccatgttatttccaatgacgtgtgtgcgcaagttcaccctcagaaggtgaccaagttcatgctgtgtgctggacgctggacagggggcaaaagcacctgctcgggtgattctgggggcccacttgtctgtaatggtgtgcttcaaggtatcacgtcatggggcagtgaaccatgtgccctgcccgaaaggccttccctgtaccattaaccaaatagcgtaactattttatgtccacatttcacttctgtatttacaaacatatcagtaaagagttaacaatgagatgcgatcaaacatccatattatctgttttgtagacagcaatgtagatgattttgtaatcacctttcatcggagtgaccttatataaaaaataagtcaa

SEQ ID NO: 22291 - DNA, 1120 bp, Homo sapiens; identical to SEQ ID NO: 22234
  misc_feature 1, 1119, 1120: n = A,T,C or G

SEQ ID NO: 22292 - DNA, 838 bp, Homo sapiens
aggtacgcggggagctgtccgggctgctttcgcctccgcctgtggatgctgcgcctctccgaacgcaacatgaaggtgctccttgccgccgccctcatcgcggggtccgtcttcttcctgctgctgccgggaccttctgcggccgatgagaagaagaaggggcccaaagtcaccgtcaaggtgtattttgacctacgaattggagatgaagatgtaggccgggtgatctttggtctcttcggaaagactgttccaaaaacagtggataattttgtggccttagctacaggagagaaaggatttggctacatcaccaggggagatggcacaggaggaaagagcatctacggtgagcgcttccccgatgagaacttcaaactgaagcactacggggcctggctgggtgagcatggccaacgcaggcaaagacaccaacggctcccagttcttcatcacgacagtcaagacagcctggctagatggcaagcatgtggtgtttggcaaagttctagagggcatggaggtggtgcggaaggtggagagcaccaagacagacagccgggataaaccccctgaaggatgtgatcatcgcagactgcggcaagatcgaggtggagaagccctttgccatcgccaaggagtagggccagggcatctttctttgagtgaccgtctgtgcaggcctgttagtccgcccaaggcctttaagctgcactggccccgggtgctggcatctggtggaagcggaaccccctccccctcccatttcccagggccatggactcacttttgtaaccaactccctcccaccctgacccaaaaaaaaaaaatggtgggg

SEQ ID NO: 22293 - DNA, 976 bp, Homo sapiens
  misc_feature 1, 2, 3, 4, 5, 6, 7, 8, 9, 10, 11, 12, 963, 964, 965, 966,967, 968, 969, 970, 971, 972, 973, 974, 975, 976: n = A,T,C or G
nnnnnnnnnnnncgagagtcgacgagtatcgaataaggcttgagtatcagaattacctgcaggcccggggagatccactagttgagccgggtagggaaagcagcctaaagcccgggacaggcacacaggcccaggtgtgtaggccacagcagccgcagtcctgaaaggctgcaacacccagacctccaggagagaccaggcccaggatgcctcgcctgttcttgttccacctgctagaattctgtttactactgaaccaattttccagagcagtcgcggccaaatggaaggacgatgttattaaattatgcggccgcgaattagttcgcgcgcagattgccatttgcggcatgagcacctggagcaaaaggtctctgagccaggaagatgctcctcagacacctagaccagtggcagaaattgtaccatccttcatcaacaaagatacagaaactataattatcatgtggaattcatgtgctaatttgccaccggagctgaaggcagccctatctgagaggcaaccatcattaccagagctacagcagtatgtacctgcattaaaggattccaatcttagcttgaagaatttaagaaacttatttcggaattaggcaaagtgaaagccgcagacaggcaaatcctttcagaaattaaaatacttaggcttgggattactcaatttctcaaaaaaaagagacgaaccctacgtggactgtttgagaatgtgcctaatggtgtacaaaacgtctctgtaaatatgtgagatgaagtatgtgcattctgttaatttaagacctagtctgtgaatttactgatgcttgtggtcctatttttaatttgaatctttaggtgatttctgggggggaaatttgtagggtggaagaataggaggtgggtaagaaggggggggggaaaatggaaaaaaaaatggggggatatgggaattatcttttgggaggnnnnnnnnnnnnnn

SEQ ID NO: 22294 - DNA, 747 bp, Homo sapiens; identical to SEQ ID NO: 21614

SEQ ID NO: 22295 - DNA, 573 bp, Homo sapiens
  misc_feature 1, 2, 3, 4, 5, 6, 343, 344, 345, 346, 347, 348, 349, 350,351, 352, 353, 354, 355, 356, 357, 358, 359, 360, 361, 362,363, 364, 365, 366, 573: n = A,T,C or G
nnnnnncatcattgctgaccggccagggtactggccagagcatacgccttcagaatcccagccttcgtcgccttctccgaccccatcaccatccccagaccacacttcccactcacgtaccacctttctccacctctttggtgactccaagtactcacacagtcatcacccctacccatgcacagatggccacttctgcctccatccactcaatgccaacaggcgcgattcctccaccgacaacgctcacggccacaggggtccacccacacaagccccaccaatgacggggaccaccattcggaccaccccaagcccacagctcattcagcatagcccggannnnnnnnnnnnnnnnnnnnnnnngtccagagatttaaatgaaatcttcgaaagaataaatttgcttttcagtccactgtattttcaaaattgattatcaccaagcttggatgaaagctgtgaaccacaaaccatttgtttatttaatagaaaaaagaatgtgtagacccgcgtaccttcataacttcttcaagataccgggttgaacttccatttgcatatgcagtttgn

SEQ ID NO: 22296 - DNA, 2538 bp, Homo sapiens; identical to SEQ ID NO: 20316
  misc_feature 2538: n = A,T,C or G

SEQ ID NO: 22297 - DNA, 1120 bp, Homo sapiens; identical to SEQ ID NO: 22234
  misc_feature 1, 1119, 1120: n = A,T,C or G

SEQ ID NO: 22298 - DNA, 1120 bp, Homo sapiens; identical to SEQ ID NO: 22234
  misc_feature 1, 1119, 1120: n = A,T,C or G

SEQ ID NO: 22299 - DNA, 3254 bp, Homo sapiens
  misc_feature 1: n = A,T,C or G
nacccacgcgtcccaggcccggaaccttccctggtcgtgcgccctatgtaaggccagccgcggcaggaccaaggcggcggtgtcagctcgcgagcctaccctccgcggacggtcttgggtcgcctgctgcctggcttgcctggtcggcggcgggtgccccgcgcgcacgcgcaaagcccgccgcgttccccgaccccaggccgcgctctgtgggcctctgagggcggcatgcgggactacgacgaggtgaccgccttcctgggcgagtgggggcccttccagcgcctcatcttcttcctgctcagcgccagcatcatccccaatggcttcaccggcctgtcctccgtgttcctgatagcgaccccggagcaccgctgccgggtgccggacgccgcgaacctgagcagcgcctggcgcaaccacactgtcccactgcggctgcgggacggccgcgaggtgccccacagctgccgccgctaccggctcgccaccatcgccaacttctcggcgctcgggctggagccggggcgcgacgtggacctggggcagctggagcaggagagctgtctggatggctgggagttcagtcaggacgtctacctgtccaccattgtgaccgagtggaacctggtgtgtgaggacgactggaaggccccactcacaatctccttgttcttcgtgggtgtgctgttgggctccttcatttcagggcagctgtcagacaggtttggccggaagaatgtgctgttcgtgaccatgggcatgcagacaggcttcagcttcctgcagatcttctcgaagaattttgagatgtttgtcgtgctgtttgtccttgtaggcatgggccagatctccaactatgtggcagcatttgtcctggggacagaaattcttggcaagtcagttcgtataatattctctacgttaggagtgtgcatattttatgcatttggctacatggtgctgccactgtttgcttacttcatccgagactggcggatgctgctggtggcgctgacgatgccgggggtgctgtgcgtggcactctggtggttcatccctgagtccccccgatggctcatctctcagggacgatttgaagaggcagaggtgatcatccgcaaggctgccaaagccaatgggattgttgtgccttccactatctttgacccgagtgagttacaagacctaagttccaagaagcaacagtcccacaacattctggatctgcttcgaacctggaatatccggatggtcaccatcatgtccataatgctgtggatgaccatatcagtgggctattttgggctttcgcttgatactcctaacttgcatggggacatctttgtgaactgcttcctttcagcgatggttgaagtcccagcatatgtgttggcctggctgctgctgcaatatttgccccggcgctattccatggccactgccctcttcctgggtggcagtgtccttctcttcatgcagctggtacccccagacttgtattatttggctacagtcctggtgatggtgggcaagtttggagtcacggctgccttttccatggtctacgtgtacacagccgagctgtatcccacagtggtgagaaacatgggtgtgggagtcagctccacagcatcccgcctgggcagcatcctgtctccctacttcgtttaccttggtgcctacgaccgcttcctgccctacattctcatgggaagtctgaccatcctgacagccatcctcaccttgtttctcccagagagcttcggtaccccactcccagacaccattgaccagatgctaagagtcaaaggaatgaaacacagaaaaactccaagtcacacaaggatgttaaaagatggtcaagaaaggcccacaatccttaaaagcacagccttctaacatcgcttccagtaagggagaaactgaagaggaaagactgtcttgccagaaatggccagcttgtgcagactccgagtccttcagtgacaaaggcctttgctgtttgtcctcttgacctgtgtctgacttgctcctggatgggcacccacactcagaggctacatatggccctagagcaccaccttcctctagggacactggggctacctacagacaacttcatctaagtcctaactattacaatgatggactcagcacctccaaagcagttaatttttcactagaaccagtgagatctggaggaatgtgagaagcatatgctaaatgtacattttaattttagactacttgaaaaggcccctaataaggctagaggtctaagtcccccacccctttccccactcccctctagtggtgaactttagaggaaaaggaagtaattgcacaaggagtttgattcttaccttttctcagttacagaggacattaactggatcattgcttccccagggcaggagagcgcagagctagggaaagtgaaaggtaatgaagatggagcagaatgagcagatgcagatcaccagcaaagtgcactgatgtgtgagctcttaagaccactcagcatgacgactgagtagacttgtttacatctgatcaaagcactgggcttgtccaggctcataataaatgctccattgaatctactattcttgttttccactgctgtggaaacctccttgctactatagcgtcttatgtatggtttaaaggaaatttatcaggtgagagagatgagcaacgttgtcttttctctcaaagctgtaatgtgggttttgttttactgtttatttgtttgttgttgtatccttttctccttgttatttgcccttcagaatgcacttgggaaaggctggttccttagcctcctggtttgtgtctttttttttttttttttaaacacagaatcactctggcaattgtctgcagctgccactggtgcaaggccttaccagccctagcctctagcacttctctaagtgccaaaaacagtgtcattgtgtgtgttcctttcttgatacttagtcatgggaggatattacaaaaaagaaatttaaattgtgttcatagtctttcagagtagctcactttagtcctgtaactttattgggtgatattttgtgttcagtgtaattgtcttctctttgctgattatgttaccatggtactcctaaagcatatgcctcacctggttaaaaaagaacaaacatgtttttgtgaaagctactgaagtgccttgggaaatgagaaagttttaataagtaaaatgattttttaaatatcaaaaaaaaaaa

SEQ ID NO: 22300 - DNA, 2361 bp, Homo sapiens; identical to SEQ ID NO: 20124
  misc_feature 1, 2, 3, 2361: n = A,T,C or G

SEQ ID NO: 22301 - DNA, 1380 bp, Homo sapiens; identical to SEQ ID NO: 20118
  misc_feature 1380: n = A,T,C or G

SEQ ID NO: 22302 - DNA, 450 bp, Homo sapiens; identical to SEQ ID NO: 20659
  misc_feature 448, 449, 450: n = A,T,C or G

SEQ ID NO: 22303 - DNA, 2361 bp, Homo sapiens; identical to SEQ ID NO: 20124
  misc_feature 1, 2, 3, 2361: n = A,T,C or G

SEQ ID NO: 22304 - DNA, 2178 bp, Homo sapiens
  misc_feature 1, 2, 2177, 2178: n = A,T,C or G
nnggccaagttgtatgataactactagaccagattctgatcgagatcattgagccctttcctgggtacagattgaacacatatctagtctcatcaaactctccaaggccgacgtggaaaggaaattatcacagatgattcttgacaagaaatttcatgggattttggaccagggggagggtgtcctgattattttcgatgaacccccagtagataaaacttacgaagctgctctggaaacaattcagaacatgagcaaagtagtggattccctctacaacaaagccaagaaactgacataggtgagtgctggcttcaggaccccagggctgggcagctctgtcttctgcgtgtcgagactgaaaacctcctcctggtgtcctcatggcttcctgattgacactgctctgtcttctcttgcagagttggatctgtagcggtcctttggagagtgtgtgtggcgggagagtgaaaccttgggggaaaatgctaggagattcttttttctttttgttctacttttcgctcggaaagtttttaaatcctcatttggtgcatctgtattccagccaataggtgtgccagttttcatgtaatctttactggcccaacttgggagtggggaaattgcttaaaaaaaaagaaaaagaaaaaaaaaaaagattattctaaataaaaggaaaaaggcttacactacctaaagctgtgctctctgcctcctgggagagggccgcaaagccaggcaccccgccaaccactgggggtcctaatccacctgctgggcatcacctctcctcctcctcagaattgggtgtttgctgaccatcaaaagcaatgactttttattctgtttgtactgaaccaaaacaaacaactgtgtatagactgctgttttcttttttatttgaaatgaggcattttggtgttctttcccctaccatacggcctgtctgcccttccctccccacattggctccagcagagtagccgaaggtcctgccgccgccgccaccaccaccaccactgcagcaacaacagcagcagcagcagcagcgcctgcatagctccactctgacctgtgaaggaatggggatgaggccaggagctagtgtctaccacggccacacagggagcagtgtgggcccttagcccccaaggggcctgctatgcatgtggctttttttttttttaaacacagtaaactagattagtcgtcagtgttttaattgcccctcttctcctctcctgcattcctctcctctcttctttcctctctgtcccttctctttcccctctcaaccaggagaccatcatgtctctctgccttcctcctctcccctccaggggagtcaggctgtctgtgaaagccatgagcttctctccctctcccactcctcctctcctactttcagatggatttattccttttttaaacaatgaacatcggaaatgagactgtggggtgtggtttctctctctcttttttttttaattttctttgttgggtttttgagcaacctcatgtccccttcccagggagctttttaatttacctcttagaactcaagtggatgggaagtagagcactatgtgtcagtatgctttgttttctgacacgattacacagcgaggctttaatgccatttgggtaggtgagcttctgcacttctgttgtgctgaactgtattttcttctctcatctcctctttgtctttttctcttttcctctccttcctgccttcttctgctggcctccttttctctttctttaccttccttggattatccttccaggttttcataataaatttatattttgtaaaaggattttgttgtaccaggttttgcatcctcactgaatctgactggcttttattttcctctccaaaatcaggtttttgttctcaacatctttccccatcatgtctagtcactgttttggttttggcaccatcagtatcaaatgtacaaacggttcttgctaaccaacaccaggtatatctgatgttcagatgagttccaataaaaataattttttttttttcaaaaaaaggccaaacaaaaattgttggggcccggccgaaaaagtttaaaacacgtgggcgggcccggggagcgacagggcacgggcaggaccggcgaaagggggtttcccaaaacccgggccggcgtgacccnn

SEQ ID NO: 22305 - DNA, 2593 bp, Homo sapiens
  misc_feature 1, 2582, 2583, 2585, 2586, 2587, 2588, 2589, 2590, 2591,2592, 2593: n = A,T,C or G
naactgccacctggaagatacaggtggaaacccgaaaacagagtattgtatgggagtttgaaaaataccagcgattactagagaaaaagcagccaccacatcggcagctgggggcagaggtagcagcagctctggccagcctacagcgggaggcagcggagaccatgcagaaactggagttgaaccatagcgagctcatccagcagagccaggtcctgtggaggatgattgcagagttgaaagagaggtcgcagaggcctgtccgctggatgttgcaggatattcaggaagtgttaaacaggagcaaatcttggagcttgcagcagccagaaccaatctccctggagttgaagacagattgccgtgtgctggggctaagagagatcctgaagacttatgcagctgatgtgcgcttggatccagatactgcttactcccgtctcatcgtgtctgaggacagaaaacgtgtgcactatggagacaccaaccagaaactgccagacaatcctgagagattttaccgctataatatcgtcctgggaagccagtgcatctcctcaggccggcactactgggaggtggaggtgggagacaggtctgagtggggcctgggagtatgtaagcaaaatgtagaccggaaggaggtggtctacttatccccccactatggattctgggtgataaggctgaggaagggaaatgagtaccgagcaggcaccgatgagtacccaatcctgtccttgccggtccctcctcgccgggtgggaatcttcgtggattatgaggcccatgacatttctttctacaatgtgactgactgtggctcccacatcttcactttcccccgctatcccttccctgggcgcctcctgccctattttagtccttgctacagcattggaaccaacaacactgctcctctggccatctgctccctggatggggaggactaagaaagctaccaccctaaccacagaggcttggaattgggcctggcccccatggggcttggaggaccgagccactgacaggtatcccctgaaactgagctgagcccagtatccaaggattcctctgtctgatcctttggtctttgctaccaggctgaagtctgtcatgaaaccacttattttaaaaagcagaggcccagtcaaatgagcattgcatcccatgagggaagcacgacagggctgatggtgaggatcagagcagttctaaggtgactcgttggggtaaggatcaggactttgtccatgtagtagccaaccaccctcttccctgattcccgtccggtgtcacagttcagtcagtgaggatgatgaagtagatacagtcttcaggacaccattagatgggctttcccaataggccaaaaaaatgctgcgcatacccagagctggttgttgtgctgaggccagtcagaggatgcttcccctgaggtttgctataactaagcaacctttatgtgactctcaccttctgacctcctggcaagagaaattcagtgcagcagggggacacagacctgcccaagccaccccactgccgttccctctctgagcacaagctgggcaaatcactgtcccttggactccagtagaccagtgtcctagtcttgctttttttctctaagtggcaggatcagaaaacctgcgagctttagtttgtattttcactttatgaatgaggaaactgaaatggccttaagggagcaagttatttcttttttttttgacacggagtctcgctctgttgcccaggctggagtgcagtggcacgatctcggctcactgcaggctctgcctcctgggttcacgccattctcctgcctcagcttcccgagtagctgggactacaggcgcccaccacgacgcctggctcatttttttgtatttttagtagagacggggtttcaccatgttagctaggatggtctcgatctcctgacctcatgatccgccctcctcagcctcccacagtgctgggattagaggcatgagccactgcgcccggcccctggagcaagttatttcttacaaagctgctgaaggtaagattatcaaaattataaagcatttttcacactcaagtgaaacaaggttgacaaactcacttcgcaggtcacatgcctatacatcacttattatatttgggtctgaaacttctcacatgtttgggaggttttatgtgtcctcattgggaaaatgggtgtaattcagcataaaacctcatatgattgtcctgcctcatggagctgttgtatagatcccagatccatcccatgatttgttcctgtctgaggcatagaggcaggcaagccgtggattttgcacatggtgactttcccactgtgccatgatacagtctgcatcttatagcagtgcctttgtctcagggcctctgctggcagtctagaccttttgggcagaaaggagcttcaaatggctgtgataaggaatattaaaaattgtgtttctactttaattgtattggctgttcatgtatgtaggagttaaaataggccaaactggagaaataaacgcattctgtccaccatgaaaaaaaaaaaaaaagaaaatgtnngnnnnnnnnn

SEQ ID NO: 22306 - DNA, 1058 bp, Homo sapiens
  misc_feature 1, 1058: n = A,T,C or G
ncgaccacgcgtccgcgcgaggcctcacggagctcgtagtttcccggacgggccgctcccggcctcgcggcctcgcctccccacactacaactcccacggggcagcgggcgcggctccccgtacccaccagctggccgggcagggcagccacttcgcggtcgggcccgccggctgcgggcacccgcgcgacgggcgggaagatggcggacgtggtcgtgggtaaagacaagggcggggagcagcggctcatctcgctgcctctatcccgcatccgggtcatcatgaagagctcccccgaggtgtccagcatcaaccaggaggcgttggtgctcacggccaaggccacggagctctttgttcaatgcctagccacctattcctacagacacggcagtggaaaggaaaagaaagtactgacttacagtgatttagcaaacactgcacagcaatcagaaacttttcagtttcttgcagatatattaccaaagaagattttagctagtaaatacctgaaaatgcttaaagaggaaaagagggaagaagatgaggagaatgacaatgataatgaaagtgaccatgatgaagctgactcctaaaccaaaagtgctttaaaaaccagcctggcgaggacagccctggacccactccactgtctctaagtaaacacagcactgcccgcttttagcgtcttcacttcttcacagagttccagtgcgtggtattctttcgaggtattctttccaggccgagattgagcacctcatgtacctacgccacagacaggcagagggaacgcgaccagaagcagtgctcctcgagaggccagcctgcaggtcaggcacaagaagccgcgatactggcagcataggagaccaaactgcacaggaaggccaattaaccctttcaaataccgctcgacattgaagagcttctcacctatcggaccggtcccacccatactgcaccagggactcacgccaataacccgcgcgaatacgacaaccacacccatcgcgccgaaacatgtcaactagcacactcgccccagaaagtacan

SEQ ID NO: 22307 - DNA, 510 bp, Homo sapiens
  misc_feature 1, 2, 503, 504, 505, 506, 507, 508, 509, 510: n = A,T,C or G
nngtacgcggggaagtcagagcgatgtgctgtgaaatctactaccgtttgctggttttgaaaatggagaaaaagagtgaggaactgagaaacatggatggccttgggaacgtggaaaagggtcactgaaatgggaccgacatggactcaaggaggctatttatgaccatgtcatttgcaacatgaagaaagcttatctggagtgaaagtaaatgagaccaacagagatgagagacccggagaaatcctggttacactgcttgaatcctacacatactaacaaaaggccacatgaggacgcagtgagaagctggaagtctacaacccagaagagagccctcaacagaacctaaccatgctggtactgctacttagtttctaaggctgcacagggaagggaaagactgggctttggacaatctagaggtaatttatatccgcccccaggtggagcaacatgcacttctggaggcaaaagggtaactgaaagagagtacctgcccnnnnnnnn

SEQ ID NO: 22308 - DNA, 1120 bp, Homo sapiens; identical to SEQ ID NO: 22234
  misc_feature 1, 1119, 1120: n = A,T,C or G

SEQ ID NO: 22309 - DNA, 1067 bp, Homo sapiens
  misc_feature 1, 2, 3, 4, 5, 6: n = A,T,C or G
nnnnnnagtgcagtggcgcaatctcggctcactgcaagctccgcctcccgggttcacgccattctcttgcctcagcctcccgagtagctgggactacaggcgcccgccatcacgcccggctaatttttttttgtatttttagtagagacggggtttcaccgtgttagccaggatggtctcgatctcctgacctcgtgatccacccgcctcggcctcccaaagtgctgggattacaagcgtgagccaccacgcccggccaagatttctttaacactccagcaatcagcctcttccttctcttttttcatttaaatctgatagttacaaaatctggtagaactggtgtgcagtattacaaaacattattgtggactgctttttactttaatttacacaaacacaaaaactgctcaaatttgaggtaccttcaactcgggaatctctcgttgacttgtcctcaatgaccacactcgagagtcccttcaccctagagaaaagcatccacgttgggcaccagatggagtggcctgcgcctccacagctgtgggcatttctcctcaggtggaacgagagacttgagaaaagaaagacaacagagacaaagtatagagaaagaaaagtgggcccaggggaccggcgctcagcatatggaggacccgcgccgcccccgcgtacaaggctaagcattttaactttatactggaaaaaaaatcaaacaaaggggagggataaaggacttagtcatctttgcactggaaaacaaaatatgtaaattaaattcccatagctgcaatgtaacattgaattcttccaggttaaaaaaaaaaagttaatcctgtgatattaatggaatgacattttgaggtcttgagaatgggcacaaaagtgggaaatgaatttcagtatgggcaaagacactgaggatgatgttgattagataattcactccgtaatgatcatgctgtgtgctagtaagtataaccctggaaagatcttgagatgcttcccagcctgttcacagatattacaacagctttgttttgagggttagaaacatgaaatgattt

SEQ ID NO: 22310 - DNA, 1120 bp, Homo sapiens; identical to SEQ ID NO: 22234
  misc_feature 1, 1119, 1120: n = A,T,C or G

SEQ ID NO: 22311 - DNA, 5656 bp, Homo sapiens
ctcttctgtcctctgctttgttgtcttcgtggtctcttttctcgtgggtcgcctctgcttcgcgtgtggttgtcgctgtgttgctctcctctgttctcctctgtctgctcgctgttctgttttttctcttgtttgcgtttcgttctctctctcttttctctctcgtgttctgtatgcgttctctgtgctttctgttttctttgctttgctgcggggctctgtgcgcgtgtctctcgcgctgttgttctgttctggtcttttccccgtcttctctttgtctctgtgttctgggcctctgtctcttgctcgctcgttttcgtacgctgtttctgctggtagtttgcgctctgtgtccgttcttttctttttcgtcgtctctctttgtcgttcgctgttcttctctgtcctgttgtagcgtggtgtctctcttcgtctttgtcttttcttgtttctcctttctgtctctctctcttgctgttctccctctcttcttgtttgttgtcgctcgtctcgttccttgtctgtctccctcctctcttctcctgcttcctctctctgtggcctgtacgctctcgtttcttttctgctttcgttctgtctccttctctgttctcgttctcttctgctcctctgtcgtgcttcgcgtgctcgtccttccggctcgtgacgtccgttgctttgcttttcgtgtctcgtgttcgtctgggtccgctccgttcgcgctcttctcttgcgcttcgtcggtcgcttctgttgccgttgcgttggctgtttctcgtcgtttgtcctctcgcttttgtgccctttgttctctcgtcgctcgtgtttctcagtcatcttgtttttccgtgctcctctctctgtgccttcttctgtttccttcctgttccgttgttggtgccgttggtcttcttgttgcttcgtcgtcgttgttttttccccgtcccggtgctggtgtctgtgctgtgtgcggcggtgtgtgtgtgtgtttcgtttgttttctccccctgcggcggttttacttcggcctgttgtggctcgtgagttgagcccctgtctgccttcgggccttttttggagttggttgcacaaccgccggtgttctcccggggttttttttagtggtggtgtatatccacgcggcgtctgtccatggccaccggttcctcgggatcacggtgtggaccatgggtactgttcctattggggccccggcggccaccgcgattgggttgagatgcgtttctgcatggccccaggccgcccccaactggtgtgtgttgtcggtgtgtgtgtggttgtgtcctggaagcagaagttgctttaatcaaggggtgaagtcctcaatcaaggggacctcacttaacctttggtggtggggtctcagcctaccccccacaagccctgaggcccctcaggaaggagggagcagttgaacaacaaattatggcagaggccagggaatgggagtgggggaacccgggtcaaggtgaaggggcaggacgctgaaagggtgggagtgaagctgaacggggcaggaagagcttaacccacgtttctacctgggggctggctgaggtggctgtgcatcgggcagagcggcaccagagggctgagggtcgaaggggacagcaggggaaaggagtgcttaggagatgaggcgactgtgaagctggtgcagctgctcctgggtcagcaccagccggtgtcgctgtccaaaaccagccgcacatgagaaggtcactttgcccatgtagactgtgtcatcctgctgctcctccttggccctgaggaaggctgatgaagggaaggtggcaaagtcagtgggtactgtggctccagggcgctgagatactgtctccttgaggacctcatccttgagcttctcgacggtgtcactcagggacttaagctgagccacttgctccataagttgggccgacgggctcttggcagcagggctggtgcgagtgatgtctactacgtgcgtgtgtgtgctcaattgattcaatgtctccagcagctggctggtcttacgatacagcgctccagctggtaactcactgccagggccctcatgggatagctttgcaacatgcagagggggcagggatgccaaggatgccttcatctgggctcccttgaggatgctgttctcatgctggagctgggagatgtgcagcctcatggcagagatctgctgaagcagcagtggtgagtccttcaccagccctgggcctggcacagaccctggagcctgcccagggatggctcctcgctgctgttgcttcaccagcaatgccagagaccagagtagcaatgcctgaaggaggagggccccggagtccctcaatcgtgcgtttggactggctgttcagacgctgctttagttctgccttctctgcctccagctggtcgatgtcagcctggagtgcatccattgtctcctcaaactctttctccttctttcgcagcagtgcctgggtctcctccagccgagtctggactttctcgatgcgctcatctgcatccttggcagcactgtccaacttcttctccaggaggctcagccgcacattggcctcacttagctcctctcccttaatcttgagtgacttcttcaactccttaataactgtctctcgatcttcgagcttcaaacccaggccttcagcatctgtgatctctgcacgaagggcagcagcccgcagttcaaccggtggaggcttgctggggggccgctctgcatcatactccccctcctgcatggctgtggccagcttgttcatggtactgatgaggatgttgcatgactggcgcagacactcataggggctgctggagggggtcccatagatctgctcgcttgctttgaaagccagttcctccagagcagccacaagtagcccctcattctctgccagtggggcaatgagctgggcagcagcagctgccacctcctgcagcacagccacgacccacgtcaagtgtttcctgcagtctaggagcgtgtcagatacctgtggtccaaaggccagtgcagctgggatcccaggagcatctgtccctggcattcgccttcggatcttcttgcagaactggcggatgtcactgcatgaagtttccagatcccggagcaggagggcaatatctgtagcctcctgcccaccctgcaagaaggcacgcagccgtcctacctccacactcatgcagtccagagcactctgcgtgaacttaatgtggtcagccagctgcatagtacagtcctcaggctgttcggcaaggtggatgctgtacagatgctgatagtacttgatggccttggtgagaggctccacattgacagtctcatccagctgatccttgtgcagcagttcaatgaggaaatccaaggagcgctcatgggcactcatctcagggtacaggctgcccactttcttatacacatccacactgcactgagagagggcatgctcatagcggtgtagcgtggcctgcagcaggctcagcgagtacaccagtccagcagcaaagctgagttgctccccagcagctcctcgcagcccaggccgctctgaacagttctcacttagttcaaacttctcctgggcctgcttccggatcagctctgccttgcaaatgagacgaggcatgagcaacagcaccagaacgcagtcatggtccccacctggccgaaggaagctgtcaggcatgaaggctgtcagcagggacatgtgtcgattggcctgggccacctccatctgcctcaattccatctcaattgccttggcatgggccttagtctcagcaaacttgattttgaagtcaaaggtctctggaggtggctgctgttgcctctccacagatgcttcctgctggtttgtcagttcccgattcacatcctgtagatgggcggtcagctggcggtacttcttgatggtctgctggtagtctgcaaccgtctcctgggctgcctccacacgcttctgggcctcacgaacccgcgcgcctgccatgtccagctgctcccgcagctccagttctgtctcacgtgcattctcctgcagctcatcgttcatctcattcatcgcttccaagtctcccacagtctccctcaactcgcgcactttctcttccagattcaggttccgatctgtcagcatctccaccatctcctcagcacccagagcagcatccacctgctccttgagctcatcaatggtgctctctgcctggcttagctcctcctgcagacgctcccgctgttgcctcacaacttccagctcttggttcttcttttccatgagcttctggagcttcacatgctcctgcttctctgaggaagaaagatcccgcatcctcaccagggcatccttcaggcgggcattctgctcctcaagctgcttgagctgataactggatgcagcgccatctgagcccttctcttcaatctcagccttgaggatctctaagtcagtagtgagctcgtccacccgctccttcagtgcctccacctcctgctgcagggactcagcccgctcttcagccatctccttgtccaaagtggccatctcaatggcatcagcagtatcagccatctcctccatatagcgttcctttgcctccagcgcctccttggcttcctttctcgcctccttgaggcgccgctgcaggtcggcctgctgctcctgcattttgctcttccattcctgcacctgctccagctggattttgtgtttctccagctcttttagctttgctttgtcttctgcccgtttcagtctcagggtctctagtttctcctccaggtcccgcacctgagcccttagtccctcctcctccttggatggggaaggaagcggggggactgctccaggagaggtgaggaccggcgtggggatgatgggtgctgccagcggagtctgagccggggtgctgggctcactgctgctcagctcacctgctgacgctgagccagaggggcccagggagctactggccccagccaccccagtactggctgggcgcgtgggcttgggtcgccgagttgtggtcagtttgctagtctttgcagttgtatcagttccctctcttttgaggacttttgaagcagaagaatcaggtgtctctggggaagtagtatctgctccatcttcaaatacctggatctgggactggcgcacaaagatgccatgcccttcatcacaagtgaagtacttcctgccttgaacagttccatcatttttgccctttgcttcatccagaatcacgcctacccatttgccagtggcaaacagtgtggctccaacataggccacagtgcctcggtggccttttccaatcacctctacacgggagcccacccgcagaggccgggcgcttgcctccgcactcatcctgctgccgctgggcgtctgcactgtgaggggctccgcgcccagctccgaccccaccgacgaccgacgcccaagaccctgcggggccggccccgccctccccgccctcgtgggctgcccgactcgccgccagacccttccaggaccgcccagaacccttcggcccagaggcccagaggcgttctgggtcgagtgaaccctcttttcccgcagtccagcccagactgaaaactgcgcaccgaccgcagccgggcggacgc

SEQ ID NO: 22312 - DNA, 1481 bp, Homo sapiens
gcagtgtccgacccgagagttgcggcctgagtcaccggccccgccctccggagccggacgctgccgggaggccgggagcggcagtggaaccgactcccagaactccggacgtgtgcggcgcagtgagtcgcagccatgttcctggttaactcgttcttgaagggcggcggcggcggcggcgggggaggcgggggcctgggtgggggcctgggaaatgtgcttggaggcctgatcagcggggccgggggcggcggcggcggcggcggcggcggcggcggtggtggaggcggcggtggcggtggaacggccatgcgcatcctaggcggagtcatcagcgccatcagcgaggcggctgcgcagtacaacccggagcccccgcccccacgcacacattactccaacattgaggccaacgagagtgaggaggtccggcagttccggagactctttgcccagctggctggagatgacatggaggtcagcgccacagaactcatgaacattctcaataaggttgtgacacgacaccctgatctgaagactgatggttttggcattgacacatgtcgcagcatggtggccgtgatggatagcgacaccacaggcaagctgggctttgaggaattcaagtacttgtggaacaacatcaaaaggtggcaggccatatacaaacagttcgacactgaccgatcagggaccatttgcagtagtgaactcccaggtgcctttgaggcagcagggttccacctgaatgagcatctctataacatgatcatccgacgctactcagatgaaagtgggaacatggattttgacaacttcatcagctgcttggtcaggctggacgccatgttccgtgccttcaaatctcttgacaaagatggcactggacaaatccaggtgaacatccaggagtggctgcagctgactatgtattcctgaactggagccccagacccgccccctcaccgccttgctataggagtcacctggagcctcggtctctcccagggccgatcctgtctgcagtcacatctttgtggggcctgctgacccacaagcttttgttctctcagtacttgttacccagcttctcaacatccagggcccaatttgccctgcctggaggttccccctggctctaggagcactctaaacaagctctgtccacggggtctccccattcccaccagggcctggaacaccatccgtaactctcccctgtacctgtgcaacggctagcacttgtgatgctccatgccccgaggccccctctcagctctgggagggtgactccggtcctggacgcctggcacctcgggtgtatccaggggcagctccaacggccaccagtgccgtgcttgttttttggcccgctgaggcaggggtaattgccctggtgaaaaaagggcgtgatcccgggcgcactgcctttgaaggctggggtttaaggggtcccggaggtttgggtctgggccacc

SEQ ID NO: 22313 - DNA, 1643 bp, Homo sapiens; identical to SEQ ID NO: 21150
  misc_feature 1, 2, 3, 4, 1615, 1616, 1617, 1618, 1619, 1620, 1621, 1622,1623, 1624, 1625, 1626, 1627, 1628, 1629, 1630, 1631, 1632,1633, 1634, 1635, 1636, 1637, 1638, 1639, 1640, 1641, 1642,1643: n = A,T,C or G

SEQ ID NO: 22314 - DNA, 1120 bp, Homo sapiens; identical to SEQ ID NO: 22234
  misc_feature 1, 1119, 1120: n = A,T,C or G

SEQ ID NO: 22315 - DNA, 1335 bp, Homo sapiens
  misc_feature 1, 2, 1335: n = A,T,C or G
nnaccatataggttggacgacggagacacgtcattcatgcgaactttcccttcacccaaatgcagagcaaatgttgctccccagaagcccacaaggtagctgaagccatttctagttgacatcggcaatctccattctcttcattccacactttgacaactcactctgtggagccatttggctcagtcaaatttttattttttttttttttacatatatagcatagtgctgatgcttaaagatcctgttgactgaaataagttgcaaggaatattagttcagggaaatatcaaagtgtaaaaatatatgggatagtgagaaagaaaaagccatccaacaccagcacattagaaattactcaatcacttctgtcatgtgaaaaagggatcagcaccccacccagagcaaactcaaactctgagtctattaccagttaagtcaagacttggcttctatttttgcaaagtaatcagtaactgagtcagctgtgaaattcctggttgctccttgatcttgtgtaacatttatccaatcatttaggctgtttgggttgaaggagggttattacaataagaacatctttgagagactttttcaaaaaaattgttcattgttggggggaaaaaacccctcatttgcccacaggaactaaggtttggtctgtcagcaaaaggttttgttcattatttcaaactgggaaagtgtagctggtggggggcagttagaagtggagaggggaaaaggtagagatcaagttagaagagacacttttaaacagtattttttatttaaaaaaattctctcccacaggacttactacatccaacatcaaatcaacttaaaaaaccaccatctctcatggctccatttgaagaaagacacatccttcacagtgctatattaccttgtctgtgatattatggatcctggttaggaaaaggattcataccacaaccaatcacgtccgcctatgctgagaagtgtccatttctttaggctgaaaataagactgtactttcataaacaaataggaaaatgtgatctattgcttcttttcttggtccgtgcccctcgccttgctaagtcagtttttcgactgcctgtgtgtgtgtgtgtgtgtgtgtgcatgtgtgtgtgcgtatgtgtgtccagaggccactgatccagtccaagtgtatttagaaattagttcagtggctcacaaaggtcttagaggccactactgcgctggggaaatccattgagcttggcttgttctctcttgctcttgccaatgtgcactctgcttacatgcacacactccttaggaagatgccagttatctctattttatgn

SEQ ID NO: 22316 - DNA, 1120 bp, Homo sapiens; identical to SEQ ID NO: 22234
  misc_feature 1, 1119, 1120: n = A,T,C or G

SEQ ID NO: 22317 - DNA, 2970 bp, Homo sapiens
  misc_feature 1, 2, 3, 4, 5, 6, 7, 8, 2951, 2952, 2953, 2954, 2955, 2956,2957, 2958, 2959, 2960, 2961, 2962, 2963, 2964, 2965, 2966,2967, 2968, 2969, 2970: n = A,T,C or G
nnnnnnnnccctgctccctgccctcctgggcagccagggcagccaggacggcaccaagggagctgccccatggacagggccccacagagacagcaccgagcctcacgggagctgctggctgcaaagaagacccacacctcacaaattgaagtgatcccttgcaaaatctgtggggacaagtcgtctgggatccactacggggttatcacctgtgaggggtgcaagggcttcttccgccggagccagcgctgtaacgcggcctactcctgcacccgtcagcagaactgccccatcgaccgcaccagccgaaaccgatgccagcactgccgcctgcagaaatgcctggcgctgggcatgtcccgagatgctgtcaagttcggccgcatgtccaagaagcagagggacagcctgcatgcagaagtgcagaaacagctgcagcagcggcaacagcagcaacaggaaccagtggtcaagacccctccagcaggggcccaaggagcagataccctcacctacaccttggggctcccagacgggcagctgcccctgggctcctcgcctgacctgcctgaggcttctgcctgtccccctggcctcctgaaagcctcaggctctgggccctcatattccaacaacttggccaaggcagggctcaatggggcctcatgccaccttgaatacagccctgagcggggcaaggctgagggcagagagagcttctatagcacaggcagccagctgacccctgaccgatgtggacttcgttttgaggaacacaggcatcctgggcttggggaactgggacagggcccagacagctacggcagccccagtttccgcagcacaccggaggcaccctatgcctccctgacagagatagagcacctggtgcagagcgtctgcaagtcctacagggagacatgccagctgcggctggaggacctgctgcggcagcgctccaacatcttctcccgggaggaagtgactggctaccagaggaagtccatgtgggagatgtgggaacggtgtgcccaccacctcaccgaggccattcagtacgtggtggagttcgccaagaggctctcaggctttatggagctctgccagaatgaccagattgtgcttctcaaagcaggagcaatggaagtggtgctggttaggatgtgccgggcctacaatgctgacaaccgcacggtcttttttgaaggcaaatacggtggcatggagctgttccgagccttgggctgcagcgagctcatcagctccatctttgacttctcccactccctaagtgccttgcacttttccgaggatgagattgccctctacacagcccttgttctcatcaatgcccatcggccagggctccaagagaaaaggaaagtagaacagctgcagtacaatctggagctggcctttcatcatcatctctgcaagactcatcgccaaagcatcctggcaaagctgccacccaaggggaagcttcggagcctgtgtagccagcatgtggaaaggctgcagatcttccagcacctccaccccatcgtggtccaagccgctttccctccactctacaaggagctcttcagcactgaaaccgagtcacctgtggggctgtccaagtgacctggaagagggactccttgcctctccctatggcctgctggcccacctccctggaccccgttccaccctcacccttttcctttcccatgaaccctggagggtggtccccaccagctctttggaagtgagcagatgctgcggctggctttctgtcagcaggccggcctggcagtgggacaatcgccagagggtggggctggcagaacaccatctccagcctcagctttgacctgtctcatttcccatattccttcacacccagcttctggaaggcatggggtggctgggatttaaggacttctgggggaccaagacatcctcaagaaaacaggggcatccagggctccctggatgaatagaatgcaattcattcagaagctcagaagctaagaataagcctttgaaatacctcattgcatttccctttgggcttcggcttggggagatggatcaagctcagagactggcagtgagagcccagaaggacctgtataaaatgaatctggagctttacattttctgcctctgccttcctcccagctcagcaaggaagtatttgggcaccctaccctttacctggggtctaaccaaaaatggatgggatgaggatgagaggctggagataattgttttatgggatttgggtgtgggactagggtacaatgaaggccaagagcatctcagacatagagttaaaactcaaacctcttatgtgcactttaaagatagactttaggggctggcacaaatctgatcagagacacatatccatacacaggtgaaacacatacagactcaacagcaatcatgcagttccagagacacatgaacctgacacaatctctcttatccttgaggccacagcttggaggagcctagaggcctcaggggaaagtcccaatcctgagggaccctcccaaacatttccatggtgctccagtccactgatcttgggtctggggtgatccaaataccaccccagctccagctgtcttctaccactagaagacccaagagaagcagaagtcgctcgcactggtcagtcggaaggcaagatcagatcctggaggactttcctggcctgcccgccagccctgctcttgttgtggagaaggaagcagatgtgatcacatcaccccgtcattgggcaccgctgactccagcatggaggacaccagggagcagggcctgggcctgtttccccagctgtgatcttgcccagaacctctcttggcttcataaacagctgtgaaccctcccctgaaggattaacagcaatgatgggcagtcgtacttgtgccattctttataaaatgattttaaannnnnnnnnnnnnnnnnnnn

SEQ ID NO: 22318 - DNA, 299 bp, Homo sapiens
acgcgggggcagacacccagccactctgagcagaactgacagcatgaaggcactcctggccctgccgctgctgctgcttctctccacgcccccgtgtgccccccaggtctccgggatccgaggagatgctctggagaggttttgccttcagcaacccctggactgtgacgacatctatgcccagggctaccagtcagacggcgtgtacctttagtggttgccaatctgggcatgtctgaacaactgggttataaaactgtatcaggttcctgtatgtccactggttttagccgagcagt

SEQ ID NO: 22319 - DNA, 476 bp, Homo sapiens
acgaaggcagtttggagctggggctaagcagctgtcgcacggtcagatcatgggctccaccaagcactggggcgaatggctcctgaacttgaaggtggctccagccggcgtctttggtgtggcctttctagccagagtcgccctggttttctatggcgtcttccaggaccggaccctgcacgtgaggtatacggacatcgactaccaggtcttcaccgacgccgcgcgcttcgtcacggaggggcgctcgccttacctgagagccacgtactataaggaattcaagttaacagaggcttgatttatataaaagaaagctgcagttttaaagttgtgttccttaaagaccagattatagcttatctgaaatgacgaaattttgattctaatattttttctattatttataagtgcaaattttttaaaaaagtgtacagctttctaaaagtaataaaggtttagcataaatacagcca

SEQ ID NO: 22320 - DNA, 979 bp, Homo sapiens
  misc_feature 707: n = A,T,C or G
gtacgaacacgctgccgagaagacgacagaaggggctctgccgtgggcctgcgagaatcgaggcactcgctggcgtacccatgtatcgaaatgagttcacggcctggtaccggcggatgtcggtggtctacgggatcggcacctggtctgtgttgggctcactgctttactatagccggacaatggcgaagtcgtcagtagaccaaaaggatggctcagcaagtgaagtacccagtgaactctctgaacgcccaaaaggattttatgtggaaacagttgtcacatataaagaagattttgttccaaatacagaaaagatcctcaactattggaaatcatggactggtggccctggtacagaaccatgactggctgctgaattctgaaaaccaggacttggttcaacatttaaatttgatagttgccctgattcccattttgggtttgtgaaaagtgtatgtatttaaatttgctgtaaaacataatcactaataatatgcaataaatattttcttgaagacaaaaaaaaaaaaaccaaaaaaaaaaatttgtgggggctcgggccttggaggagttttaaacccatcgggtgtgggcacggggaccaagtggcaaaggcacagtggcaaacggggtccaaagagaaccccgggcaagcacagggggggctccccccaaaaaaacgccggggacacgggcgtttaacnacccaagggagtccggcggcacaaggggggacaacaacgggggccggggtccatcaacagcgccccgcggctgcggaagtgacaaacaacaaacgcaacagacaaagaacaaaccaaaaaacacagaaaacgaagcaagaagagacaagagaaaaaacataaagagccaacacaagcccacaaccacagacacagcagccaacacagcgaaaccaacaaaaaacacagcaccgcacacaagagcgcaagacaagagaccacagagccgaaca

SEQ ID NO: 22321 - DNA, 2361 bp, Homo sapiens; identical to SEQ ID NO: 20124
  misc_feature 1, 2, 3, 2361: n = A,T,C or G

SEQ ID NO: 22322 - DNA, 5253 bp, Homo sapiens
  misc_feature 1, 2, 3, 4, 5, 6, 7, 8, 5253: n = A,T,C or G
nnnnnnnnagcttagctaagaggtctttgtttccagaggacccaagactaccagactcctgtgcagtctgcctgtctgcagagcctccaatcgcggtggaaagtggtcttggcctcccagcccccactgctgcagccttcagagccagcctctggactcagcgccaggagcctcctctcctgctgccctggtacctgtcatcctagtgtcacctatttgttttgcacagcattctggagaacatgtgcctcacaaagtgatcctgtttttctcaccctccaaagctgaggtggctaagggaggcaggggtgagagagctcactctctaaaccacaggcagggcaaggtgcttctaggccgtgtcccctccctggggaatggtcactactcctcagcatggccacaggcccctgtggttttgggagtttgctgagtgactggaatgggctgaccccagccgtttccctgctgtggaagcagcaaggtaggggcactgctcggtggtttgtcaagctcagaggcagccacggatggttaggaacaggaagccacactgctaaggtgtgatgagctagaagggagacatcctggacttcaagtgagacaagtgcagaggaggccactccacttaggaccttcctcttagacctgcatgagcacgtgtctcacttaagcacattgggtccgaatagtggcgcatgaacccagctgttaaaccaggtaccctgggactgccctctgcctctcagagccctacctgtcctggacttgaaggcgagcatcaggcaggccttctcagcccatcttccaccaggagtgcagagccagggtgctgagaggagcagggactgtaactacagtaggaggcaactttgctggtgtcattcctgctcggattgactttgtgctccctcccatccacagctatggtagccagtatttccccagcagctctctagtggggaagagtggctagaaccaggccattctcagtcgaatttaggaagaccaagactcatgttcctgacaggacggtcattccctcatggcatcactgactcagttctaattcctcccctcctgtttcattttggtttgaacaacctgtgcctgcagctgtttcttccaccttcctggagctcacaattggagcttcatgttcagtcttgagctcctaatgtttccagacagggcaggggataggacagccataatctatgaaagctgtgaaacaaaccctgggttatatagacctcagatggtctcatctgaaggctttgcccacttcccagtgagcagagggtttggggaacaaagaggtagctgaagagtggtggtttttccctgtatcctgattttcagaaagggctttagtctctgagctgtggctagtagctggctggctgaccaggggacgggggtctaatagggtgtctgaccataggacacctctcgtgtttggccttccctttcttgtgtgtttgtgtgtgtgtgtgcatgtacacacacaaatctgtatccccaggagtgcctcctgcagtcactgggggctcttccgtggtgcaccatcccatgagagcagatcagagggctgtggtcaggacttcctcccgagctgccctccctccctgggatgagtttcctctccacctgctccaaggtgccttacgaggtgcagctcttcacctggccacatggcatccatcaccgtgttgagaaatggtgggacgttggctggatattgtgtgctatgaatctgatttgtccaaatctggacctcagccaagccacctgtggtggaaccttgcaagtcaaggtcatgaacaaatttcttgtaactattggaaataaactaatgaggtagaactgtcatatccaaatggaagaggtggttggtactgttacttccttttgctgtcagagggttgttgacaatggcaaggggggatgttagtgagatccaggtggtggtggcttcttggtccactcagcttgcacacatgcaagaggagggtctgtggcccctcagccgtgctggtggcctccttcctcaagctttaacttgtgccctccctggcaacagggagtcatgggttaatgtcacctgtcatgcctctttcttcagggaaaatattaaaaggctcaaatccaagctgtgacttcccttagacagtgtaagcctgtagggtgcagccccaagtttatgtccaaaggctgcctcagaaccctggagggagcagcgcccagctggcagctcactctccccttgcagttcactggccttttcgcagccaggctaagataggcagtgcaaggagcttcccactggccagagcagctgccttgtagaatgtggggctggcttttagaagtttcacacgcttgcagctaagagtgcagagctctctgttttacttcgtgaaacattagcagctctgaggggcttggcttttggtaagggacttatagtctgacttgccacaagcaccttgagctcctgggttggttggtggttggttggttgggttgttttaaatttgatttttcttttcctgaagtttgttagaagtcagacctatgcaaggaaaaccatggcccacttcagcagccatccagtgggggtgcttaatcggtggtggtaggattcatggaaacgtttttttgaaatgaaagagaagatgatgtacttacattgtaaaatggtttacaataaagtttggcatcttattacagtttttttttaaaaagaaaccatcacacgtgtggttgttggttgtgggttctctggagttgaaacagcttggcagggtcaaaaaagattcccctgtgaattagaaggttctccccagggaccagagtgagaaggaaccttacgaagcctcatggcaggagtgggagccagcaactgcccagtgaaaagccaaacatgctcttgccatgtccatctccacttcttcgctagtgagaattaaagcaagtccgtctctgaggaggacatcgtgttggggaggtagggtataagcagtgagtagcccacatccttgtccctgaggctgcggggctggaaggaggtccctgggcagagccgcagcatcaggtgccatctgcaggggcacccctggaactagtggaaggcccccacaaggcctggcctgccctcagctgcctcttggcccatgtgccacatcctgggcattcctcatgtcagcacttgtctcagatcaagcctggcagtcctctcattggcctcctggagccagggtgtcaggagggggattggggtggggttcaaagtatgacagcaatggagtggcatttgggataaccaaatgtcagtgcctggttgagttccatctgcctggagccttcgaggataaaaataatctccatcataaactgaaaaggacttagatatgtgtgttactgggagggctgcgacctatgcacacctattccccatacccaccccaggcgtaggctcctggcctgtgccctgggggatcttccccttgcaaggaggggtgtgttaggagcttctagcaaaggagagctaagtgaccttccggggagcccttgggcctgttcttgtctctgcagctcagtatctggagtgggcttcactctcccccaccctctttgagcaactgaaactgtcctgcaggccagcccccctgcggtggcctcacctactcggaggtgagtaggctcaggcctgagcctgagcctgtttcccacctctgtctcatcagtgctgtcaccatcgagcatggtttcctccctggtcctttccagaccccttactcccccctctctgaacttgcagttggaataggatagaggacaaggacatcagcaaaaacatgagcaactccccaggctccctttacctcactttctccacctgtgaacctgtggtagcccctctctgagtttgctgcaagggcccagtgagcttgccataatcagacgcagcagacacgggaagctcctgctctgccaccatgcagggatggaaaatctgtccactggaatccaggggaagggatggaagaggaagaaaaacaagcttggagcagtccaacccagctagggccctccattccctcagggacaccccacacccaccccacacactgggatgaacccttgcagaggaacaattcagatggtcacacattccaggacccaaatccgtaaacacaaagcatgtccgtcagtgccagcacctccccccggcgaatcaagcagctgtcccagagggcaaagggtctctgcagccatctgctttcatcagggctgcagcccccaggcagcagtactgggagcccctctcatctccgagaataaactctgaagccagcgaccctgcggacctgaatcatcagggagcctgtcagaggaggggcagtgactctgcgggacaagcaagcaggctatataagtttcagaaggctgggctccactcagatcttttccagcagctgctgcctgccagagaggcgccttcagagacccagcgcttacacaatacccaccatgtcccaggctggtgctcaggaagcccctatcaagaagaagcgcccccctgtgaaggaggaggacctgaagggggcccgaggaaacctgaccaagaaccaggaaatcaagtccaagacctaccaggtcatgcgagagtgtgagcaagctggctcggccgccccgtcggtgttcagccgcacccgcacaggtaccgagactgtctttgagaagcccaaagccggacccaccaagagtgtcttcggctgagaagtgtgcgccactccccttgctgcccgaatgctcggaaacaggagccttacccaggaactcttttttatgccagaacgcttcctctcccctgctgtctctggggctgccaccctcccccacagtccaggcccttcagccaagggctctgcaccagcaccttggaagcaccaataaagaggatgcccacgtggccccaacggttgagtccactgggtattactatgaagaccaacttgacaaagggtagctgactggatcagtgctccggaaaagcaattcctgacaattacgcgtgggggggcgcccaatacagaggagtatcttcggcatggaggggtcacactaaagaaaccgggtccgaattgggtgcgcgtgacacaaaaaaagaacccgcggggtacgggctcgtggaagaaacgagaggggctcggggcagaggggcccaaccgacaagggacatgtaan

SEQ ID NO: 22323 - DNA, 1037 bp, Homo sapiens
ttggacagcccgggcaacctcgacaccctgcaggcgaaaaagaacttctccgtcagtcacctgctagacctggaggaagccggggacatggtggcggcacaggcggatgagaacgtgggcgaggctggccggagcctgctggagtcgccgggactcaccagcggcagcgacaccccgcagcaggacaatgaccagctgaactcagaagaaaaaaagaagagaaagcagcgaaggaataggacaaccttcaatagcagccagctgcaggctttggagcgtgtctttgagcggacacactatcctgatgcttttgtgcgagaagaccttgcccgccgggtgaacctcaccgaggcgagagtgcaggtgtggtttcagaaccgaagagccaagttccgcaggaatgagagagccatgctagccaataaaaacgcttccctcctcaaatcctactcaggagacgtgactgctgtggagcagcccatcgtacctcgtcctgctccgagacccaccgattatctctcctgggggacagcgtctccgtacaggtgaatgactggcccactctcccttgctccacttccacatgtttctcagcggtcggtcatgtttcaagctgcttgtgcagctcaccgacatttcttactgggttaatctcttcagagacattcaacttgctgacatccccacattttcccaggagattataagctgccccagcagcagggtttggggcagaagtgagaggggcaggctatctcaccaatctcctcttggactcaggaactcttgcaaaggtttcaaagatgaggaagaatctaaaagaaaagatcattaagctgtgcccagtgttcctcttgcaacaattctggaacaaaactttaccctgtttccaaatttaagctaaattcgttgtattatgcaaatgtagggacgtaacttgtaaaactccaagtatagggccaaaggcaaactttgcagtaaaactggctttgaattaaaaaaaggaagaaggaaggaaggaagaaaaaaaaaaaaaa

SEQ ID NO: 22324 - DNA, 2397 bp, Homo sapiens
  misc_feature 1, 2, 3, 4, 2393, 2394, 2395, 2396, 2397: n = A,T,C or G
nnnnctaggtcgagaactcggtggatgaatctgggcgcgtcgcagctgtcatggcggagaccgtctggagcactgacaccggggaggcagtgtatcgctcccgggaccccgtgcgcaacttgcgcctccgagtccacctgcaaagaatcacatcaagcaactttcttcattatcagcctgctgccgagctcgggaaggacctcatagacttggccacttttaggcctcagccaactgccagtggacaccgcccagaggaagacgaagaggaggagattgtgattgggtggcaggagaagctctttagccagtttgaagtagatctgtaccaaaatgaaacagcctgtcagagtcctttggattatcagtaccgtcaggagatcctgaagctggagaattcgggtggcaagaaaaaccgacgaatctttacctacactgactctgatagatacaccaatttggaggagcactgtcagagaatgaccactgcagccagcgaggtgccttcattcttggtcgagcgaatggcaaatgtcaggcgtcgccggcaggacaggcgagggatggagggcggcatcctcaagtcacgcatcgtcacctgggagccctcagaagagtttgtcaggaacaaccacgtcattaacacccctcttcagacaatgcacatcatggcagacctggggccctataaaaagcttggctataagaagtatgaacatgtcctgtgtactctgaaggtggatagcaatggtgtgatcacagtaaagcctgacttcacgggcctcaaaggaccctacaggattgagacggagggggagaagcaggagctgtggaaatatacgatcgacaatgtttccccccacgcacagccggaggaggaggagcgggaacggcgagtgttcaaggatctttatggccggcacaaggagtatctcagcagcctcgtaggcaccgactttgagatgactgtcccaggtgccctccggctctttgtaaatggagaggtcgtttcagcccaaggctatgagtatgacaatctctacgtccacttctttgtagaattgccaactgctcactggtcaagcccagcattccagcagctctcaggagtaacacagacctgcaccaccaagtccctggcaatggacaaggtggctcacttctcctacccattcacgtttgaagccttcttcctccatgaggatgaatcttctgatgcactcccggagtggcctgtgctctactgtgaggtcctctcgctggacttctggcagaggtaccgtgtggaaggctatggggctgtggtgctgcctgccactccaggctcacacaccctgacagtctccacgtggagacctgtggagcttggcacggtggctgagctgaggaggtttttcattggcggttctctggaactggaggacctctcctatgtacggataccaggatccttcaagggggaacgcctgagccgctttggactccgcacagagaccacaggcactgtcaccttccgcttgcactgtctgcagcagtccagggccttcatggaatcgagctcccttcagaaaaggatgcggagtgtgttggaccgtctggaagggttcagccagcagagttccattcacaatgtgctagaggccttccgtcgagcccggcgccgcatgcaggaggcccgggaaagcctcccgcaggacctagtgagcccctctggaaccctggtctcctagctcacagcagccctggcccacagtgcaagaggacaagatgggggatatctgaggccagtgctctcctgcctcttcgtctttctgattagagaccacgttggtctgctgagaaccagaaaagctgggaaattcccggctggcccctctgcctagccttctgcagggtcttctccctaccctgtggaaataaagccagagaccctgtggccccccctttatatttgcagccactgtcaatgggcatcacagcaaggcaggctttttgatctgaagctgtttggggtgaccccatagtgagtctggccttgactcacttttctggcttgtctcacagtagcaggggatctgctgttctccaccctttaaaaatggagcctttcatcttccaagaccaaagaaggaaggaaggtggacggtgagagggtcttaaatccccagcctgtgagtctcagcctctttccagggaagcctcattctactgcttggggcttgctgaggttgagatatgagttatttctgagtaagtgaaggctgaaggcagtgctgagtcctttctgctagctgggtggtatcttttactgtgtttttttgtttgtttgtttttttgttttttgttacataaaccccttttattttgactgaaaaaaaaaataaaaaataaannnnn

SEQ ID NO: 22325 - DNA, 1120 bp, Homo sapiens; identical to SEQ ID NO: 22234
  misc_feature 1, 1119, 1120: n = A,T,C or G

SEQ ID NO: 22326 - DNA, 1120 bp, Homo sapiens; identical to SEQ ID NO: 22234
  misc_feature 1, 1119, 1120: n = A,T,C or G

SEQ ID NO: 22327 - DNA, 373 bp, Homo sapiens
acgcgggggtgataggacagaggaagatgggtgcaggacactcatactggagacaggggtcagaaaaaccgtctcttaaggatgtgacgtgtgatgagaaaacaccagccattctaagatccagggaaagtgcattccaaccgtgggagacagcaagagaaaagcgtcccccagcaagaatgatactcggggattcatggatcaaaaggaaggtcaaggtggccagagcatcaagagcaccacacagtttgagaagatgaggcgggaggaaggcaaggacctcgtcagccatgtaagacgcctgctcccactttgccttccaccatgagtcaaagtttcctaagtcttccccagaagccgccatgcttcctgt

SEQ ID NO: 22328 - DNA, 1120 bp, Homo sapiens; identical to SEQ ID NO: 22234
  misc_feature 1, 1119, 1120: n = A,T,C or G

SEQ ID NO: 22329 - DNA, 1120 bp, Homo sapiens; identical to SEQ ID NO: 22234
  misc_feature 1, 1119, 1120: n = A,T,C or G

SEQ ID NO: 22330 - DNA, 1776 bp, Homo sapiens
acagaacagtaaagttaaaacggatgtctccattgatctgccaaatcgttatagagagcaatttgtctggactagaaaatctgagttttacaccatactgttaagagtccttttgaattaaactagactaaaacaagtgtataactaactaacaagattaaatatccagccagtacgcggggggctatttaggacggaagctcggctggtgtttctccagaagtttcccccttgggcggtggtggaggtggtaaccgtgatagtagcagctccggcggcagcaacagcgactacgagggatggcggcggctgcagcaggaactgcaacatcccagaggtttttccagagcttctcggatgccctaatcgacgaggacccccaggcggcgttagaggagctgactaaggctttggaacagaaaccagatgatgcacagtattattgtcaaagagcttattgtcacattcttcttgggaattactgtgttgctgttgctgatgcaaagaagtctctagaactcaatccaaataattccactgctatgctgagaaaaggaatatgtgaataccatgaaaaaaactatgctgctgccctagaaacttttacagaaggacaaaaattagatagtgcagatgctaatttcagtgtctggattaaaaggtgtcaagaagctcagaatggctcagaatctgaggtgtggactcatcagtcaaaaatcaagtatgactggtatcaaacagaatctcaagtagtcattacacttatgatcaagaatgttcagaagaatgatgtaaatgtggaattttcagaaaaagagttgtctgctttggttaaacttccttctggagaggattacaatttgaaactggaacttcttcatcctataataccagaacagagcacgtttaaagtactttcaacaaagattgaaattaaactgaaaaagccagaggctgtgagatgggaaaagctagaggggcaaggagatgtgcctacgccaaaacaattcgtagcagatgtaaagaacctatatccatcatcatctccttatacaagaaattgggataaattggttggtgagatcaaagaagaagaaaagaatgaaaagttggagggagatgcagctttaaacagattatttcagcagatctattcagatggttctgatgaagtgaaacgtgccatgaacaaatcctttatggagtcgggtggtacagttttgagtaccaactggtctgatgtaggtaaaaggaaagttgaaatcaatcctcctgatgatatggaatggaaaaagtactaaataaattaatttgctctcatcgtattgtgtatattcacctaatgcccattgtgtattgatattgcattcttgaattttgaacactgaatatctttttgaaagattatacttctttacctctttgtgctttagaaattattttccttcaagtgttcaagtctaatgaagaatgaagataacattttatcacttctgtccttaaagatttcagacatggtgaaactgaataaagcatgtcatttgctcctagatagattcattctatctagttgtggggatggagaaatctttaatggtatattttcggttattgccttatttttgatacagtattctgtcagtaatttattagacctggcagctttgggtgagcttagatttttcaccttcagtgttacattgtgtttgcttttaaaaactgcttttgaatggagttgtaaatacaatttttctatgaaaaaaaaaaaaaaaaaaa

SEQ ID NO: 22331 - DNA, 1120 bp, Homo sapiens; identical to SEQ ID NO: 22234
  misc_feature 1, 1119, 1120: n = A,T,C or G

SEQ ID NO: 22332 - DNA, 1201 bp, Homo sapiens; identical to SEQ ID NO: 21146
  misc_feature 959: n = A,T,C or G

SEQ ID NO: 22333 - DNA, 1120 bp, Homo sapiens; identical to SEQ ID NO: 22234
  misc_feature 1, 1119, 1120: n = A,T,C or G

SEQ ID NO: 22334 - DNA, 440 bp, Homo sapiens; identical to SEQ ID NO: 22241
  misc_feature 439, 440: n = A,T,C or G

SEQ ID NO: 22335 - DNA, 780 bp, Homo sapiens; identical to SEQ ID NO: 22057
  misc_feature 1, 772, 773, 774, 775, 776, 777, 778, 779, 780: n = A,T,C or G

SEQ ID NO: 22336 - DNA, 550 bp, Homo sapiens
gggaatgatgcgtatatgattctggcacaaccagttctttccccgaagcagctgttgccaccaccctcttcctgccaggcagtggaggaaggtgcttgcgggagctgcggacacactgttgtgtgttaggcatctacttagctggcctcatgttctgcttttgctggcagaattccttgctgaagctgtaagccctcgaatctgatctgtgctctgcatttttaacaaaccaggaagaagctgctcaggtgcatggagtcaaggacccggcgccagcatcaacccagagcgtgcttgccgatgggacagattctgcagacccctcaccagtccacaaagatgggcagaatgaggccgacagtgcaccagaagacctccactctgtggggaccagcaggctgctctatcacatcactgatggtgataacccactgctgtcgccacgatgctccatcttcagccaaagccagagattcaacttagaccccgagtcagccccatcttcacccagcactcagcagtttatgatgccgcggagttcttcacgctg

SEQ ID NO: 22337 - DNA, 1120 bp, Homo sapiens; identical to SEQ ID NO: 22234
  misc_feature 1, 1119, 1120: n = A,T,C or G

SEQ ID NO: 22338 - DNA, 802 bp, Homo sapiens
  misc_feature 797, 798, 799, 800, 801, 802: n = A,T,C or G
gacccttggaaagaagactgaggttcatttaatttagcactgagtttccaagaagcatttgccagtttattttcaacaaaatgagaaattatgttgactactgtggagctagatgctgtgaaagagccatggaagatgttagagctgccaggagacctgagcggcgtctagaccagcccctgatttggcagatgaacaggaagactcccacgtggaagccacactcccaaggtggcactgcagtggtgctgattactttgattacggacatggactcagtgaggagacttatgattcctacgggcaagaagagtggactaactcaagacacaaggcaccttcagcgaggacagcaaagggcgtctacagagaccagccatatggcagatactgattgtactgtctgatgttgtgaaatagccaatctccaccagtcctgtatactgttcaaagaaatgtcagccatcttggaatgtcacaggaactggttgaacacctgaagcaaacaaaggaactttccttctatttatgcactgcttaagaaccgtcaactcaccaacgtgcctagtcagcaaatgaatccacttgggaacttgaaaaacatcttaattaatttttgtttgcataattttgtgttctgtgacatgtttttattatatggtatgcttttaatttggagaacctacttttttaaaaaacggaaagaaaatctatcttattttgttgactcccaataacaaaaagagaatgatttgtatagtagttaataaaggctgcctattgaaatctcttctacnnnnnn

SEQ ID NO: 22339 - DNA, 1120 bp, Homo sapiens; identical to SEQ ID NO: 22234
  misc_feature 1, 1119, 1120: n = A,T,C or G

SEQ ID NO: 22340 - DNA, 1120 bp, Homo sapiens; identical to SEQ ID NO: 22234
  misc_feature 1, 1119, 1120: n = A,T,C or G

SEQ ID NO: 22341 - DNA, 910 bp, Homo sapiens
gcgtccgcagaataaatatggcctgcaatagtacacagagtgacacatgtctgggcaaagacaatcgacttctggaacataacagatcagtgttatcaggtgacgacagtacaggaagtgagccgccactatcacccccagaaaggctccccatcagacgctctgggaccagagacaaaaacagaagaggggaaacatgtttcctactgacgacaggtgattacacgtgtgcttctgatggagggatcaggaaaggatatgaaaaatcccgaagcttaaacaacatagcgggcttggcaggcaatgctctgaggctctctccagtaacatcaccctacaactctccttgtcctctgaggcgctctcgatctcccatcccatctatcttgtaaaccaaacaaccaaactgcatcagtcggctaaattgtattaattcaagtgctgtttaccccataatggaaataattaaatgtagagttactccaggctccattaatacagtataaatcttgcatgatactacaatttgaagtcagaaatgccacttgggtagctaatgaatcttacccaggctttaaagattgtctaaagtagtgctaagatccctcctattaattgccctgatatccttttgcaataaaatgacagatagtgtcagatattgaccagtgcactaatatataaacataccttcagggagatatatttaaaacagtgtgcttccaaatgccaaccacttcattggaactttatttcttgtgactgtaaaccattctgaagatgtctgggatcctatcttgattgcacacgacatgacttgtgtcagctcatttgcatggaccatcttgtctctatcacctgaaagcaatgttgcagagttcggggactgtggatagctcaggatatgtgt

SEQ ID NO: 22342 - DNA, 318 bp, Homo sapiens
  misc_feature 135, 136, 178, 179, 313, 314, 315, 316, 317, 318: n = A,T,C or G
acgcggggaaggctcttctgtgtcttcctgaccagctgctctgttcccagcttagaggaccagagggagaagccacctgctacacgctggatgctgcagcctgtgccactgtggcttacatcgctgtggttggtnnggcagcaacggagacctggcagccagctggagtggctgtganntgacagtgcttatcaatcctgtccccgccacaccaccaacatacacagaaaaaaagcaggcaatgagttggctccgggatgacctcgtatgaagacgtttcattccttagtcttggcaattgacatcacaaacnnnnnn

SEQ ID NO: 22343 - DNA, 5253 bp, Homo sapiens; identical to SEQ ID NO: 22322
  misc_feature 1, 2, 3, 4, 5, 6, 7, 8, 5253: n = A,T,C or G

SEQ ID NO: 22344 - DNA, 1120 bp, Homo sapiens; identical to SEQ ID NO: 22234
  misc_feature 1, 1119, 1120: n = A,T,C or G

SEQ ID NO: 22345 - DNA, 3983 bp, Homo sapiens; identical to SEQ ID NO: 21101

SEQ ID NO: 22346 - DNA, 1120 bp, Homo sapiens; identical to SEQ ID NO: 22234
  misc_feature 1, 1119, 1120: n = A,T,C or G

SEQ ID NO: 22347 - DNA, 893 bp, Homo sapiens
  misc_feature 892, 893: n = A,T,C or G
ccacgcgtccgcttgaggaagcccagtacatttaagttggtcgcggcttgggctccgctttggggaggggcagcaggtttattcactggatctctgaatacccaggccccctccaccatggccagccggggtgggggccggggtcgtggccggggccagttgaccttcaacgtggaggccgtgggcattgggaaaggggatgctttgcccccacccaccctgcagccttctccactcttccctcccttggagttccgcccagtacctttgccctcaggcgaggaaggggaatatgtcctggcactgaagcaagagctacgaggagccatgaggcagctcccctacttcatccggccagctgtccccaagagagatgtggagcgttattcagacaaatatcagatgtcaggtccgattgacaatgccatcgattggaaccctgattggcggcgtctaccccgggagctaaagatccgagtgcggaagctacagaaggaacggattacaattctgctccccaagaggccccctaagaccacagaagataaggaggaaacaatacagaaactagagaccctggagaagaaggaagaagaagtaacttcagaggaggatgaggagaaagaagaagaagaacagacggcgcggcggcgcagaagacgttgtgaagagacctgagcgacactggttctctgttcctttgacatgggagctgggtgacggtgcattggcggtttctgagagatctggccggtttctgagacagaagaccggccttgtctcgcagcccggcgccatcgggccgggcggaaggggagaattaacccctcatgtccggagggaggcaccctgggaccccgtggggcacccctggaggggcgttaaaccgtgnn

SEQ ID NO: 22348 - DNA, 781 bp, Homo sapiens
  misc_feature 1, 2, 779, 780, 781: n = A,T,C or G
nntacatggtggccaatcaaacaggccacacccttgttgcaagtcccgcgagaggttcagagaactctcccgttttacttctgcctcaggcctcacccgccacaggaagtggaactctatacctccacctcgcctggctgggtggagcctctaaactcaggattctgccttgagctgtggctctcccctcaggttgacagggtccagagcaaaacctacggaagaagctgcagaggccaggtggagggaaggatgctgaactggaggaggccaggaaattatgaggtacaccaatcaaacatagtgtgtccagaattggtgggttcttggtctcactgacttcaagaacgaagctgcggaccctcacggtgattctaagcacattaaaatctggatgacacttatctgaatcatttcgcaacttggagagagatggagaagacacgcatggtgtaactgggcatcaccagaatgtgcactgccatctgtggctgtcttcctgctggcaaatccttttcattccaagcaaataagattccctaaattagacaaaaaggaagaaacacaacagagtccataattctgagaggaagagaagagtgatcatcagcagcaaaaggcaattgcagagaagcaccaccaagagccagcttcatgctcaggagtgaatgctgagccgcctcctcgtggtttccggtgctccacatgttcagagaaacttctctggtaagaaactatagaaatggtgcatggaagtgttactagaaagggttcctgannn

SEQ ID NO: 22349 - DNA, 2387 bp, Homo sapiens
acgcggggtccgccctcccttaagatcacggaagtatcccgcttcccgcggacacaactttttttccttagtctgtatactttctgctgtcactagcataacagaaaagacgaatggcttttgttttaaactgagggcacttttacaaaagtcatctttccatttatttttctttcagaaaaaagaatttgggttttgagcttttttaaaaaaaaaagacaaacactttccttgactttgagaaataatttaagtcaaagaatctgctctatgctaaccaagagatagagcacagcaaagatctgccagccccaggcctctacctagtggcctggaaattcaagtattcttattggtggaggccatttgtttctgattagaagctgtctaaacctcctactcctcaactcaaaggaaaacacagagcataccatggccaagaaagttgcagtgattggagctggtgtgagtggcctctcctccatcaaatgctgtgtggatgaggacctggagcccacctgctttgagagaagtgatgacattgggggattatggaagtttactgaatcttccaaagatgggatgaccagggtctataagtcattagtgacaaatgtctgtaaggaaatgtcatgttacagtgacttccctttccacgaagattatcctaatttcatgaaccatgaaaaattttgggactatctccaagaatttgctgagcactttgacctcctgaaatacattcagtttaagaccactgtgtgcagcataacgaagcgtccagacttctccgaaactggtcagtgggatgttgtcacagagacagagggcaagcaaaatagagctgtctttgatgctgttatggtttgcactggacatttcctgaatccccatttacctttggaagcctttcctggaattcataagtttaaaggtcagatcctgcatagtcaagagtacaagatcccagaaggctttcagggcaaacgcgtcttggtgattggtcttgggaacactggaggagacattgctgtggaactcagtcgaacggcagctcaggtacttctcagtactagaactggtacctgggttcttgggcgctcttcagattggggctatccttataatatgatggttacaagaagatgctgtagttttattgcacaagttctgccttcacgttttctaaactggattcaagaaaggaagttgaataagagatttaatcatgaggattatggattaagtattaccaaagggaaaaaagcaaaattcattgtgaatgatgagctgccaaactgtatcctctgtggggcaatcactatgaaaaccagcgtgattgaatttacagaaacctctgctgtctttgaagatgggacagtggaagaaaacattgatgttgtgatcttcactacaggatatacattttcttttccattttttgaagaacctcttaaaagcctctgtacaaagaagatatttctatacaagcaagtctttcccttaaacctagagagagcgacattagccatcatcggccttatcggccttaaaggatccatcttatcaggcacagagctccaagcacgatgggtcacaagagtattcaaaggactctgtaagatacctccatcccaaaaattgatgatggaggctactgaaaaggaacagctcattaaaaggggagtgtttaaagacaccagcaaagacaaatttgactacattgcctacatggatgatatcgctgcctgcataggcacaaagcccagcatcccacttctgttcctcaaggatcccagactagcttgggaagttttctttggaccatgtactccttatcagtaccgcctcatgggccctggaaaatgggatggagccagaaatgccatcctgacccagtgggacagaacattgaaacctttaaaaactcgaattgtccctgattcctccaagcctgcctccatgtcacattatttaaaagcctggggggcacctgtcctacttgcctctcttctacttatctgtaaatcttcacttttcttgaaattggtgagagataaactacaggacagaatgtccccttacctagtaagtctttggcgaggatgaacctgattgttacaagggttacaccaagtcatgctaattctatctccaagtatcttgtgcatccctcctctgctctccatcataactgctattagccaaattcaggcccagtcatctcctatctgaattattgtattatcttcttctttgttttcagtaccctctttcttgccaccctttccaatgcatcttctaccctgctacctcagtgattattctaaaataaatatatatgatatggtttaaaaaaaaaaaaaaaaaagctgcggccgcaagct

SEQ ID NO: 22350 - DNA, 488 bp, Homo sapiens
  misc_feature 1, 2, 3, 486, 487, 488: n = A,T,C or G
nnnaccatatctgggggaaatgaactcattcctgtaaagagtctgctctgacagtagcatttgagacattactgctttaaatgcattttcatggttcaaaataatagcactattaaaaaatgtttcttcaacaaggatttgttttctccctaagaagcttaatgtggacactacaaataatgaccaaagctgctgagtatggcataacaaagagaaaacaaagcactcatcctgtcctccagatcatgcccagaacactgtctgccaacatgtggcttgccaactggaatgatgcaaatgtcagacccacatctgtggaaaaggggctcgtcccacaggaaacaagctattggggaatggggagaatgatataattagaaatttaagacacagtattactcagaaaaatgttggctgggcagcacattgctaagacttgaaatctttattctgttctcttttcaaaagccctgtgagcataatgannn

SEQ ID NO: 22351 - DNA, 1120 bp, Homo sapiens; identical to SEQ ID NO: 22234
  misc_feature 1, 1119, 1120: n = A,T,C or G

SEQ ID NO: 22352 - DNA, 2361 bp, Homo sapiens; identical to SEQ ID NO: 20124
  misc_feature 1, 2, 3, 2361: n = A,T,C or G

SEQ ID NO: 22353 - DNA, 3830 bp, Homo sapiens
  misc_feature 1, 2, 3, 4, 5, 6, 7, 8, 9, 10, 11, 12, 13, 14, 15, 16, 17,18, 3828, 3829, 3830: n = A,T,C or G
nnnnnnnnnnnnnnnnnnctatatagagacgaggtctcactgtgttgcccagcctggtatcgaacctctgggctcaagcgatcctcccgcttcggcctcccgaagtactgggattacaagcgtgagccaccgcgccctgcccagtggaatactttcaacggggcttctgcattgacttcccatcttccaacccatccacaaactgcagccaaaatgatgttactacagtaacaacttggagaaagcagtgtggtttaatctggaaggagcagaagctgtggagtccaaaggacccgtgttcctatccttgttgtgccacttgacacgtttagcacaagggtccccacagtgttagttcaccgtctccagcaatcacgatgactccctgaagggctgtcaaacgaaacaaaggcgcaaactgagacaattccattgtttacgtaactttcgccaaatcggctctttcctacgaaatatccagctcatagagcaggctgagatgctttgttgctttaattctctttaagagtcacagctgtccattttccacgtgcggctgaagaatggatttcagagcgctctccctccggccgtgttcacctagtaaccccagcttcgggataaggacctgcagcccgggcgcgacccggaaagggaatccgcccttttcgcctccttcgcgccaatcgcctggagttggcgtttccgcagccgggacacagcccaccctctaagagccgcggagtcgggaacggtagaaggggccgcgcgtgcgcagtggcgtccgctgtgcttccggtgcgccgggcgcggacgcgggcacgcacacacggaagcacgcctccacttaactcgcgccgccgcggcagctcgagtccaccagcagcgccgtccgcttgaccgagatgctgcgggcctgtcagttatcgggtgtgaccgccgccgcccagagttgtctctgtgggaagtttgtcctccgtccattgcgaccatgccgcagatactctacttcaggcagctctgggttgactactggcaaaattgctggagctggccttttgtttgttggtggaggtattggtggcactatcctatatgccaaatgggattcccatttccgggaaagtgtagagaaaaccataccttactcagacaaactcttcgagatggttcttggtcctgcagcttataatgttccattgccaaagaaatcgattcagtcgggtccactaaaaatctctagtgtatcagaagtaatgaaagaatctaaacagtctgcctcacaactccaaaaacaaaagggagatactccagcttcagcaacagcacctacagaagcggctcaaattatttctgcagcaggtgataccctgtcggtcccagcccctgcagttcagcctgaggaatctttaaaaactgatcaccctgaaattggtgaaggaaaacccacacctgcactttcagaagaagcatcctcatcttctataagggagcgaccacctgaagaagttgcagctcgccttgcacaacaggaaaaacaagaacaagttaaaattgagtctctagccaagagcttagaagatgctctgaggcaaactgcaagtgtcactctgcaggctattgcagctcagaatgctgcggtccaggctgtcaatgcacactccaacatattgaaagccgccatggacaattctgagattgcaggcgagaagaaatctgctcagtggcgcacagtggagggtgcattgaaggaacgcagaaaggcagtagatgaagctgccgatgcccttctcaaagccaaagaagagttagagaagatgaaaagtgtgattgaaaatgcaaagaaaaaagaggttgctggggccaagcctcatataactgctgcagagggtaaacttcacaacatgatagttgatctggataatgtggtcaaaaaggtccaagcagctcagtctgaggctaaggttgtatctcagtatcatgagctggtggtccaagctcgggatgactttaaacgagagctggacagtattactccagaagtccttcctgggtggaaaggaatgagtgtttcagacttagctgacaagctctctactgatgatctgaactccctcattgctcatgcacatcgtcgtattgatcagctgaacagagagctggcagaacagaaggccaccgaaaagcagcacatcacgttagccttggagaaacaaaagctggaagaaaagcgggcatttgactctgcagtagcaaaagcattagaacatcacagaagtgaaatacaggctgaacaggacagaaagatagaagaagtcagagatgccatggaaaatgaaatgagaacccagcttcgccgacaggcagctgcccacactgatcacttgcgagatgtccttagggtacaagaacaggaattgaagtctgaatttgagcagaacctgtctgagaaactctctgaacaagaattacaatttcgtcgtctcagtcaagagcaagttgacaactttactctggatataaatactgcctatgccagactcagaggaatcgaacaggctgttcagagccatgcagttgctgaagaggaagccagaaaagcccaccaactctggctttcagtggaggcattaaagtacagcatgaagacctcatctgcagaaacacctactatcccgctgggtagtgcggttgaggccatcaaagccaactgttctgataatgaattcacccaagctttaaccgcagctatccctccagagtccctgacccgtggggtgtacagtgaagagacccttagagcccgtttctatgctgttcaaaaactggcccgaagggtagcaatgattgatgaaaccagaaatagcttgtaccagtacttcctctcctacctacagtccctgctcctattcccacctcagcaactgaagccgcccccagagctctgccctgaggatataaacacatttaaattactgtcatatgcttcctattgcattgagcatggtgatctggagctagcagcaaagtttgtcaatcagctgaagggggaatccagacgagtggcacaggactggctgaaggaagcccgaatgaccctagaaacgaaacagatagtggaaatcctgacagcatatgccagcgccgtaggaataggaaccactcaggtgcagccagagtgaggtttaggaagattttcataaagtcatatttcatgtcaaaggaaatcagcagtgatagatgaagggttcgcagcgagagtcccggacttgtctagaaatgagcaggtttacaagtactgttctaaatgttaacacctgttgcatttatattctttccatttgctatcatgtcagtgaacgccaggagtgctttctttgcaacttgtgtaacattttctgttttttcaggttttactgatgaggcttgtgaggccaatcaaaataatgtttgtgatctctactactgttgattttgccctcggagcaaactgaataaagcaacaagatgaaaacaaaaaaaaaaaaaaaaaaaaaaaaaaaatgaggcggcctgggccccaaaagagttttagagaccccaatcgcgtggggggcggcgagggcccccagtagaggtcaagttgcacaaatggggccatagcgtggttcccagagaagacaactcgcgggcgaggcacatcgtggcgtgcgcttccttccaccaaataagaacaagcccccggggggccaccggaccggtttgacaaaaacacgaaggcgggtcgggaggccatacaggggatctcacacggggtccacagcgagtcgaaatcaattcgccggcacnnn

SEQ ID NO: 22354 - DNA, 2538 bp, Homo sapiens; identical to SEQ ID NO: 20316
  misc_feature 2538: n = A,T,C or G

SEQ ID NO: 22355 - DNA, 1120 bp, Homo sapiens; identical to SEQ ID NO: 22234
  misc_feature 1, 1119, 1120: n = A,T,C or G

SEQ ID NO: 22356 - DNA, 975 bp, Homo sapiens
  misc_feature 975: n = A,T,C or G
gacatcctcatagagaatctcagtggattaaggcagctgtaacttgttttggactgcagttacagaggccaaggtatagaagaaaggtaacgagagtgccaggataggaaagttctgagatgaagacaacctggcagctcaaagtcacagttcttgccctgttgcttcagaccaaattccctctacagcctgaagcaagctggccttgcccacagagaactgcctttctccatatgcagccacctccctcagggcaattccttgccttggatcctcactgcacctgcttcaccagcatcttggctcttcatctccctacccccagagaagctttccatttaggagctcgcaacgcccttcctaggccatgccagtgttttaatttgctggagactagcccacaggaacaatagtggctgtgtgtagacacgatggccatggcacacactcatggttttcacaacttcatatgaatacacagactgggctccctggcggactgagggtagctgagatggcacattctccttccacagaagaatgatttcttgttttcaaacgcctgctgggtggcacttacggctttcacactagaaccagctcagctggctctttgtgtttgtatactttaggtagaaggtacattcagaaagtgaccctagagagactgccccaaagagtgaaggcctctggggagctctgagcaggtcactctggatcttagccaactcaccacagatgctgggctggcgcctctggagcaaggcacccctcaataccaaccttcccgagggaggaacagcataacatatctcacccacagacccatgtgatgggagggatgcccaacagtgctgtagggtaaagaaaaatctacctctgtgaagagcaagaactagtattgaagtgactagatgccacagtcctgctgtaagagctaaggagcagaggttcctctctgtgtggagagaggan

SEQ ID NO: 22357 - DNA, 692 bp, Homo sapiens
  misc_feature 683, 684, 685, 686, 687, 688, 689, 690, 691, 692: n = A,T,C or G
acgcggggccatcgcaaagttgttaaccccagagtcttctggctgtgctgcctcctctgcttttaatcttctgtggatatttctccgatttcccccaaaagcccacagatcctgggggaagccaccccattcggccaccgatcatggaagaaagtattactttttatttaccaaacattttaaagatgttggaagatccatatgctgcctggaggctgttgtttctagggacacaagtatccagcctatattgttacaattttttttcaagaactgccgtcttctttgcctgcactaatggaacatcatcttcagcgggctatttcagcacagcaggtgtatggcgagaagagggataatatggttataccggtcccagaggcagaaagtaatattgcttactatgagtctatatatcctggggaatttaagatgccaaagcagctcattcacatacagccttttagtttggatgctgaacagcctgattatgatttggattctgaagatgaagtatttgtgaataaactgaaaaagaaaatggacatctgcccattgcaatttgaggagatgattgaccgcctagaaaaaggcagtggtcagcagccagtcagtctgcaggaagccaaactactgctaaaagaagatgatgaactaattagagaagtttatgaatattggannnnnnnnnn

SEQ ID NO: 22358 - DNA, 1120 bp, Homo sapiens; identical to SEQ ID NO: 22234
  misc_feature 1, 1119, 1120: n = A,T,C or G

SEQ ID NO: 22359 - DNA, 290 bp, Homo sapiens
  misc_feature 286, 287, 288, 289, 290: n = A,T,C or G
aggtaccgtgttttaagcttagttcagtctcaagtgtttgcagccacatctgaagaccaataaagcaactgctggtttatcctttgggagctgacagaatttcttctcccaaatacatacacagtaaaatcataagccttccaacatcgttactgttgcactttacgcagtcaagtgtccaactcctcagatgagcaagtggtcggccctaaaaagggcctttgggatcgaaacgtgcaaagctggagcggcggcctagcctccgaagccgtacctgcccgggcgnnnnn

SEQ ID NO: 22360 - DNA, 1120 bp, Homo sapiens; identical to SEQ ID NO: 22234
  misc_feature 1, 1119, 1120: n = A,T,C or G

SEQ ID NO: 22361 - DNA, 1120 bp, Homo sapiens; identical to SEQ ID NO: 22234
  misc_feature 1, 1119, 1120: n = A,T,C or G

SEQ ID NO: 22362 - DNA, 1120 bp, Homo sapiens; identical to SEQ ID NO: 22234
  misc_feature 1, 1119, 1120: n = A,T,C or G

SEQ ID NO: 22363 - DNA, 397 bp, Homo sapiens
  misc_feature 392, 393, 394, 395, 396, 397: n = A,T,C or G
acgcgggggagtttcacgcgcgtatgctttgcccgctatggccgcagtcaaggagcctttggagttccatgccaagcggccttggcgccccgaggaggcagtagatgatcccgacgaggaggatgaggataatacttagtgaagccgagaatgggttctccctggaggaagtgttacggctcggaggcaccaagcaagattaccttatgctggctactttggatgaaaatgagggaagtgataaaaggaggcaaaaaagggagccaatcgatgaccttttacaagggggaattggggagccttttttttaaaaaatttttattttggggaaaagttttaaaaaagctttcttttttttgggaaaaaataaaaccccctttaaaaaaaaaaannnnnn

SEQ ID NO: 22364 - DNA, 150 bp, Homo sapiens
  misc_feature 146, 147, 148, 149, 150: n = A,T,C or G
gggctggcgcggtgcatcgtgggcactgtagtttccgccgcgtttatggccgcgttaagtctgagtgccgctttgagttgttgaatgaagtcatcttcctctcgtgagtgcctggccgcgtcggccgccaccgcggggagctcaannnnn

SEQ ID NO: 22365 - DNA, 1120 bp, Homo sapiens; identical to SEQ ID NO: 22234
  misc_feature 1, 1119, 1120: n = A,T,C or G

SEQ ID NO: 22366 - DNA, 3830 bp, Homo sapiens; identical to SEQ ID NO: 22353
  misc_feature 1, 2, 3, 4, 5, 6, 7, 8, 9, 10, 11, 12, 13, 14, 15, 16, 17,18, 3828, 3829, 3830: n = A,T,C or G

SEQ ID NO: 22367 - DNA, 975 bp, Homo sapiens; identical to SEQ ID NO: 22356
  misc_feature 975: n = A,T,C or G

SEQ ID NO: 22368 - DNA, 2593 bp, Homo sapiens; identical to SEQ ID NO: 22305
  misc_feature 1, 2582, 2583, 2585, 2586, 2587, 2588, 2589, 2590, 2591,2592, 2593: n = A,T,C or G

SEQ ID NO: 22369 - DNA, 1088 bp, Homo sapiens
  misc_feature 1, 2, 1081, 1083, 1084, 1085, 1086, 1087, 1088: n = A,T,C or G
nngtggttgtttgttgggcgcggggtcgtcctatcgaccgcctggttagccgccggtttggaccacttgccgttttgccggtgcttttcgtcgtgggcccccaagatgtcttaagtttggggccgcccgaacttttgtgttgtttttttttgtttttgattctggttattacactctatgttggaatgtatgtttcttattgggccatttcagagtaatcttggccacgtcttgtcacaggttctgtctgtactaggcagcaatctaacatggctttcatccacgactccatttcctttcctgtatcagtgcagaaatataggtccgcatgtttggatggctgccttaaaagcatatttgcgattaatgtgatcttcagaggtaagcaaagctatctgaaaactaggtaacagtatgcttcccaggataccctcttctttctcatctctataataaaagaggcaaaggtcagaaagcacaaccagcgtttcttccacgatttcatgccagtactgtcctgtttataaagccaacctcgtctgacaaccggtgcattgggattccttttaattgaatttgacctctttccaaaattatgaactttttttgaagctcgtgaagttctgcctacagggctcattggatgcactgcataatctgaagtcacgttatagttagaagcttcatttatcatacttattggccgttccttcttttcttcagatgtcatggttgcaacagtctgttcattcactacaaaatacaattgtcctgtgatggttgtcctgtgactggatgtttgcaggtcactttcctgttcattatggtttatatagtatcttgcaccttcaaaagtatatgccttcttcccagccagtaggcaaatctgtgctctgccgccggtgtccggtgaccaccgcctcgccggtgacggggtgcagccaggtggtgctcttggcctcctcgttgatgaagaagactcggccgcccctggtgatcccgtaagtccaggaccggggcagggagatccactccaggtttagatccgccgccatgtctgatccctagccgccgccgccgncnnnnnn

SEQ ID NO: 22370 - DNA, 1231 bp, Homo sapiens; identical to SEQ ID NO: 21379

SEQ ID NO: 22371 - DNA, 2192 bp, Homo sapiens
ctctggaagctagaggaaccagacctcatcagtccaacatcaaagacaccatcggaacagcagcgcccgcagcacccaccccgcaccggcgactccaccatgccgccgaagttcgaccccaacgagatcaaagtcgtatacctgaggtgcaccggaggtgaagtcggtgccacttctgccctggcccccaagatcggccccctgggtctgtctccaaaaaaagttggtgatgacattgccaaggcaacgggtgactggaagggcctgaggattacagtgaaactgaccattcagaacagacaggcccagattgaggtggtgccttctgcctctgccctgatcatcaaagccctcaaggaaccaccaagagacagaaagaaacagaaaaacattaaacacagtgggaatatcacttttgatgagattgtcaacattgctcgacagatgcggcaccgatccttagccagagaactctctgggaaccattaaagagatcctgggggactgcccagtcagtgggctgtaatgttgatggccgccatcctcatgacatcatcgatgacatcaacagtggtgctgtggaatggccccagccagttaaggcacaaaggaaaacatttcaataaaggatcatttgtgcttaactggctgggcattccacagcaccactgttgatgtcatcgatgatgtcatgaggatggcggccatcaacattacagcccactgactgggcagtccccaggatctcaatggttccagagagttctctggctaaggatcggtgccgcatctgtcgagcaatgttgacaatctcatcaaaagtgatattcccactgtgtttaatgtctgtttctttctgtctcttggtggttccttgagggctttgatgatcagggcagaggcagaaggcaccacctcaatctgggcctgtctgttctgaatggtcagtttcactgtaatcctcaggcccttccagtcacccgttgccttgacaatgtcatcaccaactttttttggagacagacccagggggccgatcttgggggccagggcagaagtggcaccgacttcacctccggtgcacctcaggtatacctagggcgtgcgggctcccaagccgccacaggtggtccagtccttccctccccacctacacgtgaagaagctaaggcccagaaaggctgaggcttggccggggcggcgcaacaccgggaaggtctctgggaggcagcggctttaagagccccatacggggaaagctttgcacgcgcggcggggccgagggatgctccatcccgcagccccggccacaaccagagcacgcaccgactttgatctcgttggggtcgaacttcggcggcatggtggaggcggctggtgtcggatgaacccggattcgggacgaccgaaggaagttgcaccttggcctccaccatgccgccgaagttcgaccccaacgagatcaaagtcgtatacctgaggtgcaccggaggtgaagtcggtgccacttctgccctggcccccaagatcggccccctgggtctgtctccaaaaaaagttggtgatgacattgccaaggcaacgggtgactggaagggcctgaggattacagtgaaactgaccattcagaacagacaggcccagattgaggtggtgccttctgcctctgcccctgatcatcaaagccctcaagggaaccaccaagagacagaaagaaacagaaaaacattaaacacagtgggaatatcacttttgatgagattgtcaacattgctcgacagcatgcgggcaccgatccttagcccagagaactctctgggaaccatttaaagagatccctgggggacctggccccagtcagtggggctgtaatgttgatgggccgccatccctcatgacatcatcgatgacatcaacagtgggtgctgttggaatggccccagccgtaagttacattttcattgttacagtaggggtgaaaggggggccgcccagtgtattcacagagataagctgggaagttttggaaatggttactggtggggtgggataatccttttaaactttttactgatttttttttctttcccacagagttaagcacaaaggaaaacatttcaataaaggatcatttgacaactgatgaaaaaaaaaaaaaaaaaaaaaaaaaaaaaaattaaaaaaaaaaaaaa

SEQ ID NO: 22372 - DNA, 2361 bp, Homo sapiens; identical to SEQ ID NO: 20124
  misc_feature 1, 2, 3, 2361: n = A,T,C or G

SEQ ID NO: 22373 - DNA, 4305 bp, Homo sapiens
  misc_feature 1, 4303, 4304, 4305: n = A,T,C or G
nataactcaaaattgagacgcttagtaggacccaaagatctttcctggaaacttttttttgagacgaagttgctcaatctcccaggctggagtgcgatggagtgagactcgtctggtttaattggctccaactctgggcattatgttgttgcttccttttctttccttacaaatggatctcaagtattcttttccttgcgtaaccacgtagtccttcgccgcattggggcaaaataatcccttcatttttgtgaaggtaccgtggaaaatatttcatttttcttctcaccggagcaattgtaaatgctatgcggtaagaggagttacctgtggaaaggtggttaagagattaggtaaagaaaaggaaaggacaccaaaataaagtgctgcggaagaatttttgtccagctgtgagacgacgagtgcgtgaagtgaaggcgattgagaggggctgagggaattgtcctctgtggaagggactttcttttggccctaggccccttcctgcccctgtcgtcagcagagagatggaaaacttgatgactagctccaccctaccgcccctttttgcagatgaagacggttccaaggagagtaatgatctggctaccactgggttaaatcacccagaggttccatacagtagtggcgccacatcatccaccaacaatccagaatttgtggaggatctctctcaaggtcagttgcttcagagtgagtcttcaaatgcagcagaaggcaatgaacagaggcatgaagatgagcaacgaagtaaacgaggaggttggtccaaaggaagaaagaggaagaaacctcttcgagacagcaatgcacccaaatccccccttacaggatatgttcggttcatgaatgagcgtcgagaacaacttcgagcaaagagaccagaagtcccatttccagaaatcacaaggatgttaggcaatgaatggagtaaactgcctcctgaggaaaaacagcgctaccttgatgaagcagacagagataaggagcgttacatgaaggaactggaacagtatcagaaaacagaggcctacaaggtcttcagtaggaaaacccaggaccgtcagaaaggcaaatctcataggcaagatgcagcccggcaggccactcatgatcatgagaaagaaacagaggtaaaggaacggtctgtttttgacatccctatatttacagaggaattcttgaaccatagcaaagctcgggaagcagagctccgccagcttcgcaaatccaacatggagtttgaggagaggaatgcagccctgcaaaagcacgtggagagcatgcgcacagcagtggagaagctggaggtggatgtgatccaggagcggagccgcaacacagtcttacagcagcacctggagaccctgcggcaggtgctgaccagcagctttgccagcatgcccttgcctggaagtggagagacacctacagtggacaccattgactcatatatgaacagactgcacagtattattttagctaatccccaagacaatgaaaacttcatagctacagttcgagaagttgtgaacagactcgatcgttagggaatggtcttagaactccaagatgttccataagtgtttttacttgtgaggaatgagaagccatccatggaaatttgaactgagtgggggcagagaaagagtgcagatccctttgcttgtgaaagaattatcagtgagtgaaaggccatcaccccaggaagccaaatgagggagcagcaacatgtatatgagcttcctatggaattgtccttatgtgaagctttgaaggtgtacagccactctcccgggtcttcaggttcctaccatttccatttctgttaaagtggatctgcatatcttcagcttactaggtgacccggatgctgacatctgctgctgcagaaaggaagacttttcattgtaatttcgcttagacccttttatcagtggagctccagttttcttacctagctgtcacttttttaaatgcctctgggggttatttttgctttccttggcccccaccaatttatacatctccattttctgacctctggactaactggttgctcagcaaggttctgaaggagagtttcttgcattggacaggcccagtcttctcccatcattgccctgctgtgactccaaagaaaggagcttcttgctgacagtgccctgtggagcaaggctgtgtttcctaccccacacggtgctcagtgggtgccagccctcagtgtggctttgtgattgctgccctaaaggagaatgctctttccttcctcactggtactgcctgctgttttctaagcattgctcctgcacagacatggagtcccagccccagcaaggctcttctgttcccatctgttgacaatgtcttgtggagcatttttgctgaggaaaaggtcacttgtaaacagaggagaaagggaaagagtacaaagccctaagtttattgtaagtgaaaactgagggaattcctgtcttctttaggagtaatgattcatagatctagataggtggaaatatcattcaaaatagtcacttgagctcacaaaaaaagcaaggaagaattctcatgtcctttgtcttccttctgtagccattaactgctgaatccatgtgaggaagacaggcttcccttccttccccctccttagtgattttttctttaacagcataagtaaagaggactttctggttcatttttgtttgttttgttttgttttgttttgtttacagatgaggtcttcctgtgttgcccaggctggagtgcggtggctattcacagatgctatcatagcacactacagcctacaactcttgggctcaagcatcacgcctagcagtttctggttcctttaacagcaaaaggaaagagaggttctgattcttacctcagggttttttggttgttcattgtttttgtttttgtttttgttttgacactgcagagcacaaggctaaaggttacagctgagatctttggaaccaaaggcagagcaagcagagcccgttgtctgggccccacaccactgcaggcaggtggatagaagtgcggcccctctcatagtatgcccataagtcagggcatagggcagaactacctgtcatgttgctacaccatcctgtcttctcagcatctccttgcctgttttctttattagtccaaaggaaaacaacagcaacaaaatctgtttttaaaatgtcttatatgaacatatatcaaatatccatgcgctgaaacccacataccatcacttggcaattttttagaataagaccccattattatctattgctataaacctagccagttctcttgctcttctgtattttcctatttccctgccatcatctgctatttctgccacttctcttagactccttgtctgcaaagcccaagctagaactcactgtctatggcagaaggacatccagagcccattctggagttttgttttttccttctgccagatgctttgtgtcctgtcttccttcctcctcatatttctgtttctcatttgtgttcagttttgtgcagcattgctagcactgcttttgtgaccagaaaaggccataacatggtccaggatcatcattcttctgactctagatgggacacttgacagtgacttgaaacatttgcatattcaggaatgcatgagatttcaagagagcctacagtatgaaatcattttcacaaaataagcagcttgcttctgaaatgctgtctttcccagtagctactcacctgcctctggtggctgggattcagatgccacaaaactgtcagtatctatagaccaggtctgtgccacctcctctctcctctgtgctcagtgaggaggcagtaaatgaagttacaggctagcacaatacctaactcatgtttcccagtacacctgtagatattactgtacttttatgttctcaagaaataagttgttgcctattcagtgttacagatttctttgtttctttttaattaaaatacaagaagcagctgaggaaagggagacaaggtattttatttctgactgattttagaaaaaacttgtgtacatgtgtttggaactgttgaaatgccaagttttctgtataagtgtttttgtaattaaactttcagattttctttgttttttaagaagttgatgtgcttgtttgacatttgtctcattaaaacttttctacgttgaagccccaacctcacctcaccttcccccatctcccccctatatcgtcccattcccacatctccctggcccctcctcttcccctctctctccccnnn

SEQ ID NO: 22374 - DNA, 1120 bp, Homo sapiens; identical to SEQ ID NO: 22234
  misc_feature 1, 1119, 1120: n = A,T,C or G

SEQ ID NO: 22375 - DNA, 874 bp, Homo sapiens
  misc_feature 1, 2: n = A,T,C or G
nnagcgacagcgcttgcctggagctcagcgcagagagtcgaatgatcttggatgcctttgcccagcagtgcagtcgagttcttagcctcttaaattgtggaggaaaactcctggactccaaccattctcagtccatgatttcttgcgtaaagcaggaaggctcaagttacaacgaaagacaggagcactgtcacattgggaaaggggtccacagtcagacctcagacaatgtagacatagagatgcagtatatgcaaaggaaacaacaaacttctgcctttttgagggttttcactgactctctacaaaattacctgctctcgggaagctttccaactccaaacccctcgtcagccagtgaatatggccatctggccgacgtggatcctctgtcaacctctcctgtgcatacattaggtggctggacttccccagcaacgtccgaatcccatggccacccatcttcatctacactgccagaagaggaggaggaggaggacgaggaaggctattgtcctcgatgccaagagctggagcaggaggttatttcactgcaacaagaaaatgaagagctcagaaggaaattagagagcatcccagtgccctgccagaccgttttagattacttgaagatggttctgcagcaccacaaccaactcctgataccacagccagctgaccagccgacagagggaagcaagcagctgttgaacaactatcctgtctacataacgagcaaacagtgggatgaggctgtaaattcttcaaagaaaggtgggagacggctccttcgatacctcatcagatttgttttcacaaccgatgagcttaagtacctcggccgccaccgcggggagctccaattcgccctata

SEQ ID NO: 22376 - DNA, 983 bp, Homo sapiens
  misc_feature 983: n = A,T,C or G
cgcgtccgcttgaacttctgacctcaggtgatctgcccaccttggcctcctaaagtgctgggattacaggtgtgagccactgtgcccggccacatacatctttcaaaaagaaatactagtgagaagggccatccactctccgtacatcctctcctgtgatttgctgtgagacgtatggctgcctttgggaagctccttgtatgagaggggacagaacctgagtctgagaagcagagctcagaccctaagggagaatgggccactgccccagggagctccctgaggttgacgggcaactggataacacactctgctaaatggaagttaatgactgaaagtgaatcatgtgcttgctgtaaggaaattatgcaaacttcactgtagtgagttctttcaggttctcttgggtatggggagacatggaccagaataagccttctctagcttgctcagagtgccaaggtcctcagtgtctgggtgaaggatatgacaataccctcctctctcccttcttggcctcaggatgtccctttggcttgatctagagcctgtctgaattaaagtctctgcccctcacctcacctctagattaaagttgtctcccagtgaggaaacactctccagaaggcatgtggggggagtagcctgggtgctgcaaatgggatgaccccctcctcactcctattgcatcttctcctgcccctacccccagctgccctgtcaaaccctgttcctgaccgatgaggagaagcgtctgctggggcaggaaggggtttccctgccctctcacctgcccctcaccaaggcagaggagagggtcctcaagaaggtcaggaggaaaatccgtaacaagcagtcagctcaggacagtcggcggcggaagaaggagtacattgattgggctgagagcaccaggggggccagcccgttctgcacagaaccaagaattacagaaaaagtccaggagttgagaggaccagcan

SEQ ID NO: 22377 - DNA, 886 bp, Homo sapiens; identical to SEQ ID NO: 21881
  misc_feature 1, 2, 3, 4, 5, 6, 886: n = A,T,C or G

SEQ ID NO: 22378 - DNA, 685 bp, Homo sapiens
  misc_feature 118, 119, 120, 121, 122, 123, 124, 125, 126, 127, 128, 129,130, 131, 132, 133, 134, 135, 136, 137, 138, 139, 140, 676,677, 678, 679, 680, 681, 682, 683, 684, 685: n = A,T,C or G
agatggtgtatgaaggagttggagttgttgaaaccaaggtgtccatgatccctccccactgaccttttctaagaaaattcttgtgcccgcattggtattaaatcctcgcattcagtcnnnnnnnnnnnnnnnnnnnnnnngcggggagagccaccgtctctccagacgcggccccagcgcccactggggatggcaaagacgacatccggtgcgccgaggctgctcacaaaatctgcccccgcaggttgagagaggaggggatccaattgcctgtgaggaggacacggctcctgggtggaccctgcagattgtgaagttcaagtcacagctcctgggaaggtctctgtgtgtaaagatcatgggggtgagacagattcagggaccacactctgctctgctctggacctcggccggccgccccggcggccttgtgaccaggacacttagaagaagcatggaccctgcaagagggtaggttcggagagtgagatgagcacgcttgagggattaacgtgtaacttgaaccactgcctctgtctcccaaagtgctgggattacaggcctgagccaccgcgcccggccaggtgcgtccttctttctccctttccagggagaatgctctgctcttcttcctgctggatccctcctctacctgcttctctcccacctactgcannnnnnnnnn

SEQ ID NO: 22379 - DNA, 1614 bp, Homo sapiens
  misc_feature 32, 71, 141, 937: n = A,T,C or G
aaacaggaaaggtaagtggcctaaaatttttntagtattttcaaaatgacccagttacaataggaaatttnttcttgtactattgtcactaatcccgactcaatatcctttaaaggacaaagatgcatgcataagtaaaantatgacaggtcacaatcacgccggggtggtcctggggcgaggcccaagttccctgcacgcgccggcacaagcacacacactgtgacggggaggacgtttacgtaccatgtccacaccactccagacttggtgagcgccagtaggaactgagctccacactcaatctggcacgccccctgtccatttagtctctcaatgttctggggaatgttgcagccttcacttccgccccggcccaattttccaaagtcaccatcaccccaggaaaataccaaacctaggtttaaaaatagggaagggaagggagagaagaaaggaaagataaagaaagcccaacctccttccaaaatgtcatgagaatcttgagcacatatggtccttggcatgaccacatgacctgcagagcccctgttatagaactcatttttatattttccttagtataacagttaatataatatgtcatttttgttaatagtgtctttttgtcattttactttttaaaagattttattgaaatatacatacaggaaagtgcatctatcataagtgtgcaaattgatgaattctaaaatctttattgtacctgtttagcacctagattgacactgaacataactaacaaccagaaatctccgtgtactcccttcctgtaactacccctgcgcccgaccaaatcactctcttctaacagcataactttgtgtgactagcttttttaatgtcattatatttgtgggattcgtttgtacagttgcatattagtttgcagatccctcactctcatttctatatnggattatattgcataaacgtaccacactttatccaactactgttaaatatttgtgcattttctacttgggggtgatttcaaatagtgctgctatgaacattcttgtaaatgtcttttggtgaacatatgcaacacatatatgcgttgttgttggttcccaggaggggcattcctgggtcataaacaatgcgtgtgttcaggtttagtacagtataatgccaaacaggtttccaaagtgtttgtgccactttacatacctgccattattgaaaaagagttctgtttgctccacattgtcaccaatacttgatattttctgttttttttttcttttaaaccgtactagtgggtgtgcagtgatattgcaatgtggttttaatttgcatcttccttgtgacaaccttgattactgtaagccacttggaaatgtgatttaaattcatataaagatatagtagcaaaacgcatactacgttactttcgtatccagaaagtttagatagaatgatttctatgtaagcttttactgtgtagtctgagtccatgaatattgattacaaaaaacacatctgtaggtgagttacaatacctcacttataattccaaattcatgttgtgttagctcaatatttttcaaataatttttgcatgcaattttcaccttctttctgagtagt

SEQ ID NO: 22380 - DNA, 1189 bp, Homo sapiens
  misc_feature 1, 2, 1183, 1184, 1185, 1186, 1187, 1188, 1189: n = A,T,C or G
nncctgtataacggggtgctcaaacaccaatttttctcaggattactgaaaaacttaaatatacaggccaggtgtggtggctcactgcctgcaatcccaacattttgggaggctaaggcgggccgatttcttgagctcgagtttgagaacagactgtgcaacatgacggctccacggagctttgccacttgtacccgagtttttgattctcaacatgtccgagactgctcctgccgctcccgctgccgcgcctcctgcggagaaggcccctgtaaagaagaaggcggccaaaaaggctgggggtacgcctcgtaaggcgtccggtcccccggtgtcagagctcatcaccaaggctgtggccgcctctaaagagcgtagcggagtttctctggctgctctgaaaaaagcgttggctgccgccggctatgatgtggagaaaaacaacagccgtatcaaacttggtctcaagagcctggtgagcaagggcactctggtgcaaacgaaaggcaccggtgcttctggctcctttaaactcaacaagaaggcagcctccggggaagccaagcccaaggttaaaaaggcgggcggaaccaaacctaagaagccagttggggcagccaagaagcccaagaaggcggctggcggcgcaactccgaagaagagcgctaagaaaacaccgaagaaagcgaagaagccggccgcggccactgtaaccaagaaagtggctaagagcccaaagaaggccaaggttgcgaagcccaagaaagctgccaaaagtgctgctaaggctgtgaagcccaaggccgctaagcccaaggttgtcaagcctaagaaggcggcgcccaagaagaaataggcgaacgcctacttctaaaacccaaaaggctcttttcagagccaccactgatctcaataaaagagctggataattttttaaaaaaaaaaaaaaaaaagaccttgggggatttgttgcggtgggaaaaaagggtaggaaatggcgctggcatataggttccggacccgttttggaagggtaattggggcccaaatggagcggtaaattcgaagcggttacgttattttcgtaaagaggaagaaaagaaaaagaaagaaaaaaaggaaaagagacgaagaaggaagaagaggaagaggaacaagaaggaagaaaagagagagaagtacnnnnnnn

SEQ ID NO: 22381 - DNA, 1120 bp, Homo sapiens; identical to SEQ ID NO: 22234
  misc_feature 1, 1119, 1120: n = A,T,C or G

SEQ ID NO: 22382 - DNA, 1120 bp, Homo sapiens; identical to SEQ ID NO: 22234
  misc_feature 1, 1119, 1120: n = A,T,C or G

SEQ ID NO: 22383 - DNA, 1120 bp, Homo sapiens; identical to SEQ ID NO: 22234
  misc_feature 1, 1119, 1120: n = A,T,C or G

SEQ ID NO: 22384 - DNA, 1643 bp, Homo sapiens; identical to SEQ ID NO: 21150
  misc_feature 1, 2, 3, 4, 1615, 1616, 1617, 1618, 1619, 1620, 1621, 1622,1623, 1624, 1625, 1626, 1627, 1628, 1629, 1630, 1631, 1632,1633, 1634, 1635, 1636, 1637, 1638, 1639, 1640, 1641, 1642,1643: n = A,T,C or G

SEQ ID NO: 22385 - DNA, 2813 bp, Homo sapiens
  misc_feature 1, 2812, 2813: n = A,T,C or G
nacgagttggtttgggagctgccagtctcctgggaggatcgcagtcagcagagcagggctgaggcctgggggtaggagcagagcctgcgcatctggaggcagcatgtccaagaaagggagtggaggtcaaccacagagtggtactgcttccacttccaacataacggatggaccccttcgaggacacgctgcggcggctgcgtgaggccttcaactgagggcgcacgcggccggccgagttccgggctgcgcagctccaggcctgggccacttccttcaagaaaacaagcagcttctgcgcgacgtgctggcccaggacctgcataagccagctttcgaggcagacatatctgagctcatcctttgccagaacgaggttgactacgctctcaagaacctgcaggcctggatgaaggatgaaccacggtccacgaacctgttcatgaagctggactcggtcttcatctggaaggaaccctttggcctggtcctcatcatcgcaccctggaactacccactgaacctgaccctggtgctcctggtgggcgccctcgccgcagggaattgcgtggtgctgaagccgtcagaaatcagccagggcacagagaaggtcctggctgaggtgctgccccagtacctggaccagagctgctttgccgtggtgctgggcggaccccaggagacagggcagctgctagagcacaagttggactacatcttcttcacagggagccctcgtgtgggcaagattgtcatgactgctgccaccaagcacctgacgcctgtcaccctggagctggggggcaagaacccctgctacgtggacgacaactgcgacccccagaccgtggccaaccgcgtggcctggttctgctacttcaatgccggccagacctgcgtggcccctgactacgtcctgtgcagccccgagatgcaggagaggctgctgcccgccctgcagagcaccatcacccgtttctatggcgacgacccccagagctccccaaacctgggccgcatcatcaaccagaaacagttccagcggctgcgggcattgctgggctgcggccgcgtggccattgggggccagagcaacgagagcgatcgctacatcgcccccacggtgctggtggacgtgcaggagacggagcctgtgatgcaggaggagatcttcgggcccatcctgcccatcgtgaacgtgcagagcgtggacgaggccatcaagttcatcaaccggcaggagaagcccctggccctgtacgccttctccaacagcagacaggttgtgaaccagatgctggagcggaccagcagcggcagctttggaggcaatgagggcttcacctacatatctctgctgtccgtgccattcgggggagtcggccacagtgggatgggccggtaccacggcaagttcaccttcgacaccttctcccaccaccgcacctgcctgctcgccccctccggcctggagaaattaaaggagatccgctacccaccctataccgactggaaccagcagctgttacgctggggcatgggctcccagagctgcaccctcctgtgagcgtcccacccgcctccaacgggtcacacagagaaacctgagtctagccatgaggggcttatgctcccaactcacattgttcctccagaccgcaggctcccccagcctcaggttgctggagctgtcacatgactgcatcctgcctgccagggctgcaaagcaaggtcttgcttctatctgggggacgctgctcgagagaggccgagaggccgcagaacatgccaggtgtcctcactcaccccaccctccccaattccagccctttgccctctcggtcagggttggccaggcccagtcacaggggcagtgtcaccctggaaaatacagtgccctgccttcttaggggcatcagccctgaacggttgagagcgtggagccctccaggcctttgctctcccctctaggcacacgcgcacttccacctctgccccatcccaactgcaccagcactgcctcccccagggatcctctcacatcccacactggtctctgcaccacccctctggttcacaccgcaccctgcactcacccacagcagctccatccactgggaaaactggggtttgcatcactccactgcacagtgttagtgggacctgggggcaagtcccttgacttctctgagcctcagtttccttatgtgaaagttgctggaaccaaaatggagtcacttatgccaaactctaataaaatggagtcggggggccacatagaagccctcacacacacatgcccgtaacaggatttatcacaagacacgcctgcatgtagaccagacacagggcgtatggaaagcacgtcctcaagactgtagtattccagatgagctgcagatgcttacctaccacggccgtctccaccagaaaaccatcgccaactcctgcgatcagcttgtgacttacaaaccttgtttaaaagctgcttacatggacttctgtcctttaaaagcttccccttggctgtggccctctgtgtatgcctgggatccttccaagcactcatagcccagataggaatcctctgctcctcccaaataaattcatctgttctggagagaaaaaaaaaaaaaaaaaaaaaaaaaaaggtccccccggcccctttaaaaacaaggggaccccccgggggggggaaatttaatttaaccttttttaacccccccccccctgggggggggccccgccccccctttttttcccttttaaggggggtaaaatcccccctggggaaaaaaaggggaaaaagggnn

SEQ ID NO: 22386 - DNA, 886 bp, Homo sapiens; identical to SEQ ID NO: 21881
  misc_feature 1, 2, 3, 4, 5, 6, 886: n = A,T,C or G

SEQ ID NO: 22387 - DNA, 1120 bp, Homo sapiens; identical to SEQ ID NO: 22234
  misc_feature 1, 1119, 1120: n = A,T,C or G

SEQ ID NO: 22388 - DNA, 807 bp, Homo sapiens
  misc_feature 103, 104, 105, 106, 107, 108, 109, 110, 111, 112, 113, 114,115, 116, 117, 118, 119, 120, 121, 122, 123, 124, 125, 126,127, 128, 129, 130, 131, 132, 133, 134, 135, 136, 137, 138,139, 140, 141, 142, 143, 144, 145, 146, 147, 148, 149: n = A,T,C or G
  misc_feature 150, 151, 152, 153, 154, 155, 156, 157, 158, 159, 160, 161,162, 163, 164, 165, 166, 167, 168, 169, 170, 171, 172, 173,174, 175, 176, 177, 178, 179, 180, 181, 182, 183, 184, 185,186, 187, 188, 189, 190, 191, 192, 193, 194, 195, 196: n = A,T,C or G
  misc_feature 197, 198, 199, 200, 201, 202, 203, 204, 205, 206, 207, 208,209, 210, 211, 212, 213, 214, 215: n = A,T,C or G
acatggtaaaaagttgtggcaaagatggcttccatatccgggtgcggctccaccccttccacgtcatccgcatcaacaagatgttgtcctgtgctggggctgnnnnnnnnnnnnnnnnnnnnnnnnnnnnnnnnnnnnnnnnnnnnnnnnnnnnnnnnnnnnnnnnnnnnnnnnnnnnnnnnnnnnnnnnnnnnnnnnnnnnnnnnnnnnnnnnnacaagtatattttccagttatttacctgttgaccccagaatttgttagattttttaaaaaacaatttctaaatagtttctgtttgaaactagttgcgtccagttcagatcaaggtctgcatgctttctagtctttattatttattggaaaacttcggtacctaatacaaaagtttgattgtttcagtgtgtacctggtaaagaatcagtgaccttttaccttaacatcaaaatgtagtttaaccagttaatgtatttttcagttttctttccttatgtcatctgtgaacatcttgagctgtgagctattaagtgcatgtttccctcaaggccctctggtccattctggactaatgttgaaagatgggatggattggcatggaactgttggggtgatcagacccaacaccgggctgtgggggctaagaagtccagtggagtcaaaggaatgagaaaagacaagttaagaatgcataaggtgggtccagggggccaacgctagtatggaggctgcaatagacctgagctctggaagcccacactattagtgatcaaacaaagcaccaggtggtgaggatgtggggtttgaaagg

SEQ ID NO: 22389 - DNA, 345 bp, Homo sapiens
  misc_feature 1, 2, 345: n = A,T,C or G
nnagtgtgcgaggggaacagtgtgaaaacctggctaaagggtttgggtggagacctttgtgagagtagaataggattgggattataggtgtcaaagccagtgagcatctcacccctccgttcccttctctacgccaccctgtccctctccgaaccctgcctggagacactggatcatcatttctgggaccatgtcattctacttttgcttgtgttccttccagtctgccatgcacggactgatcatgggcggcctggaagtgatctcaatcacagacgacaccccaatcccacacaacggctgccgccccaagaaggctcggaagctgtgatgggaaggaggccn

SEQ ID NO: 22390 - DNA, 1572 bp, Homo sapiens
  misc_feature 1569, 1570, 1571, 1572: n = A,T,C or G
accatttatattcagctgtctgctgggcaggtccaacttggcatttcttggctgtatctctgaaggaaagtcatcttaatctctatgagcctccatttcctcagctgtaaaatgggaagatcttcctcacactgctgtgaggaagcggattttctgacgcatatgaagagtgagaactgtctacatctaagtcttctttgagaacaataccagctgagcggctatttacattccagcttcttttgagaatctctgaagatgattaagtcattgtcagctggcccagaaccatatcctgctccacaagcctcgtccttggcaagaagttgcacctgcccagagagaaaaccttttgaaactggcacaaaggcactggagagactggcagggccccctacttgacgatctggctcatccatctgcacactgaccacgctaagagctgtctgcagtgatggaaaccttctctagctgtgctgtcctctatagtggcaccagctgcctgtggctactgagcacttcaactgtggctgcagagactatgttaaattgtatttaatcataattaatttaattgtaaacaactacatgtggctagtggtttctgtactgggcactgcaggtgcacatttcctgctggccatggacagtaagctccataagagactaattgtgcctggtttgcttataggcttatcctcagcacctgcaccagcctagaatatgattggcactctattaattaaaagttcccaggtaaatgaattagtggattctctgtttcctccactatgccacaactccttaagggcagagatggtgtcttcaaaaaaaaaaaatttcgggtcaaaaacacataagatctaccaccttcaccatttgtggtgtccagtccagtagtattacctacacttcacttttgggactacccaaacaaacagatcgtgtcttttaacattctttagggaccccaggcaccacggtggtctggcacccataatcttagtaaacactggcagagacacatgcgctttgggccaacggcccaaaaacacacagggttcaggtgccatccataacacacgccttttacaacactccaccggggggctttaacaaacaaccctggaattgaacggctgttgaagtctagacgaaactggcgctccacacgaacaggttacaagcataacgctagttcagaaatcagggcacatcacggccagggccacggagggctcaacacctggtacacccccagcaacctcaggggaaggcacagcgggaggacaactcgacgaacaggcgctcgaaaaacagcccggggcacatggtggcgtgaaaatcccgaccaagccaaaaatatcccggcaaggcggagcgggcccgtggcccagaacatgtggacgcgtagggcatagcaactggtgtggtaccgtgtgaacgagtcgagtacacgaaagcgcaaaacaccacactgatgaaaacgcactcgctaaaaaaaaacagaaaaagtgtaacacgatctgtgtcgccccaatacgaccacaaacaagagcgcaacgacannnn

SEQ ID NO: 22391 - DNA, 1337 bp, Homo sapiens
  misc_feature 1, 2, 3, 4, 1333, 1334, 1335, 1336, 1337: n = A,T,C or G
nnnnggtctctgtgttggctgtgatcctgttctcgctccgtgttgtttcgttgttttcctccttccttgcttgcctgtggtgtcgtcgtcgcctttgtcgtttctctgtttcgttttgtctgtccttttgctgtgcgttggtcgttctgtcgtcctttgcgcgttcggtcgtgagttcttcgctgtgccccgccacgccgcgtggttcgtcgctgcttgttggggtgttttcgtttggtgggtgtttgtctccgagatttggtttgtctgtcgtgggtccgtcggtggttgaggggcgatgctgtttctggtggtgcagtcgtccgagggctggtgccggagtcgttcggtgccatgtgttgatagtgtagcttgcttgttgtgtgtgggtgcgtggtgtgtcttttctttggaccgattttgtttagcctgattgaatgtcggctctgttgcctggctttcgggtggtgaggagagtaagaagcgcccaggcgaggacctggctgtcgtccccagagtgaaaatgactgtgatgccggatgttctgcagcagcagctggtccaggaactccagggccttctcctgcacagtgctctcgcagtccatcaccaccgggaccaccccccgcaaccaggctttctggatctgcacgcatctaggctgagccataaggagttcagtaagagactggagggcctgcttccggacagacactgcagggtcccgacactggtcctgcagaatccacaggtcttccttcatgcctgagacatcacagtgtttcaaaatactcactaatacctgcagtgcagacttcctaacgttggtcttctcatccctgatcctccttctcagcattgccatgacacatctttctccagatccaactgtttcaccactgctgtctatgttgatctcccctgagggttcggaacggttagatgtctgcctttggtaggaaaaagctgatgaatttctcagtaaggtaccaggctgactctctattacagataacgtaggactgttaatcaggagctccaggatactctccgacgcactggtaacagtcaactccagacagtgtgcaaagctggacagtgccttgctgcggacagtaggcgccttgtctaagcaacgatcaaacataatttcctgcaccaggaacttatgctttaagaacttctgatgctccaaggagagggtgttatccacctctctttcaggcagttctaacagagctaagacaacatcaagagtaaaaacccggtgtgggatcttggaacttcgggagtatttgtaaagccaggcaatgaacatagcgcggacgcgtgnnnnn

SEQ ID NO: 22392 - DNA, 666 bp, Homo sapiens; identical to SEQ ID NO: 21473

SEQ ID NO: 22393 - DNA, 1643 bp, Homo sapiens; identical to SEQ ID NO: 21150
  misc_feature 1, 2, 3, 4, 1615, 1616, 1617, 1618, 1619, 1620, 1621, 1622,1623, 1624, 1625, 1626, 1627, 1628, 1629, 1630, 1631, 1632,1633, 1634, 1635, 1636, 1637, 1638, 1639, 1640, 1641, 1642,1643: n = A,T,C or G

SEQ ID NO: 22394 - DNA, 1120 bp, Homo sapiens; identical to SEQ ID NO: 22234
  misc_feature 1, 1119, 1120: n = A,T,C or G

SEQ ID NO: 22395 - DNA, 508 bp, Homo sapiens; identical to SEQ ID NO: 21293
  misc_feature 502, 503, 504, 505, 506, 507, 508: n = A,T,C or G

SEQ ID NO: 22396 - DNA, 690 bp, Homo sapiens; identical to SEQ ID NO: 21104

SEQ ID NO: 22397 - DNA, 1643 bp, Homo sapiens; identical to SEQ ID NO: 21150
  misc_feature 1, 2, 3, 4, 1615, 1616, 1617, 1618, 1619, 1620, 1621, 1622,1623, 1624, 1625, 1626, 1627, 1628, 1629, 1630, 1631, 1632,1633, 1634, 1635, 1636, 1637, 1638, 1639, 1640, 1641, 1642,1643: n = A,T,C or G

SEQ ID NO: 22398 - DNA, 2397 bp, Homo sapiens; identical to SEQ ID NO: 22324
  misc_feature 1, 2, 3, 4, 2393, 2394, 2395, 2396, 2397: n = A,T,C or G

SEQ ID NO: 22399 - DNA, 1643 bp, Homo sapiens; identical to SEQ ID NO: 21150
  misc_feature 1, 2, 3, 4, 1615, 1616, 1617, 1618, 1619, 1620, 1621, 1622,1623, 1624, 1625, 1626, 1627, 1628, 1629, 1630, 1631, 1632,1633, 1634, 1635, 1636, 1637, 1638, 1639, 1640, 1641, 1642,1643: n = A,T,C or G

SEQ ID NO: 22400 - DNA, 1643 bp, Homo sapiens; identical to SEQ ID NO: 21150
  misc_feature 1, 2, 3, 4, 1615, 1616, 1617, 1618, 1619, 1620, 1621, 1622,1623, 1624, 1625, 1626, 1627, 1628, 1629, 1630, 1631, 1632,1633, 1634, 1635, 1636, 1637, 1638, 1639, 1640, 1641, 1642,1643: n = A,T,C or G

SEQ ID NO: 22401 - DNA, 4060 bp, Homo sapiens
  misc_feature 4033, 4059, 4060: n = A,T,C or G
acgcggggaggcagccggccagggaagcacggtccaggcggctacattcggcccggccatggcagcggcgcccctgaaagtgtgcatcgtgggctcggggaactggggttcagctgttgcaaaaataattggtaataatgtcaagaaacttcagaaatttgcctccacagtcaagatgtgggtctttgaagaaacagtgaatggcagaaaactgacagacatcataaataatgaccatgaaaatgtaaaatatcttcctggacacaagctgccagaaaatgtggttgccatgtcaaatcttagcgaggctgtgcaggatgcagacctgctggtgtttgtcattccccaccagttcattcacagaatctgtgatgagatcactgggagagtgcccaagaaagcgctgggaatcaccctcatcaagggcatagacgagggccccgaggggctgaagctcatttctgacatcatccgtgagaagatgggtattgacatcagtgtgctgatgggagccaacattgccaatgaggtggctgcagagaagttctgtgagaccaccatcggcagcaaagtaatggagaacggccttctcttcaaagaacttctgcagactccaaattttcgaattaccgtggttgatgatgcagacactgttgaactctgtggtgcgcttaagaacatcgtagctgtgggagctgggttctgcgacggcctccgctgtggagacaacaccaaagcggccgtcatccgcctgggactcatggaaatgattgcttttgccaggatcttctgcaaaggccaagtgtctacagccaccttcctagagagctgcggggtggccgacctgatcaccacctgttacggagggcggaaccgcagggtggccgaggccttcgccagaactgggaagaccattgaagagttggagaaggagatgctgaatgggcaaaagctccaaggaccgcagacttctgctgaagtgtaccgcatcctcaaacagaagggactactggacaagtttccattgtttactgcagtgtatcagatctgctacgaaagcagaccagttcaagagatgttgtcttgtcttcagagccatccagagcatacataaagtgaatcatgcaacgtgttgggggaagttctgcctttctgatcaatcttttgggttcacgtggaaaccaggacttggcaacatgatgtttgactgtaatctcatcacggatatgtatgaatttttacaggttcgtttttgaattgtgagaggcagttcattagcaaagatgtactgggcagtaactaaacacacatgcaaacatgtgaatggtggtttattcctcattctgtggatgtttctatgagccaaaatttgatgtctttttttcaaaattgcttatgaaatttccacacaatcgtagcttataagattggaacgatctcagccaaatattttaggtgtaattcatatgtatttgagtggaggattttttttctcatttttctagtgttaaattttaaccagcattaacatggtagagtggaggagtgagtgtgttcaaagatcaacatatttaacttttaaacactatctcaaagccagcataattaactactttgattgtgggctgacctttgtttttttaacaatcaggcatttttaattagataatccactcatgtatttccccctcactgcagttgtctgcatttttagcctcttttctcttcgttagttgtcagaatatgccttcgtcaaggctcagaggtaacaagacagaaaattcatctgggattttcctgctgtggctggcacattcttctgattaacagacacttgtatgatgctttaggctagttagtgcattttttagcaaacatttatcttaaacatcacagatccactggggggtgcaaggggctactgttagtcctcttgttagatgcagtcactcctcctggtcacctagtgagcagggacagagccaggagtcaagtgcagtgccaaggtgcatgaccctctgagaagtcactgggctgatttgacctccgactcattggttgtgcaaatgccatgtgcagcctttcctgaggccataggagggcttcctgcagctgagatctatgcaggccatcctctcaacaggtgccactccaagggcggtcctcggtgcagcagcatcagcttcacttgtgggggggtgggggaaggggcggtctcagaaatgcaggttcccaggtcccaccctggacttctgaaggggtgtggcatctgtgtttctgatgcttactacaatatgtgaaccactactttagaaaatctgctttaacttggtattcctctaattgtgttccctaggaaatgactgtcccaagagccagtgattattccaggtgttccctggaaaggtcaagtgagtctgggaaacactatgtctgtacacctcttgaaggtgtcgaatgtatgtttatacatcagtggaacccatttttctagcctagcaagtcccaaacacattacactgaagagattttggtgaggaaacttgctggagttttcagggaacactgttctaggcttaggtgaccttaggatcactcaagtagacccttcactccctgcgagaaattaggatgaataactacctgtggcattgttggttctgaacttttacagttcaggcctgctgtgaatctttgatgaagctttaaggtgacactgttgtacaagatgtcagctttgctgaaacgcacattacctggaataagtgctttaattgtagaattagaatgggatttactgtactgttttaaatgagattggcttcagaatccattacagttaccttacatagcacttgatacgtgttaaatgaacatatgaatgtaatttatatattcctagaatttaagttactttgtgagatttgggcctgtccctcaatgccagtttaggatttctttttttctataccttgaaatgattataaaatagattttcatgggaattttaaaaactctatccaaaacatttttggagcattttaaagccccatacacagaagtatacgaaagcacacaaaacactccaagtttcagcagttttagcgccaccattaacccactttgcttgtctcatgaaaaatctttgttaaagtttgtacacaggtaacaaaaagttactttaaaagatatataaagggctgtaagctaattgtggtgtctagtaagtagcataatgagatgtgaggagttggaactttgcgtgttttgcgtattttcatctgcattcagcttcttactctgggtttgtactcgagtgttatttctttacaaatgcccttgtaattaccactctgaagtctgctgactgtgtctcttgaacatacttaggatattctgcacattatggaaaaaggtaaattttagaagtttctgctctactaactgtagatatttatgactctgcgagttatctatttttataaccacctgtggtccattgttcattttaattcacatttcttatgaagtatggtaacagggagggagacacctagattagcagctcaatttgtactacttcagccaatctgtgaatgtaaaaactacactgttgccttgctaggatccaccctcctataatatggaacaaatatctgaatgaaatccaccctaggagacggagtcaaactaaacttgtggtttttcatttaacttttgactacagcatggccccatggcatccacaccaagagggtgttgtgatgaggtgccggtgtgcaaagggaactttagtttttccactggttcttatctgctagccttttacatacatgtgtactatatttgtttatagactgtaggtggatatataatttaaaagcttgatttaataaacatttaaccccctaaacaaaaaaaaaaaaaaaaaaaaaaactcgagggggggcccggtacccaattcgccctatagtgagtcgtattacaattcactggccgtcgttttacaacgtcgtgactgggaaaaccctgncgttacccaacttaatcgccttgcann

SEQ ID NO: 22402 - DNA, 1643 bp, Homo sapiens; identical to SEQ ID NO: 21150
  misc_feature 1, 2, 3, 4, 1615, 1616, 1617, 1618, 1619, 1620, 1621, 1622,1623, 1624, 1625, 1626, 1627, 1628, 1629, 1630, 1631, 1632,1633, 1634, 1635, 1636, 1637, 1638, 1639, 1640, 1641, 1642,1643: n = A,T,C or G

SEQ ID NO: 22403 - DNA, 4515 bp, Homo sapiens; identical to SEQ ID NO: 20660

SEQ ID NO: 22404 - DNA, 733 bp, Homo sapiens
  misc_feature 1, 2, 732, 733: n = A,T,C or G
nncaagcgcgcagtgtgaaactcggcaagcgcgcagtgtcgactccccggtctatgccaggcgcatctcagctaatccaaaagtaaatgagaaacttagaaaaagattgccaattccaaatcaacatatttagagaaaattggaaaaggagaagcttactacagctttatttgaggactttttaaagaacgctgggttctatctgtgagctgcaaatcttggagcaaaaaccagagacattgccagagcaaacaagaacagaaatacaaatggagaactggtcaaaagacataacccacagttatcttgaacaagaaactacggggataaataaaagtacgcagccagatgagcaactgactatgaattctgagaaaagtatgcatcggaaatccactgaattagttaatgaaataacatgtgagaacacagaatggccagggcagagatcaacgaattttcagatcatcagttcttatccagatgatgagtctgtttactgcactactgaaaaataacaacgttatggaacatagacataatgatatgcattatgaatgttgactccttgtcaaagttacttcagactcagataagagaagacatagcatttcttctaaaagaattggatattctcagaacagcataaaaaggtttatattggaacagctgatattggtagtaaaggggttacctgtgaacttccaaaattccttggggcccaaaattacnn

SEQ ID NO: 22405 - DNA, 3265 bp, Homo sapiens; identical to SEQ ID NO: 20201

SEQ ID NO: 22406 - DNA, 1120 bp, Homo sapiens; identical to SEQ ID NO: 22234
  misc_feature 1, 1119, 1120: n = A,T,C or G

SEQ ID NO: 22407 - DNA, 1511 bp, Homo sapiens
atcgaccacccgtcctcaccactgttccttccagccacgaacgacgcaaacgaagccaagttcccccagctccgaacaggagctctctatcctctctctattacactccgggagaaggaaacgcgggaggaaacccaggcctccacgcgcgaccccttggccctcccctttacctctccacccctcactagacaccctcccctctaggcggggacgaactttcgccctgagagaggcggagcctcagcgtctaccctcgctctcgcgagctttcggaactctcgcgagaccctacgcccgacttgtgcgcccggggaaaccccgtcgttccctttcccctggctggcaggcgcggaggccgcacgatgcctggagttactgtaaaagacgtgaaccagcaggagttcgtcagagctctggcagccttcctcaaaaagtcttaggtccgggaagctgaaagtccccgaatgggtggataccgtcaagctggccaagcacaaagagcttgctccctacgatgagaactggttctacacgcgagctgcttccacagcgcggcacctgtacctccggggtggcgctggggttggctccatgaccaagatctatgggggacgtcagagaaacggcgtcatgcccagccacttcagccgaggctccaagagtgtggcccgccgggtcctccaagccctggaggggctgaaaatggtggaaaaggaccaagatggccggccgcaaactgacacctcagggacaaagagatctggacagaatcgccggacaggtggcagctgccaacaagaagcattagaacaaagagatctggacagaatcgccggacaggtggcagctgccaacaagaagcattagaacaaaccatgctgggttaataaattgcctcattcgtaatcctggtctgggtctcttttttgagtctcttgctctgtcgcccaggctggagtgcagtggcgccatctcagctcactgcaatctccgccttctgggttcaaatgattctcctgcctcagcctcccaaagtgctgggattacaagtgtgagccactgtgcccggccagtttacagtattttcttatagaagcccaaatggactaggacattaagacatgagcttgcctgtagtcccagcactttgggaagccgacggcgcagatgggtttgctctcagagtggaagtgctgcaggatacgggccagggagccactgctggccaggtcggtcagggccccaggacagctggggatcaggagggcatggtaccgggcaccatcgatggactcgagcttggcggggctggcgtaagccttgaggcggaagtcttgcacccagcgtgcattgctctcagtcacatccacaaattccatggctttccccccaggggtggccacctgcaggttgaaggcggtgctggccatcgtgaaacagtggaggaaggactgggccgacacaccttcggcggcgccgctggccacgagcagacaggcggctcgtgc

SEQ ID NO: 22408 - DNA, 2171 bp, Homo sapiens
  misc_feature 1, 2, 3, 4, 5, 6, 7, 8, 9, 10, 11, 12, 13, 14, 2166, 2167,2168, 2169, 2170, 2171: n = A,T,C or G
nnnnnnnnnnnnnnttttttttttttttttttttcacaattcagaagaactttaatgcatataccatcattgccactataatagagatagaagatacattaagaaaattcagtttgtatcaataaaacagatcaacacagaacaaggaaacaccatagatatttgtaaatgagatcttctcttttgctactgtgtatatatattcctttatatttatacaaactcacaacacatgacatttcatatttcatatgccactgagaagaggtgtcagtatacagaacataggaagaagaaaaaagcatgagaacatctgcttagttagaatctgatgaggagagacgtgagagctattgttcctctctctgctcaggcctatcgagaggcaactgcagtttttgctaattgttcctcctgaggaattctgctcatactgctatggtacatctcctaggttggcatgagaccagcctggtccccagttgaataaattagaaagagcagttgggggaattgaatatgatatgcaaattgcataaggtgacatctctctgtgtggccacagagatagatcatctgctcctggctccttgatctgagggaagcctctgctgttcaacctgctccagggtttaattctgttggggttgtggggctgacaacaatgtgttcctttccttccttctctcccacaagcagaggaagtcatacgtagacaaaacagatgtttaggttttctcttcagcaggcttcctcttgttcccctctatcacccccagataggtgaagttcagaattaggactgcccactgcggggggaacagaccctcccctgttctgagactaaccctgccatttactgccttctctatgtagtcttggataggttgcttcactgatgcaggcctcagtcttcctcatctgtactggaaataataaaacccacatcacagtgttgtgtcaaagatcatcagggcatggatgggaaagtgctttgggaactgtaaagtgcctaacacatgatcgatgatttttgttataatatttgaatcacggtgcatacaaactctcctgcctgctcctcctgggccccagccccagccccatcacagctcactgctctgttcatccaggcccagcatgtagtggctgattcttcttggctgcttttagcctccagaagtttctctgaagccaaccaaacctctaggtgtaaggcatgctggccctggtatttctagatgaggttaggttcctgggacaggagtgtgtattgaggtggagggaaggagctgaaagaaggaggggatccttggaaagggctctgagaggggtgtattcgtttcattctgagacgactaccatctatccccctagactctcacagtggctccaccttaaatgtccacagcatttcactttctaaaatgtacttttatttgactctcataactattttgtgaagtagggaagattgtcagcctcattaggtgaaaatatgttggttcaagatcacacagttagtatgctgcaaagtcaggactcaaacccaggtctctggaatcctggttttctgaatgtcggagggcacctctaacaaaggctctggagcactctaaactctcattctgggctcattcctcactcctggaggctgatttctgggggaaggaggaagtgcatgaggtacctttctgtcacatgactggtggcagaccctactttaacccagcccaacaaggtcatgctacagagctgctcatggcattttcctggactctcctcccttggtcctgactggattcttctaccctgatccacttagtaagttcaagctccatctcctacttacacaatgccccttctcttgctcctttgctcatggtgtttacactggctttctccagtctctggttctcagtccccttacaaagatcctggattagatttgcctgcctagctctgcctgattgggattacacattgtgtagtgccaacatcacacgttcggcatctactgtgtgtgcacggcactgcactaagggttttacacccattctccatttaatcctttcaacagccttgtgaagtagatagtattacttcatttacatatgaagtaactgaggctcactgaggctccgggagtcatcttcccgaagtcannnnnn

SEQ ID NO: 22409 - DNA, 2229 bp, Homo sapiens
cgcgctcttttctcgggacgggagaggccgtgtagcgtcgccgttactccgaggagataccagtcggtagaggagaagtcgaggttagagggaactgggaggcactttgctgtctgcaatcgaagttgagaggcccagtatttaggcgacagtgaatttattactctgaagagggttctgcacatatttccaaattatattggtggtcatcagaagtaggtgataggaagaaatacttctcaagggtgcaaaaatgcagagtaataaaacttttaacttggagaagcaaaaccatactccaagaaagcatcatcaacatcaccaccagcagcagcaccaccagcagcaacagcagcagccgccaccaccgccaatacctgcaaatgggcaacaggccagcagccaaaatgaaggcttgactattgacctgaagaattttagaaaaccaggagagaagaccttcacccaacgaagccgtctttttgtgggaaatcttcctcccgacatcactgaggaagaaatgaggaaactatttgagaaatatggaaaggcaggcgaagtcttcattcataaggataaaggatttggctttatccgcttggaaacccgaaccctagcggagattgccaaagtggagctggacaatatgccactccgtggaaagcagctgcgtgtgcgctttgcctgccatagtgcatcccttacagttcgaaaccttcctcagtatgtgtccaacgaactgggtggaagaagccttttctcgggacgggagaggccgtgtagcgtcgccgttactccgaggagataccagtcggtagaggagaagtcgaggttagagggaactgggaggcactttgctgtctgcaatcgaagttgagggtgcaaaaatgcagagtaataaaacttttaacttggagaagcaaaaccatactccaagaaagcatcatcaacatcaccaccagcagcagcaccaccagcagcaacagcagcagccgccaccaccgccaatacctgcaaatgggcaacaggccagcagccaaaatgaaggcttgactattgacctgaagaattttagaaaaccaggagagaagaccttcacccaacgaagccgtctttttgtgggaaatcttcctcccgacatcactgaggaagaaatgaggaaactatttgagaaatatggaaaggcaggcgaagtcttcattcataaggataaaggatttggctttatccgcttggaaacccgaaccctagcggagattgccaaagtggagctggacaatatgccactccgtggaaagcagctgcgtgtgcgctttgcctgccatagtgcatcccttacagttcgaaaccttcctcagtatgtgtccaacgaactgctggaagaagccttttctgtgtttggccaggtagagagggctgtagtcattgtggatgatcgaggaaggccctcaggaaaaggcattgttgagttctcagggaagccagctgctcggaaagctctggacagatgcagtgaaggctccttcctgctaaccacatttcctcgtcctgtgactgtggagcccatggaccagttagatgatgaagagggacttccagagaagctggttataaaaaaccagcaatttcacaaggaacgagagcagccacccagatttgcacagcctggctcctttgagtatgaatatgccatgcgctggaaggcactcattgagatggagaagcagcagcaggaccaagtggaccgcaacatcaaggaggctcgtgagaagctggagatggagatggaagctgcacgccatgagcaccaggtcatgctaatgagacaggatttgatgaggcgccaagaagaacttcggaggatggaagagctgcacaaccaagaggtgcaaaaacgaaagcaactggagctcaggcaggaggaagagcgcaggcgccgtgaagaagagatgcggcggcagcaagaagaaatgatgcggcgacagcaggaaggattcaagggaaccttccctgatgcgagaagagcaaggagatcggcagggtcagaaggcatgcgaggagacaggcgcatacacagagcgtgcagccgccggaccggagcagtgaaaccaagtcgacaggacggccaagagccggagtgcatgggaatacccacaaaaggacctagcacgcgccaacgaagaagcgcaagaggacaacgacaaacagagacagcgacataggccaaga

SEQ ID NO: 22410 - DNA, 1409 bp, Homo sapiens; identical to SEQ ID NO: 20290
  misc_feature 1, 2, 3, 4, 5, 6, 7, 1409: n = A,T,C or G

SEQ ID NO: 22411 - DNA, 674 bp, Homo sapiens
  misc_feature 674: n = A,T,C or G
gtccgtgattatgtataaatgaactttgattcagtaaggtcagttttgtaggtctcaaagtactttggttattgtggtacatcagaatgatagctagtatttactgagatctttctatatgtcaggtaataaaaatcctataaaagtattctttctacagccacaggaggtaggtactatttttattttacagatgaagaactgtggattttgtttctaagaaaatttccaggctcacagaactaagcctaatttctttttattttttagcaaatacagtttttataagaatttgaattctatgaaaataaatggattactcctaaatctctgatgcctcagtgaacactttttccttattaacaaaattctcacttttggctttggattggctttgcaggagtgcagattgatcatagcttttttcatgtcctaagagttgtcagagttttctcttgtagcatttttttctttactttttttttttactatctttaaatatatgactgtaagagtatgataaatatgctggtttctaatctctgctgttgtcacataaactaatatattttgagtaattttgaaatgatattaataatgtcattagattttctttggattttttgaaaaaaataatggttttagaaggaaatctggataaattttatctctgn

SEQ ID NO: 22412 - DNA, 746 bp, Homo sapiens
  misc_feature 1, 2, 3, 4, 5, 6, 7, 8, 9, 10, 11, 12, 13, 14, 15, 16, 17,30: n = A,T,C or G
nnnnnnnnnnnnnnnnnaaaacttttaaanaaattcctaaaacccaaaaccttttagtatatgtaatttactggccttaaaactataaatattatagttttaataattttgtagatcaggaatttaggtgggactcagctggcccatttgtttcccatgtcatgtatccaaagctcactctgtagtatcacctggtagatgggttgacctgaaaggtccaaggtggcttcccttatgtgtctgccaccttacgggagatgggtgggaagctggctcatctggggctattaaccagaatactggcatttgtcctgtcctctggggtggatttgcccatcaaaacttgaagttctagcagggcagggtagatactcctactatagttccaactacctgggaggctgaggcaggaggatatctttagttcagcccgagcaagctagcaagaccccatctctttaaaaaaaaaaaaaaaaaagacttgaagcccttatttcttttgatcttgtaaatctatcaggtgactcaggagaaaagtccatgtgcctctctccattttatggccaccagatgagttgaaggatgtaatgcttctttatgtagtaattttgtatttttattaagatgtccatgtttaccaataggaatacccatttgtccaatatatcttagactcatcaaaagtgtaccattttcttttgtacagtactctgttctagttattatttctccaaatgctacatacc

SEQ ID NO: 22413 - DNA, 1116 bp, Homo sapiens
  misc_feature 12, 1116: n = A,T,C or G
atgattgagtgnccagatgtgcgggccgtgttctatgtctggtcccttgtgttttctctccctcttctgggggcgcgccttgcccatgttctcaaatggctcgccctggggcacatatatcccttggcatgccaccattcaacaatattttttaaaatctacaaattttaaagtttcacttccctgcaaaattcttcagtcaagaaattagtctttgaaaattatgaaaattgttgtgggaaatatttatacaaattattactgataatgcacatatattttgaaacattgtttctagaagcaataaaatataacctatttaggagataacccaaatgatttgtaaaaaaattaacttgtagaaaagggaaggatgttgtgtaaaatcaagtcaattatttgaggtttttataatattgagtacttatgtactaagtcacacccagccagtcaataactgagaaatcaaaataaataataatttcaaagaattacataaatacagggccttttgagatttttggcaattgtaaacaaaaacgaatggtttttacaattcagtgtaattctacgaatatttatttggcacccatgttaggcactgaggctacacagcagtgaaataggcctagttgttctcaactagagaacatagttggttaatgtagctgcactgaattgtagctgtttagaagataatataccctgaggctttttaaagtatactattactataagaagtaaaattattttatacttataaattttgttttggattattcaactgaatttggagtgttcagaattttcatggcggttgagacaaggaagaggtataatgctatttttttttccttttctttttttttttgagacggaatctcactctgttgcccagactggagtgcaatggtgcgatctcggctcactgcaacctccgcctcccgggttcaagtgattctcctgcctcagcctcccaagtagctgggattacaggcgcccaccatcacgcccagctaatttttgtatttttagtagagacggggtttcaccaggttgcctggctgatctcaaactcctgaccacagttgatccacccgcctcggcctctagaan

SEQ ID NO: 22414 - DNA, 2434 bp, Homo sapiens
actttcgttcttaattaggtcatgcccgtgtgagccaggaaagggctgtgtttatgggaagccagtaacactgtggcctactatctcttccgtggtgccatctacatttttgggactcgggaattatgaggtagaggtggaggcggagccggatgtcagaggtcctgaaatagtcaccatgggggaaaatgatccgcctgctgttgaagcccccttctcattccgatcgctttttggccttgatgatttgaaaataagtcctgttgcaccagatgcagatgctgttgctgcacagatcctgtcactgctgccattgaagttttttccaatcatcgtcattgggatcattgcattgatattagcactggccattggtctgggcatccacttcgactgctcagggaagtacagatgtcgctcatcctttaagtgtatcgagctgatagctcgatgtgacggagtctcggattgcaaagacggggaggacgagtaccgctgtgtccgggtgggtggtcagaatgccgtgctccaggtgttcacagctgcttcgtggaagaccatgtgctccgatgactggaagggtcactacgcaaatgttgcctgtgcccaactgggtttcccaagctatgtgagttcagataacctcagagtgagctcgctggaggggcagttccgggaggagtttgtgtccatcgatcacctcttgccagatgacaaggtgactgcattacaccactcagtatatgtgagggagggatgtgcctctggccacgtggttaccttgcagtgcacagcctgtggtcatagaaggggctacagctcacgcatcgtgggtggaaacatgtccttgctctcgcagtggccctggcaggccagccttcagttccagggctaccacctgtgcgggggctctgtcatcacgcccctgtggatcgtcactgctgcacactgtgtttatgacttgtacctccccaagtcatggaccatccaggtgggtctagtttccctgttggacaatccagccccatcccacttggtggagaagattgtctaccacagcaagtacaagccaaagaggctgggcaatgacatcgcccttatgaagctggccgggccactcacgttcaatgaaatgatccagcctgtgtgcctgcccaactctgaagagaacttccccgatggaaaagtgtgctggacgtcaggatggggggccacagaggatggaggtgacgcctcccctgtcctgaaccacgcggccgtccctttgatttccaacaagatctgcaaccacagggacgtgtacggtggcatcatctccccctccatgctctgcgcgggctacctgacgggtggcgtggacagctgccagggggacagcggggggcccctggtgtgtcaagagaggaggctgtggaagttagtgggagcgaccagctttggcatcggctgcgcagaggtgaacaagcctggggtgtacacccgtgtcacctccttcctggactggatccacgagcagatggagagagacctaaaaacctgaaaaggaaggggacaagtagccacctgagttcctgaggtgatgaagacagcccgatcctcccctggactcccgtgtaggaacctgcacacgagcagacacccttggagctctgagttccggcaccagtagcaggcccgaaagaggcacccttccatctgattccagcacaaccttcaagctgctttttgttttttgtttttttgagatggagtctcgctctgttgcccaggctggagtgcagtggcgaaatccctgctcactgcagcctccgcttccctggttcaagcgattctcttgcctcagcttccccagtagctgggaccacaggtgcccgccaccacacccaactaatttttgtatttttagtagagacagggtttcaccatgttggccaggctgctctcaaacccctgacctcaaatgatgtgcctgcttcagcctcccacagtgctgggattacaggcatgggccaccacgcctagcctcacgctcctttctgatcttcactaagaacaaaagaagcagcaacttgcaagggcggcctttcccactggtccatctggttttctctccaggggtcttgcaaaattcctgacgagataagcagttatgtgacctcacgtgcaaagccaccaacagccactcagaaaagacgcaccagcccagaagtgcagaactgcagtcactgcacgttttcatctctagggaccagaaccaaacccaccctttctacttccaagacttattttcacatgtggggaggttaatctaggaatgactcgtttaaggcctattttcatgatttctttgtagcatttggtgcttgacgtattattgtcctttgattccaaataatatgtttccttccctcattgaacaaaaaaaaaaaaaaaa

SEQ ID NO: 22415 - DNA, 731 bp, Homo sapiens; identical to SEQ ID NO: 20529
  misc_feature 1, 2, 3, 4: n = A,T,C or G

SEQ ID NO: 22416 - DNA, 1957 bp, Homo sapiens
  misc_feature 1, 2, 3, 4, 5, 6, 7: n = A,T,C or G
nnnnnnnatacttgtttaaagatccggcttttctccgagttgggaaaagcagtttcgcccttttcaagtggtgaagctctacctcccaaaatccacctctattaaaccatggattgcttctaaccctctcagcccccaaacaggaccacctgctcattctgcctccctcatcccttctgtctctaatggctctttgaagtttcagagcctcactcatacaggtaaaggtcaccatctttcattctcaccgcagagtcaaaatggccgagcaccccctcctttgtcattttcctcctcccctccttctcctgcctcctccgtctcactgaatcaaggtgccaagggcaccaggaccatccatactcccagcctcaccagctacaaggcacagaatggaagttcaagcaaagccaccccatccacagcaaaagaaacctcttaaaggtcaaatcctattaggcacaagtcggagttacatttaaaaaaaattaacagtctacaacaactgttttcacaagagaatgtaacatattgctgtatcgtttgaggcttaatgctaaatatgtgctaaatactggattaatagatttcagtaaagctcgttcgttttgtttggttttctttttacctagttgctatagtgtctacagtctatactcaatacctataaaatgcagtaagcatgtgttacagaaagaggttctggtgggagagaaaggtgcgtgtgagacaggagaattgtcttaagcatataaaacatgtatgattccagaattttagtatgttttgtataaaactatttttcattacggagactagaagtgaacagagaattacacaagtgtgactatacaaattgtaaaacagatactataatatttccttttattttagtgttatttagctttattacagatttctatttttgtcaaaacttcatggttcctttcaagatcttttttgccaaaacattttgatactatagcattgtacatttgaaagtagtgttctagactataaaaccaatgaacttctacatgagccctacagacaggcatgtgtagaaggcaatttatcaaacctattgcactgccatgaaaagtgtgtataataatttgctagcccaagcaagctagttttctttgcttgcttcttttctttcttttttccttcctttttttttttttttttcttttttaacatgttgagattctctagttgttttctttggcgtatctaaccccttcttttgttttctgagacctggtaacccacgctcttgcattgtggattttaaaatgtatactctgtacggttctgtaaaccgaaaaacttttgtaaatatataaatatacatagacataaaaatactgtatgtgacagcacatagagtagttttcccacaccaaagttaatttttatgcatgctttaaaagtatatatcgggaccggcagaaatggaagtatccatacatttttaaaaagcaacaagtttgcacagctagagtgtttttgtaaataaatgtatttgtataacacagtcatgtaatatacagaactataagcagagactttgcaaaactaaataaagggctgcatgcttattattttttgtaccttgtcactataactacttcctagtcaaagaacgaaatgtaactgttaccgagttaaatgtttttccgctttgagggatgtaaccacatccactcagaggacactacttttctgaaagctctggggtgactaatgatgagttcctaataaattaattgcaagtgtggtgccttggatgtggcctgttggctcgctttcttctctgtggcttatcaaggtgtagatgacagaaagcaaacctggatacagagtttccaccctcagttcctggaggggctcttattattttctctctttttaaaaaacttccagtagaagtaaagtggaaataaaatgtctt

SEQ ID NO: 22417 - DNA, 5538 bp, Homo sapiens
  misc_feature 5535, 5536, 5537, 5538: n = A,T,C or G
tatagggagtcgacccacgcacgcgtccgcaccgccgcccaggcaaggccgccctgccttgggcgcagcgctgccatggctgggggccgtggggcccccgggcgcggccgggacgagcctccggagagctacccgcaacgacaggaccacgagctacaggccctggaggccatctacggcgcggacttccaagacctgcggccggacgcttgcggaccggtcaaagagccccctgaaatcaatttagttttgtaccctcaaggcctaactggtgaagaagtatatgtaaaagtggatttgagggttaaatgcccacctacctatccagatgtagttcctgaaatagagttaaaaaatgccaaaggtctatcaaatgaaagtgtcaatttgttaaaatctcgcctagaagaactggccaagaaacactgtggggaggtgatgatctttgaactggcttaccacgtgcagtcatttctcagcgagcataacaagccccctcccaagtcttttcatgaagaaatgctggaaaggcgggctcaggaggagcagcagaggctgttggaggccaagcggaaagaagagcaggagcaacgtgaaatcctgcatgagattcagagaaggaaagaagagataaaagaagagaaaaaaaggaaagaaatggctaagcaggaacgtttggaaattgctagtttgtcaaaccaagatcatacctctaagaaggacccaggaggacacagaacggctgccattctacatggaggctctcctgactttgtaggaaatggtaaacatcgggcaaactcctcaggaaggtctaggcgagaacgtcagtattctgtatgtaatagtgaagattctcctggctcttgtgaaattctgtatttcaatatggggagtcctgatcagctcatggtgcacaaagggaaatgtattggcagtgatgaacaacttggaaaattagtctacaatgctttggaaacagccactggtggctttgtcttgttgtatgagtgggtccttcagtggcagaaaaaaatgggtccattccttaccagtcaagaaaaagagaagattgataagtgcaaaaagcagattcaaggaacagaaacagaattcaactcactggtaaaattgagccatccaaatgtagtacgctaccttgcaatgaatctcaaagagcaagacgactccatcgtggtggacattttagtggagcacattagtggggtctctcttgctgcacacctgagccactcaggccccatccctgtgcatcagcttcgcaggtacacagctcagctcctgtcaggccttgattatctgcacagcaattctgtggtgcataaggtcctgagtgcatctaatgtcttggtggatgcagaaggcaccgtcaagattacggactatagcatttctaagcgcctcgcagacatttgcaaggaggatgtgtttgagcaaacccgagttcgttttagtgacaatgctctgccttataaaacggggaagaaaggagatgtttggcgtcttggccttctgctgctgtccctcagccaaggacaggaatgtggagagtaccctgtgaccatccctagtgacttaccagctgactttcaagattttctaaagaaatgtgtgtgcttggatgacaaggaaagatggagtccccagcagttgttgaaacacagctttataaatccccagccaaaaatgcctctagtggaacaaagtcctgaagattctggaggacaagattatgttgagactgttattcctagcaaccggctacccagtgctgccttctttagtgagacacagagacagttttcccgatacttcattgagtttgaagaattacaacttcttggtaaaggagcttttggagctgtcatcaaggtgcagaacaagttggacggctgctgctacgcagtgaagcgcatccccatcaacccggccagccggcagttccgcaggatcaagggcgaagtgacactgctgtcacggctgcaccatgagaacattgtgcgctactacaacgcctggatcgagcggcacgagcggccggcgggaccggggacgccgcccccggactccgggcccctggccaaggatgaccgagctgcacgcgggcagccggcgagcgacacagacggcctggacagcgtagaggccgccgcgccgccacccatcctcagcagctcggtggagtggagcacttcgggcgagcgctcggccagtgcccgtttccccgccaccggcccgggctccagcgatgacgaggacgacgacgaggacgagcacggtggcgtcttctcccagtccttcctgcctgcttcagattctgaaagtgatattatctttgacaatgaagatgagaacagtaaaagtcagaatcaggatgaagattgcaatgaaaagaatggctgccatgaaagtgagccatcagtgacgactgaggctgtgcactacctatacatccagatggagtactgtgagaagagcactttacgagacaccattgaccagggactgtatcgagacaccgtcagactctggaggctttttcgagagattctggatggattagcttatatccatgagaaaggaatgattcaccgggatttgaagcctgtcaacatttttttggattctgatgaccatgtgaaaataggtgattttggtttggcgacagaccatctagccttttctgctgacagcaaacaagacgatcagacaggagacttgattaagtcagacccttcaggtcacttaactgggatggttggcactgctctctatgtaagcccagaggtccaaggaagcaccaaatctgcatacaaccagaaagtggatctcttcagcctgggaattatcttctttgagatgtcctatcaccccatggtcacggcttcagaaaggatctttgttctcaaccaactcagagatcccacttcgcctaagtttccagaagactttgacgatggagagcatgcaaagcagaaatcagtcatctcctggctgttgaaccacgatccagcaaaacggcccacagccacagaactgctcaagagtgagctgctgcccccaccccagatggaggagtcagagctgcatgaagtgctgcaccacacgctgaccaacgtggatgggaaggcctaccgcaccatgatggcccagatcttctcgcagcgcatctcccctgccatcgattacacctatgacagcgacatactgaagggcaacttctcaatccgtacagccaagatgcagcagcatgtgtgtgaaaccatcatccgcatctttaaaagacatggagctgttcagttgtgtactccactactgcttccccgaaacagacaaatatatgagcacaacgaagctgccctattcatggaccacagcgggatgctggtgatgcttccttttgacctgcggatcccttttgcaagatatgtggcaagaaataatatattgaatttaaaacgatactgcatagaacgtgtgttcaggccgcgcaagttagatcgatttcatcccaaagaacttctggagtgtgcatttgatattgtcacttctaccaccaacagctttctgcccactgctgaaattatctacactatctatgaaatcatccaagagtttccagcacttcaggaaagaaattacagtatttatttgaaccataccatgttattgaaagcaatactcttacactgtgggatcccagaagataaactcagtcaagtctacattattctgtatgatgctgtgacagagaagctgacgaggagagaagtggaagctaaattttgtaatctgtctttgtcttctaatagtctgtgtcgactctacaagtttattgaacagaagggagatttgcaagatcttatgccaacaataaattcattaataaaacagaaaacaggtattgcacagttggtgaagtatggcttaaaagacctagaggaggttgttggactgttgaagaaactcggcatcaagttacaggtcttgatcaatttgggcttggtttacaaggtgcagcagcacaatggaatcatcttccagtttgtggctttcatcaaacgaaggcaaagggctgtacctgaaatcctcgcagctggaggcagatatgacctgctgattccccagtttagagggccacaagctctggggccagttcccactgccattggggtcagcatagctatagacaagatatctgctgctgtcctcaacatggaggaatctgttacaataagctcttgtgacctcctggttgtaagtgttggtcagatgtctatgtccagggccatcaacctaacccagaaactctggacagcaggcatcacagcagaaatcatgtacgactggtcacagtcccaagaggaattacaagagtactgcagacatcatgaaatcacctatgtggcccttgtctcggataaagaaggaagccatgtcaaggttaagtctttcgagaaggaaaggcagacagagaagcgtgtgctggagactgaacttgtggaccatgtactgcagaaactgaggactaaagtcactgatgaaaggaatggcagagaagcttccgataatcttgcagtgcaaaatctgaaggggtcattttctaatgcttcaggtttgtttgaaatccatggagcaacagtggttcccattgtgagtgtgctagccccggagaagctgtcagccagcactaggaggcgctatgaaactcaggtacaaactcgacttcagacctcccttgccaacttacatcagaaaagcagtgaaattgaaattctggctgtggatctacccaaagaaacaatattacagtttttatcattagagtgggatgctgatgaacaggcatttaacacaactgtgaagcagctgctgtcacgcctgccaaagcaaagatacctcaaattagtctgtgatgaaatttataacatcaaagtagaaaaaaaggtgtctgtgctatttctgtacagctatagagatgactactacagaatcttattttaaccctaaagaactgtcgttaacctcattcaaacagacagaggcttatactggaataatggaatgttgtacattcatcataatttaaaattaaattctaagaagaggctgggtgcagtggctcacacctttaatcccagcactttgggaagccaaggcaggaagactgcttgaaaccaggagtttgagaccagcctgagcaacaaagcaagaccccatctctataaaaactaaaaaaattagttgggcatggtggcacatgcctgtagtcccagctactccagaggctgagatggatcatctgagcctcaggaggttgaggctgcagtgagctgtgactgcgccactgcactccagtctgggacaacagagcaagaccctgtcttaaaaaaaaaaagaaaaaaaaattttttttctaagaagctgtcctacaaagttgagctttgttagtttttcatgtgtaatatattataaatttatcttttgggatataataaatgctttcatataccnnnn

SEQ ID NO: 22418 - DNA, 380 bp, Homo sapiens; identical to SEQ ID NO: 20161
  misc_feature 1, 2: n = A,T,C or G

SEQ ID NO: 22419 - DNA, 344 bp, Homo sapiens
  misc_feature 79: n = A,T,C or G
acatcgagccctcagggtccctgactggttctccagccgccccataggctatgagcatccccgttccctacacaaaggnaccactgggatttattaaaggttatgccttgcaatgcagtactgttttcatatgtgtgatattatactactttctccaattttctcttcacatcctacccattctttttgctcaatcttttaagtcttttaatgaaatagttatacaaaaaagtgtatagagtcaggtgcggtggctcacacctgtaatctcagcactttgggaggccaaggtgggcggattgcttgagcccaggagtttaagacccagcctgggcaatgtggtg

SEQ ID NO: 22420 - DNA, 334 bp, Homo sapiens
actgatataatctaacaaatgaaggtgcacctttacttcctggaacatagacagccacctaagatacatagacataaatcatcacttaattttttgaagaataaaaactgagatggacatgtttttacaatcacaaaaaactaggaaaaggtttaaacacataatattacacataaacaaaaacagcaattaccttgtatggttggggtccaggtgataatacaaagtcattaattttttgcaaatgcaatttatttgcaattgtgtctaaaaaaagagtaaattaaatcagattgatgagagaacctaaaaggaacatgttaaactctgaata

SEQ ID NO: 22421 - DNA, 544 bp, Homo sapiens
  misc_feature 542, 543, 544: n = A,T,C or G
acgcggggtctggcatcagcgttgcggctcgaggcaaagctggtcctgtgcctgctgtccattgccgctaaggcctgctgctgccattcaggcgtgtctccctctctctctctctttcatgccgctctctccaccccatcttgggacggccagctctaagaattcctgctacgacactgaattcaaccaggaggtgatgccacactcaatcagaaactatgctactgctgaagaggtatattgagccctgcctggttaacctccagtgaggttattagagaattgggagaggctcaaatcagcatcctgcacctggttatcaaaccattgtgaagtcttgattcctggatggccagaaaacttgtcattggtcaagagcaacattaagatctgcctgttactcatactgatgcttcctgcccagcaagttcatcagagggcgaggatgaattacggttgccatgaatgtccttgtgaggcagttgggaagccttggctggattgtgaaggatatttgaaatgccttttagagcccaccagannn

SEQ ID NO: 22422 - DNA, 798 bp, Homo sapiens
ctgccaaaataattttattctgttttcaaattgaacagcatatattgttagagtgagagtctgtaaattcagtcctcttctttgttggcattcagaagtctttgttgaaatctggatgagattctgaattcaggtgatgttgatttacataaattggatgtctctgggactttccattttgacagtcgctcttctacttcagtctcctgaagacatctctccaacagaagttacataaaaatactaatcttcaaggtgctttctaaaatattttcatcacgtcattaaaatcttctttcactaggcaatggttctgtctctatgggggctggcaggcagggcaaatgaattcctaccaataaggcgggcctagttggttcatgtcaattccaaagcaagaggatggttgaagaagggtattgaatgagtagataacaaatatttggagagagatttggaggaaccctggaagacaagagtaggctacctgtgctcttggggcttccgaggcgatcgggcagtgtcagtccttcagctgttaagctgagaagatctgggaaggagtcagtcagagagccttgggccagagttccaggagctctgggagtggctgtcagaaatggccaatttctttcaaatgctgtatactggaaaaatccaaaggactcatcagatgaacacatttcaaagagccgctaccaattttttttcttaagcaaagcatcaagcctctgatttgccgctgataaattctctaaataagcacttggaacagaaaggagctctacccaactaccc

SEQ ID NO: 22423 - DNA, 7473 bp, Homo sapiens
  misc_feature 1, 2, 3, 7470, 7471, 7472, 7473: n = A,T,C or G
nnncgacccacgcgtccgggaggaacggcagggctggctgcggaaggggaggggggggagaaggcgattggatgcggcggcggcggcggatcccggagagccccggagtgagcggagtagcgagtcggcaacccggaggggtagaaatatttctgtcatggctcattcaaagactaggaccaatgatggaaaaattacatatccgcctggggtcaaggaaatatcagataaaatatctaaagaggagatggtgagacgattaaagatggttgtgaaaacttttatggatatggaccaggactctgaagaagaaaaggagctttatttaaacctagctttacatcttgcttcagatttttttctcaagcatcctgataaagatgttcgcttactggtagcctgctgccttgctgatattttcaggatttatgctcctgaagctccttacacatcccctgataaactaaaggatatatttatgtttataacaagacagttgaaggggctagaggatacaaagagcccacaattcaataggtatttttatttacttgagaacattgcttgggtcaagtcatataacatatgctttgagttagaagatagcaatgaaattttcacccagctatacagaaccttattttcagttataaacaatggccacaatcagaaagtccatatgcacatggtagaccttatgagctctattatttgtgaaggtgatacagtgtctcaggagcttttggatacggttttagtaaatctggtacctgctcataagaatttaaacaagcaagcatatgatttggcaaaggctttactgaagaggacagctcaagctattgagccatatattaccaatttttttaatcaggttctgatgcttgggaaaacatctatcagcgatttgtcagagcatgtctttgacttaattttggagctctacaatattgatagtcatttgctgctctctgttttaccccagcttgaatttaaattaaagagcaatgataatgaggagcgcctacaagttgttaaactactggcaaaaatgtttggggcaaaggattcagaattggcttctcaaaacaagccactttggcagtgctacttgggcaggtttaatgatatccatgtaccaatccgcctggaatgtgtgaaatttgctagccattgtctcatgaaccatcctgatttagcaaaagacttaacagagtatcttaaagtgaggtcacatgaccctgaggaagctattagacatgatgttattgtgtcaatagttacagctgctaaaaaggatattcttctggtcaatgatcacttacttaattttgtgagagagagaacattagacaaacgatggagagtacgcaaagaagccatgatgggacttgcccaaatttataagaaatatgctttacagtcagcagctggaaaagatgctgcaaaacagatagcatggatcaaagacaaattgctacatatatattatcaaaatagtattgatgatcgactacttgttgaacggatctttgctcaatacatggttcctcacaatttagaaactacagaacggatgaaatgcttatattacttgtatgccacactggatttaaatgctgtgaaagcattgaatgaaatgtggaaatgtcaaaatctgctccgacatcaagtaaaggatttgcttgacttgattaagcaacccaaaacagatgccagtgtcaaggccatattttcaaaagtgatggttattacaagaaatttacctgatcctggtaaggctcaggatttcatgaagaaattcacacaggtgttagaagatgatgagaaaataagaaagcagttagaagtacttgttagtccaacatgctcctgcaagcaggctgaaggttgtgtgcgtgaaataactaagaagttgggcaaccccaaacagcctacaaatcctttcctggaaatgatcaagtttctcttggagaggatagcacctgtgcacatagataccgaatctatcagtgctcttattaaacaagtgaacaaatcaatagatggaacagcagatgatgaagatgagggtgttccaactgatcaagccatcagagcaggtcttgaactgcttaaggtactctcatttacacatcccatctcatttcattctgctgaaacatttgaatcattactggcttgtctgaaaatggatgatgaaaaagtagcagaagctgcactacaaattttcaaaaacacaggaagcaaaattgaagaggattttccacacatcagatcagccttgcttcctgttttacatcacaaatctaaaaaaggacccccccgtcaagccaaatatgccattcattgtatccatgcgatattttctagtaaagagacccagtttgcacagatatttgagcctctgcataagagcctagatccaagcaacctggaacatctcataacaccattggttactattggtcatattgctctccttgcacctgatcaatttgctgctcctttgaaatctttggtagctactttcattgtgaaagatcttctcatgaatgatcggcttccagggaaaaagacaactaaactttgggttccagatgaagaagtatctcctgagacaatggtcaaaattcaggctattaaaatgatggttcgatggctacttggaatgaaaaataatcacagtaaatcaggaacttctaccttaagattgctaacaacaatattgcatagtgatggagacttgacagaacaggggaaaattagtaaaccagatatgtcacgtctgagacttgctgctgggagtgctattgtgaagctggcacaagaaccctgttaccatgaaatcatcacattagaacaatatcagctatgtgcattagctatcaacgatgaatgctatcaagtaagacaagtgtttgcccagaaacttcacaaaggcctttcccgtttacggcttccacttgagtatatggcaatctgtgccctttgtgcaaaagatcctgtaaaggagagaagagctcatgctaggcaatgtttggtgaaaaatataaatgtaaggcgggagtatctgaagcagcatgcagctgttagtgaaaaattattgtctcttctaccagagtatgttgttccatatacaattcaccttttggcacatgacccagattatgtcaaagtacaggatattgaacaacttaaagatgttaaagaatgtctttggtttgttctggaaatattaatggctaaaaatgaaaataacagtcacgcttttatcagaaagatggtagaaaatattaaacaaacaaaagatgcccaaggaccagatgatgcaaaaatgaatgaaaaactgtacactgtgtgtgatgttgccatgaatatcatcatgtcaaagagtactacatacagtttggaatctcctaaagacccggtactaccagctcgtttcttcactcaacctgacaagaatttcagtaacaccaaaaattatctgcctcctgaaatgaaatcatttttcactcctggaaaacctaaaacaaccaatgttctaggagctgttaacaagccactttcatcagcaggcaagcaatctcagaccaaatcatcacgaatggaaactgtaagcaatgcaagcagcagctcaaatccaagctctcctggaagaataaaggggaggcttgatagttctgaaatggatcacagtgaaaatgaagattacacaatgtcttcacctttgccggggaaaaaaagtgacaagagagacgactctgatcttgtaaggtctgaattggagaagcctagaggcaggaaaaaaacgcccgtcacagaacaggaggagaaattaggtatggatgacttgactaagttggtacaggaacagaaacctaaaggcagtcagcgaagtcggaaaagaggccatacggcttcagaatctgatgaacagcagtggcctgaggaaaagaggctcaaagaagatatattagaaaatgaagatgaacagaatagtccgccaaaaaagggtaaaagaggccgaccaccaaaacctcttggtggaggtacaccaaaagaagagccaacaatgaaaacttctaaaaaaggaagcaaaaaaaaatctggacctccagcaccagaggaggaggaagaagaagaaagacaaagtggaaatacggaacagaagtccaaaagcaaacagcaccgagtgtcaaggagagcacagcagagagcagaatctcctgaatctagtgcaattgaatccacacagtccacaccacagaaaggacgaggaagaccatcaaaaacgccatcaccatcacaaccaaaaaaaaatgtccgtgtaggacgctccaaacaagcagctactaaggaaaatgattcaagtgaagaagtagatgtgtttcagggtagctctcctgtcgatgatattccacaggaagaaacagaggaggaggaagtttctacagtaaatgtacggcggcgaagtgctaaaagggaacggcgatgaacaaatgtaattaataactttctctgtgaaagctttggaaaaatctttttttttttttttttttggtcaagcttgaggctgaataaagcctttgatgcacaaaatgggactgctgaagagtggacagttggaccttactttggtgaccccatacgtttgtggtcacatgctttagccatacacatggtaacattgactatggagtcttgtgaaagtgtaatgtgcgatggctatgtagacataaagaagaaacttgtaaatatcttttttcttttttttaatgtttctgatttctgaagtgcttgtatagcttttatctgcggctttaaactgacagtacccgactgtttattggatctattgatttgaaaagaatttgttaggatagatcttaagcagtaatctgtcagtgtttgtatttgtattctctgcaattttactgtgaaaaaaaatttgttttcaacaattggtgtcattttcttgatgtcactatttgttggagagttaaatggtctcttccctttgtgtatcttacctagtgtttactcctgggcacccttaatcttcagaggtgctaaattgtctgccattacaccagaaggatgcctctgataggaggacaaccatgcaaattgtgaaatagtcctgaagttcttggattactttacacctcagtattgatttgtcccagaattttctggcctttcatggcaatgaaaattttaagaagaaagatttaaagtattttaattttaaagagtgtgttataaaataatgtactgaattctttatcccattttatcatcctttcagtttttattaatctactgtatcaataaaattctgtaatttgaatgagtttttaatagtctagaatgttattgtgtatagatatttcctcttgaacgttatgttcagaaaatgcaaattacactataatataaaacctgatatatacacattagaaatattccagttctccgtaacagtgtaaagttaatcagaaagaaaaaattttattgatgcagtgtgtctttataaagctgttcttgaaagccaagtgttttgtattttatagtgagttgcatgtttttgaaaaaaagtgctgaaaatgggatgtgctgttttctgtaaattcatatttagccatagtatatgatagattgccccataacatagtttttcatcaagagtttattattgtactttattttggagccaaaaaattgattctggggggtgggggcagcgtagaagtggtatatccaagtatatcagctactgtagttgtcacagtcttgtgaactttgaatgaaattccactttgtccagattgggagaagtggaaatttatttggatttagagcaggtctttttttttcttcattgtaatctgcaaaatgtagaaataaattacttaaggcagtatcctttatacagttgtataaactgtattttgaaccaaaacatataggttactacttaatgcttacctaatttcattttagtattttaggtgctgttatgttttttcatggttaacaccagaggggaaaaaatcatattctaacttattaaatttatcacattgaatagtggaacattttcatatgatacaccattatgtttaagatatatttccaagattggttataatagatggggcatataataaagaagctactattttggaaaatgacattttactatttgccaatgtatattgcaattgatgtgattatttttcttttaaagatttgtttgtgtttatgaaacagccatttattttttaaaaagtgttttgaattgtgtcttaatctctccatattcaactattcttcatttacaacaatagtgacaccagtaattatgagaggctgtcatatatcaaagcagctcaggtgggatcaacatacattggttttgaaatgtttccttagctcggttctcccaaacacataatttctgtttcagcagtacaaaggcatgttttaaaatctataacataaagaataaggaatagctttgtatttttgtcattgattaaattgcaccagaaatgtttatggaaatattaagaacattttataaaacatacgaaaaagtgattgtgaaggatttttatttgcatgattatagttaagcaaatttcatttcacatttttgtaatgctgtacagcagttcacaaaaaaatgttcattgtagattttgttatgttcaatgccaatgagtctgtaattttacgacctgtctgttctttttttgggtggattacgatgtaaatttttcttttctttctttctttttttttttttttgtgtagaaaaataggtgcaataatgatcaaagttttgatgtcttgagtctccatcttaggggattatcttacgtttaagcttaacatttcatgtagtaagatttggagagccacatactttacagtaaaattaagtgtgtataaaacattaattgctaacaattgttagcaaactatttcagtgataatgttcattttgaaaatatgtactgtataacattaagaaaatatttaactccctgtaacaagttccattatgaaaatcttattcctcagtgaggttatcttgctgcactctgtagcaaatttgtttaatctacattataataaaatttcttgctgcagtgcaacaggaggctttttcagtgatcttcactgtatatgtaaattacaaatgtggctgtaaaacttattccaggtattaaaggttaaattgctttctatatcttcttataacttgtaagtctgatttttaagatttccttttgtccacttgtaagaatgtcaggaatttaagaatttgtttaaattaggcatatctctgccatcacatagtattatgtcaccataatgaacaattgctatttaaatagataaccaattttcagacacatttttggatttctgtgaagttgaataaacataaaagcnnnn

SEQ ID NO: 22424 - DNA, 560 bp, Homo sapiens
  misc_feature 557, 558, 559, 560: n = A,T,C or G
cgacagagtctcgctcttgttgcccaggctggtctcgaactcctgacctcaggtgatctgcccgcctcagcctcccaaagtgctgagattacaggcatgagccactgtgcccagcctgtgtggtttggttttagcaattaagataatttggttgttaagccttgcttgtttgcaacaatgaagatggcacttgagattctggaaaggactttctaaactcaaggacctatgtgtgattgcttttattacctttttgtttattaggttttcaagacttgacattttgttttccttcatacagttcaccttgttggtctagtctatagagaaacaagagagctaagattttctgaaatgctttaggaaatgttgtggactgcatgactcccctgtgttattgatgtcaggaaatcaagcagagtgtagatatatgtcaatcaataactttagataggaaacggagtcagtggagaagtatgaggagcttaaaaagaaccctagggctttaggaagaaaaatcagagcttagagaataaaattgatactttggagctgannnn

SEQ ID NO: 22425 - DNA, 836 bp, Homo sapiens
  misc_feature 1, 2, 3, 833, 834, 835, 836: n = A,T,C or G
nnngccatgttggccagactggtctcaaacctctgacctcgtgatgacccccctcggcctcccaaagtgctgggattacacccagcctctgctgccttttcatatttccccatctgctttatggatcaactctcaacagtacactttttcttttctttacctaccctatgagtgcaacccagatgtaagagttaatcctcgtcagagaatcattgccttaaacctctcagaaatatgtaattaggaaatcttattttaattttttaaaaattgcttgtatagtttcaaagaataagatctggcaaatggccagatgtggtggctcacacctgtaatcaaaccagcactttgggaggctgaggcaggcagatcacctgaggtcaggcgttcaagaccagcctggccggcatggtgaagtcccgtctctacctctactaagaatgccaaaaaaaaaaaaaaaaagattggccgggcgtggtggcgcatgcctgtaatcccagctactcaggaggctgaggcaggataattgcttgaacccgggaggtggaggttgcagtgagccgagatcatgccactgcactccagcctgggcaacagagtgagactttgtctcaggaaaaaagaaaaaaaaaaagatctggcggatgaaaataaccagaatgaaaatagctagaaaactcagcaagcaggaagctccctttctcacccttttgttcccttgccgatagaatcagtcactattagaaaaaatgaaagacgctctgtttaaaacaatgatgacagcagtacttaatatgtatttcgaggtgaacttatatagattgagagaggcnnnn

SEQ ID NO: 22426 - DNA, 365 bp, Homo sapiens; identical to SEQ ID NO: 21784

SEQ ID NO: 22427 - DNA, 1042 bp, Homo sapiens
  misc_feature 1, 1042: n = A,T,C or G
nataagactgtaattacttcccaaataaggaatgccaagtaccttttattcctaaaagaaattacttggccaggtgcagtggctcacgcctataatcccaatgctttgggaggctgaggtggaagccaaggagtttcaggctgcagtgagctatgatcacaccactgtgttccagcctgggagacaaagcaagatcctgtctcttttaaaacaaaaaacaaacaaaccaaaaaaaaaacaaaaaaaaaacctaagaaatgtaattaatcattaagtagctgcaaattgaactgttctattttgatacttcctaagagtgtccagtgtaatcagatcattttataatgggttattgaccccaggtgtcctttagaaccacctggaaagctttacaaaaaaaaaaaaaaagggtgattttgatttagttgttatggaataggacccaggtatcaattttttaaagctctgccaggctaatatgtagctaagattgagaatcactaagtcaacacattttgatatatcaagaaaataaatggaaatgggggtgataatttatatttgtaatttacaaatcaaacatctatcatacacttactatgtacctagttttattcacgaatcatccatttctaagataaaaattcccatcatttcctcactgcactaaaccaccactgtacatctttgccaatgaatgactgtatttttctatggtcaagatttaaaattctgggatacattatgaaaactgcattaatgaaaacaacctactgctattcatgctcaacagtagcaagctaaactactgtacttggctcctttgagctacccttattttaagaattataaataggtgtcaacccacacaaagaacagattgtggattaccgtagggaaaaaaatagcttactcaacttactaaaagtttcaacaccaaaaaagatttaacttggctgaaagttctgaaacagctgagacacagaaccaggaagctataatttataatgaaatgttgatacatacttaaaagctactgcan

SEQ ID NO: 22428 - DNA, 768 bp, Homo sapiens
  misc_feature 756, 757, 758, 759, 760, 761, 762, 763, 764, 765, 766, 767,768: n = A,T,C or G
acctgctgtcccctctctgactagaaaacagtttccctagatacctgcatagttagccccctgaacttatttcaattctctgctcaaatgtcatgtaaatggtgacatcttccctgaccatcttatataaaataatacttccctttcccctgatattctctatccaccttatcctgtttgatttttctgcactgccccatcaaccattgacatataacatgtctacttgtttatatatgtattgtgtttcaccagcattgaaatgtgactttcacgagggtagggatttttgtctgttttatttaatactgtatccccaagaatgccttgcataaattgggactaacaaatatttattgaattgaataaatgaatacatttgggaaggcgcaaaggagtccttgcccctgaaattcatttcttcagtcagccagcaaactgtatggagtgacatctgtgtgctgagctcagagctctgtgcctgggatagcattttacagagcatggtgggcatggctggccagtgctcctgcttacttcgattttctgccttcccacttttcctgtgcttattatattctttcttagaagactttttccccactgttgagaacagggcagactgagaagcctccctactaaaactgaggttggcacccctctcctacttcattgtggaatcctggaatgggctttcttaccctgtgaccctagcaggtacacatgcttggggtcattgcatatcttgccttctgnnnnnnnnnnnnn

SEQ ID NO: 22429 - DNA, 1811 bp, Homo sapiens
  misc_feature 1, 2, 3, 4, 5, 55, 56, 57, 58, 59, 60, 61, 62, 63, 64, 65,66, 67, 68, 69, 70, 71, 72, 73, 74, 75, 76, 77, 78, 79,80, 81, 90, 1811: n = A,T,C or G
nnnnncctgtgtgtaaaacgaacggaccagtagcctggcgcctacggtcttcctnnnnnnnnnnnnnnnnnnnnnnnnnnngccaaaaantgtttgtacctctgggccatattgcagaaccctgcccttctttgttgactgaggaaagctcgctccctgcccaggtttttcattgttgatcgaaattaacaccaggtggtgaatagagcccctcctaaggttgctcaggataaatcatttattaaataggtctgcttatcaggaggggcgtgaaggctcccaaaaggaaatgctggcacctgggcccagaagccagggcctctaactcctggggttgatttcttcagtgaagttgcaccctacaaagggaatatggccaaagcggcactcaactgaaggctgatatcaggcgattagacagccatgcattctgcgtttgtctggaatggattgtagagagatggacttatatgaggactaccagtccccgtttgattttgatgcaggagtgaacaaaagctatctctacttgtctcctagtggaaattcatctccacccggatcacctactcttcagaaatttggtctgctgagaacagacccagtccctgaggaaggagaagatgttgctgccacgatcagtgccacagagaccctctcggaagaggagcaggaagagctaagaagagaacttgcaaaggtagaagaagaaatccagactctgtctcaagtgttagcagcaaaagagaagcatctagcagagatcaagcggaaacttggaatcaattctctacaggaactaaaacagaacattgccaaagggtggcaagacgtgacagcaacatctgcttacaagaagacatctgaaaccttatcccaggctggacagaaggcctcagctgcttttttgtctgttggctcagtcatcaccaaaaagctggaaggtgtaaaaaactccccaacttttaaatcatttgaagaaaaggtcgaaaacttaaagtctaaagtagggggaaccaagcctgctggtggtgatttggagaagtcttgaattcggctgcaaatgctagtgccaccaccacggagcctcttccagaaaagacacaggagagcctgtgagattcctaccttgtggtctgctacccactgccagatgcttgcaagcgaggtccaagcccatcttgtcagcatgccattgccttgaatttctaccagatgtgcttttatttagctttacatattcctttgaccaaatagtttgtgggttaaacaaaatgaaaatatcttcacctctattctgtgggaaacaccctttagctgtacatttatgttcctttatttaggaaacaccattataaaaacacttatagtaaatggggacattcactataatgatctaagaagctacagatgtcatagtggttttcctgctttacaaaattggctcagatctggaatgccagtttgaccttggtcttctataatatttccttttttcccctctttgaatctctgtatttttgattcttaactaaaatggtctcttaatttcctgatcctggtcattcacagtggcgttgtttctttacccccaggggagaactcttactccacacaatttgggtagcctgtgtgggctacaggcgcatttggtgcgaccccccgggaaagcgggtcccattagttggggcaaaacttttcaacccgggggggggcgcaatatattaacgcgggggcgcgccggtggtttcctaactaccgcggggaccaacccgcctggggacggccggcgacggaacaattggtgctan

SEQ ID NO: 22430 - DNA, 2358 bp, Homo sapiens
  misc_feature 1, 2, 3, 2358: n = A,T,C or G
nnnctggcccttcttaatatttaaaaatgtatttccccttgtggctttcaaccacctgctcaaaaaaagagacttgttacatgaaagttttcattaaagagctgaaatcaagaatttagagagccattcctagaaaatgtcctactgccctgcatttgacaaacaagcatcctttactaacaagagcaggaattcagaggcacaagaaaaagcattggcatgagccaaagagtctgtcttaatgttacttttgaaaatctgctgagcggccaccatatgcaggctgagagctgggcacaggcgaagccattggaagcacttcaggaacaagcacacagctgtgggacttgaacatgcaagtgttcaggttgtgtcaagaagcttttctttccttctatgatggaatctgttcttttctatcctacttttttctctcttcctctcctcaccacattataccctgctcttacgcagtaaacgttttaatggcccgtttatgtctcatgcctccaaacaacactgaatttgaaaccccccattttttcttttcaccaccctgttgagcaattttcccaaaaaaagggcagcaattattaaattgaattcaagtaagccagccaaagataggtcctaaattgctagtcccagtagaaccacctgatcctaaaccagtgcgaaacagacagtaacaatgtccccagctgacttcagctaagaaccaatggctcctacccccgccccgcttttttttgttgttttttgttttgttttgagacggagtcttgctctgtcccccaggctggagtgcactggcgcaatctcgggctcactgcaacctcctcctcctcccacattgaggcgattctcctgcctcagcctcccaagtagctgggattacaggcacccgccatcacacccagctaattttttttttttttttgtattattagtagaagccaggtttcaccatgttggccagggtggtctcgaactcctgacctcaagtgatccgtccacctcggccttgcaaattgctgggattacaggtgtgagccaccgtgccgagccagccccattttttaaatgatgttttggttaagagtggaccatgagaattagctgacagcatcccctttctctctccctgccttggtgggaccctccctgtgtgaccttggtcaagtcctcgaacttttgtcccgtatttaagatggagctgttttacctacttcataagacagttgcgaggtgccattgattcttgactgcaaaataccttgaaacccttatataaagactgaagtcaacggagcctagtgaaagacttactttgtggcttgtggttgaaagtcacatcaaaagacaaatgtggccacgttcaggaattggagacttactggcatggctctacagctgctcagttattaatcatgcagactaacctgtcaacactgggagatgcaacatagcaaaaggacagagaaattagaattttttgtgcagaaagccctaaattcccacctgaatgtaacttacagctcccttacctactctcacacatgccctcaaacatgctagattggcttatacataggccaacacaaaatacaaacgtgacgtgttcatgtagcctagtggctatatgcctattctccatgtaccctgcatggtagtgctgcaaactttaaagtacatttctttcacagcagtattttttttcataagtggcatataaatctcattcaatgaaatggggaaatcacgttgagaagttggtctgtcatctcccattgagcaaagactggcaggagataataaaaataaatatgggcacacatgtattaatatacagcacgcatttacaagtttattttccagataaaattgtgctataagaacagctctaccaagacagtctgcaccatttccaagtctcagttaatttacagcaactgctgctttcggagatggctgtgaaaatatggaagttcctctcaagtaggccaagaaacagttctagattttactaagttttattttgtcaggttttttaaattttttcagtgagcgtggtgactgcagaggttagtgctgtgaaaagctgggctaaatattctttctgtaaagtcaaacaggattccatcccctgtgaaataacacaaaatttcactctctaaaagcaacagcatgtaaactagaatgaaagaaggaaattatgtacgtatgcctaatattctttgtgaatgtctttcatttaactaaaattatattagaaaccagattgataaataaaaaattcaaagtagttttaattatcctatcctaaaaaaaaaaaaaattcctgcggccgcaagggan

SEQ ID NO: 22431 - DNA, 1082 bp, Homo sapiens
  misc_feature 1, 2, 3, 4, 1081, 1082: n = A,T,C or G
nnnngagtcattttcttgttctgtcaccaaggctagagtggagtggcacgatctcagctcactgcaacctctgccccctcggttcaagcaattctcctgcctttgcctcctgggtagctgggattacaggcgcctgccaccatggctgcctaatttttgtatttttggtaaagacagggtttcaccatcttggccagtctggtcttggactcctgacctcatgatccagccatgtggccgcccaaagtgttgggatgagaggcgcaaaccaccatgccccgttctctcccacaatctttagagaaacattggcctcagacctcatggcctataccctgccaagtaacaactgtgccttgttgcagtacatagacgagctttctttgcctgccccaacctgagaggagtgttatcggggaacccaggatctcctccatctcctatagaaagcaagttacaaaatatcaaaaaagaaagcccaaattttccatgaagaggttacatatctaggtgtcatattgagccacgaggaacactggtttggctatgagaggaagcaagccatttgtgcacttctaaccccgactacccgatgacaaataggaatttttagacgcagcaacattctgccacatctggattccaagtttttcactgatggctaagctgttatatgacgccacaaaaggaggggaaaaggagcccctcttttaaaaaactaaccaagaaatagccttcaaacagatcaaggaagctttaacccagaccccagccttaagactatgagacataactaagtctttctatatgttcatgaacaaaaaacaatgactataggggctctgactcaacttataggatcatggcgtcacccagtggcatatttatcccaacaactagactccgtggtgttaagatggcctctttgccttaaggcattagctgccaccatcttgttaacacaagaagctagcaaattaactctaggacagcaactaactgtcccggtgccacattcagtcataactttgatggatcaaagaaggcaccattagttatcaaacctgaggatgacgtcgann

SEQ ID NO: 22432 - DNA, 1675 bp, Homo sapiens
  misc_feature 1, 2, 1675: n = A,T,C or G
nncgcatgacttggtaggtggtcttaactatggattggttggtgtttggctgttcagggtcagatgtctgtgttggtgcttctggctcctcgtattgttgataccaagtttctgcgcttgcgtcaagggatgtcaggatctcattcggtctcgctttagtagttggcatggatctctggtgatcgcgcagatccgatcttagagttagccgacatcttggtgctggtaacttggtgtgtgagttcaaatcgaaagtcatatgggtgtgatcctacctatgtcacgtgcagtgtacacacaggtcaattcaaggcagtgtatagggagagacccatagccctgggaattgattccagagacatcttgctgaagaaattgtgcttcagagtcaagagtccagatgttgttccataatcaaagatctagatttcatctccagagataaagagaacctgttatgtccttagaatgagaagaccagagaagaccaggggcaaggtttctgagggacttcaaggtacagaagatacacaaagtggcaccagcctcactagcactctcatttctcaagagccagaacatggtgaatacagtcaagttcagtgtatttgataatatcaatttgggccccaaatctctctcacagtcttcctgggagtctattcttcttccaaaagtgcaagctaagccttctgaagatggtaaagaacttggccgggtgtggtggctcatgcctgtaatcccagcactttaggaggctgaggctggaagattgcttgagcctaggagtttgaaaccagtctgagcaacatagtaagaccctgtctctattctaaaaaacaaaataagtaaaaaggactgtaggaggccaagacaggtacaggaggcaccacactaccctgttgacacagcctggatccagagttcagcagaccttgagacaatgaaaacaaacttagtaataatcatttttcaatcattgcagtaattattgatttggacaaaaatcaattgatgtcaaaaccttaaagtgacgtttctctgcctatggagtggtcattcttttattcctttagtttcataataaattttcttttacttaaaaaaacttatagtttgatgaagagtgagatatatacctcatctcaaagaatcttcacacacacacttattaattacaaaaggaaaatcagtaattttgcagtggagacatatggccaactccaccttacccaagtggctgaaagtcactgcaccagtaatggcacaaaccaatgtgagatgattcctgatatgatacactaaaaagggcactgtctcttctgcatgttgcagacaaaaagtgggtaagctgacactgaaactaataattaggcaatgtcaagcaaatacaaattcaggttgacagtctgcaaagtaacatccatgtactcttcaacaatggatcgaccctagctactcaggaggctgaggtggaataattgtttgaggccaggagttccagatcagcctgggcaacatcatgcgaccccatctctaaaaacatctttttaaaaatgagccaggtgtggtagcatgcacccgtagtctcagctactcaggagcctggaggcaggaggatggtttcaacataggaacatccaagtgctggaagctaagaatcgggctataaacn

SEQ ID NO: 22433 - DNA, 1015 bp, Homo sapiens
  misc_feature 1015: n = A,T,C or G
cgcgtccggcggaaacatggcggtcgcggccgggccggtaacggagaaagtttacgccgacactggcctgtattagcgcgtatggcctcgggccctcgttccccaaggcgtgccgcctccctgttctcagtcgcaggctgaagccttgtctgctctcctcctttttggtttggttttggaactgactccgagggttgggagagcgcgttggtggcgacggccgagtcagatcactataaacaaaatttccacaagagaaaatgttgaaataggagttgcggatacattggatatactggatgaaatacaagcggttaatttttgtaacgtgagggaaaagcccacattgctggttacatgtgtaaatcactgcgttattgctttagtcattgtctctatttagcaatgacaagactggaagaagtaaatagagaagtgaacatgcattcttcagtgcggtatcttggctatttagccagaatcaatttattggttgctatatgcttaggtctatacgtaagatgggaaaaaacagcaaattccttaattttggtaatttttattcttggtctttttgttcttggaatcgccagcatactctattactatttttcaatggaagcagcaagtttaagtctctccaatctttggtttggattcttgcttggcctcctatgttttcttgataattcatcctttaaaaatgatgtaaaagaagaatcaaccaaatatttgcttctaacatccatagtgttaaggatattgtgctctctggtggagagaatttctggttatgtccgtcatcggcccactttactaaccacagttgaatttctggagcttgttgggtttgccattgccagcacaactatgttggtggagaagtctctgagtgtcattttgcttgttgtagctctggctatgctgattattgatctgagaatgaaatctttcttagctattccaaacttagttatttttgcagttttgttatttttttcctcattggaaactn

SEQ ID NO: 22434 - DNA, 727 bp, Homo sapiens; identical to SEQ ID NO: 21436
  misc_feature 1, 2, 3, 4, 5, 722, 723, 724, 725, 726, 727: n = A,T,C or G

SEQ ID NO: 22435 - DNA, 655 bp, Homo sapiens
  misc_feature 1: n = A,T,C or G
ngggcgaattggagctccacgcggtggcggccgggcaggtacgcgggggagcttggattttaaggcagtagcttgctgatgctcccagctgaataagtcccttctttctacaactcggtgtcttgagttttgtctgcggctcctcctgttacatttcttggctccctgaccgggaagcaacgtgactgacagacagctgaggcagccccttaggcaacttaagcctgccttgtggagtgcccctgtgggggactccagccagcctgagtgacatgatccaaagagccctcctgggtaggaaattgccccggtggaatccctcaccagagaagcaggtagcaggccctcgcagaggattaacacagtggctgaacaccaggaaggaactggcacttggagtccagacatctaaaatttggtatcgtgccttggatccaccacagtcagctgaaattatcagcccaggaccagtggaccaaccagcaggacatagaccatctgacccgaatgatcctgcaatgagaccacattgccagtggagatgacaacagcactgctctggtcactctggaagatgaccagtctatgcatggtggaagcttgagaaaatagcaagccctgctctagtcacaccaagaactgactagtctatgca

SEQ ID NO: 22436 - DNA, 866 bp, Homo sapiens
  misc_feature 1, 2, 3, 4, 5, 6, 7, 8, 9, 10, 11, 12, 13, 865, 866: n = A,T,C or G
nnnnnnnnnnnnnccgaggtactactcgattgttaacgtcaaggagtcgcaggtcttctggttctaggtaaatgggggaagtatgtaggagtggaagattagtccgccgtagtcggtgtacacaggccaagaaaaaaccgtatcaaaatgtaaatataattccacattacagccagttaaagaacaatgggaagaccaagaaggagatggcagtgacagaagaagggagaaggggaaataatgggcactaagaaagcagaaagagacatatttggagggagatggctaccgaaatctgggcttttcttagatcctctccaaggaaagttatcactggaaatacccagggccctgattgtatgcactgtgctagggagaaagacattcagatgctgaaataaaaaactagggaattagtaaaaattggatctctaagacaaataaattgatcaaactataataataatcaaacttctaataatgtataacctctccagagatgaactccaagaacagctcaatggtttgttgaaaaaaaaaaaagagacccctggtttatgcactttctccccaagggagacatggggttgatccatcgggtcttcttcaattgcacagttggcaggctggccattcccatggagggtcattctccttttaaagaatggttaggtaaccttcagcagccatagggcactttagacataaagagacaaagccatcactgacccagcccagccacgagaattcctgagttggaagaaccagggtgttcacctcccactcaacagagaattcccttggaagcggacgcgtgggtcgaagcttaacctgccgggcggccgccaccgcggggagttccaann

SEQ ID NO: 22437 - DNA, 1811 bp, Homo sapiens; identical to SEQ ID NO: 22429
  misc_feature 1, 2, 3, 4, 5, 55, 56, 57, 58, 59, 60, 61, 62, 63, 64, 65,66, 67, 68, 69, 70, 71, 72, 73, 74, 75, 76, 77, 78, 79,80, 81, 90, 1811: n = A,T,C or G

SEQ ID NO: 22438 - DNA, 3636 bp, Homo sapiens
  misc_feature 3552, 3632: n = A,T,C or G
cgaccccgcgtccgcggacgcgtgggctccggcgctgacgggtgtggaccgcggacgtcgctgggacagcccctccccgctgctcggcggcggcacctggcccggccgctcctcgctgcgcttcgcctccgcctcctcggactcggactcggactcgggtttatatcgcgcctcacttcatcccagtcccgggcgagcagcgttgggtttatgtctttatttgacgaaaacgacagaagataccaaaaagttgcaatcaaagatctcttcatcttattgataaagccactaataagccaaaatgtctgtcaatgtcaaccgcagcgtgtcagaccagttctatcgctacaagatgccccgtctgattgccaaggttgagggcaaaggcaatggaatcaagacagttatagtcaacatggttgacgttgcaaaggcgcttaatcggcctccaacgtatcccaccaaatattttggttgtgagctgggagcacagacccagtttgatgttaagaatgaccgttacattgtcaatggatctcatgaggcgaataagctgcaagacatgttggatggattcattaaaaaatttgttctctgtcctgaatgtgagaatcctgaaacagatttgcatgtcaatccaaagaagcaaacaataggtaattcttgtaaagcctgtggctatcgaggcatgcttgacacacatcataaactctgcacattcattctcaaaaacccacctgagaatagtgacagtggtacaggaaagaaagaaaaagaaaagaaaaacagaaagggcaaagacaaggaaaatggctccgtatccagcagtgagacaccaccaccaccaccaccaccaaatgaaattaatcctcctccacatacaatggaagaagaggaggatgatgactggggagaagatacaactgaggaagctcaaaggcgtcgaatggatgaaatcagtgaccatgcaaaagttctgacactcagtgatgatttggaaagaacaattgaggagagggtcaatatcctctttgattttgttaagaaaaagaaagaagagggtgttattgattcatctgacaaagaaatcgttgctgaagcagaaagactggatgtaaaagccatgggccctcttgttctaactgaagttctttttaatgagaagattagagaacagattaagaaatacaggcgccatttcctacgattttgtcacaacaacaaaaaagcccaacggtaccttcttcatggtttggagtgtgtggtagcaatgcatcaagctcagcttatctccaagattccacatatcttgaaggagatgtacgatgcagaccttttagaagaagaggtcatcatcagctggtcggaaaaggcctctaagaaatatgtctccaaagaacttgccaaagagattcgtgtcaaagcagaaccatttataaaatggttgaaggaggcagaggaagaatcttctggtggcgaagaagaagatgaagatgagaacattgaggtggtgtattcgaaggctgccagtgtaccgaaagttgagactgtaaagtcagacaacaaggatgacgacatcgatattgatgccatttaaagggatggatgcaacctagcttaacagtataatgctgcaaattttcctccattatcagccagaagtgcaacatgtatgtgcaaaagctaaaatggcttaacatcatgctacactttacactaaaaatctattactgtgagtggtctgttattaagcccaatgagacatctagggagtccatacacatcagtgagcagatgtagtttgcttatttatagcatgtttctttttgaaaaactagtggtggacacatttggatcacatttatacagttataaaaataaaggtttgattttggtcgttcttcagatgtttggctctgaatgacttaagctgaagtaactggctccttactttaaatgttctgccatcatttcacctgatgagcattcttggagcctgccagatattgttaggtcctggggctgcaaagaggtcctcaacaggatgtaaagcaaacttaattgtaattaatttattcagcccattaagaaagtactaaagttttatctctgtagttcctcaaattggcatctggtaatgtacattgtgaggtagactgataatgaaatgacagtgcaacatcttaaccaagaagtaaatatgacctcagtgtcctataaataatgtaagagcaggatttgaaacttggagagctgttttctcatttcatgtacacttgccccaaattgtctttgaagtcgtgtgcattgcacgttggatgagccagggaaattattacattaacaagcattttgtgtgtgcgtagtagttactttgtactgagagaacttgctttggggtgcaattaaacaataaactgattttatttgggagaaacaaggaagggtgcacttaactagcaacctaagcatgatttttcagcttttgcccttagggtttaaattacaattccaaaatgttagacatactgtattttttcgttcagtgtggctttaattttcccctcttgcagtttgttctgtaatgccttttacatttggacacatagtttatgctttttagattttggttgctttcttgccaaaataagtgttaactgtgtttcaaacttgattttctttcttttttcttttttttttcttccagaatgtcttatttaaaaagaaagctaaaagcatacttctaagtcagagcctctattttggtgtaagacttgggatattttttacttcacattgaatatagccaggcacccaagaagtctgatggccacctgagtgcaggtgacaaggacctgacagagcccatgcagggctttagatttggacacacaagagttgataacttcctcatgaactccttgcctgatctaaactcatattatgggttctgactgtttgagtaatcatcttcaaggttaaacctcttggcagttacccttttcacaaagtgcacagtgggaatcgagaatcgatagggttaattttggagcagtggcttataccattcacctctgtttttttgtgattatttcacagataatgagaccttaataacaaataggcgtaaaaaaattttcacattgaaatgatagaaacatttgatgtaataaaacttggttggcttgatattttaaggaattgaaacctagcaatcttattggagagacaagaattggtctccagctgcctttgatcaagattcgggtgcaagtggagcaggagccatatacctggagggaatgtgctttgtcacaccaaagaggatttttttttcttcaaacttgtatgttgcctaggtttcaaattctttgccgcaacgtggatctgctttcattaactggaattctgtaggagatactggtgacctaagctaagttgcactcagcatactcagtgtcaagctaatgaggttctattataaaggttctacttttaatctgagggaaaacatgttcagggcttctggaacactaaaaaatttggcttaanccagtgtcagtctggtgccaacttcgaatggaatacaaattcccataatctgaactttgttcacaggttatcctaatagngtaa

SEQ ID NO: 22439 - DNA, 960 bp, Homo sapiens
  misc_feature 1, 2, 3, 840, 843, 951, 952, 953, 954, 955, 956, 957, 958,959, 960: n = A,T,C or G
nnngccggccgcccgggcaggtacgaatttaagcacttacatgagggggttaagtcagagtctgttgaggagctgaagaaggtggctgaggagctggaggagaagctaagcatgctcaacaataattataagattctgcaggcggaccagactgtagttccagctaactgggcggctgaggcaggagaatggcgtgggcctgggaggtggagcttgcagtgggccgggatatcgccactgcactccagcctgggtgacggagcgagactccatctcaaaaaaaaaaaaaaaaaaagaatatattgacggaagaatagagaggaggcttgaaggaaccagcaatgagaaggccaggaaaagaaagagctgaaaatggagaaagcccaagagttagaacagttggatacaggagaagaaacagcggctccactacagacccagccccaggttcaatgtcctccgaagaatgaagtctttccctggtgatggtcccctgccctgtctttccagcggctttctgatgatggtcgttggggtggttgtcatgtgatgggtcccctccaggttacttaagggtgcatgtcccctgcttgaaccctgaaggccgggtaatgagccatttccatggtgcccagctgaggaccaggtgtctctgagaatccaaacatcctggagagtatctgagaaccaaccaagtaaaagtctcgttgctcatatatagtagacaaagagccagaaaattaactgaaaagcagtttagacattgggggaggccggatctctcgagctgtcttgctgagtgccctgtgtgtaagtcctaataaacttagctactcgcanaanaaaaaaaaaaaaaaaaaaaaaaatcccctcccgggggggccctttaaaaaaagggggccccccggggggggggaattttatttataattttttttacccccccccccnnnnnnnnnn

SEQ ID NO: 22440 - DNA, 1873 bp, Homo sapiens
  misc_feature 1, 2, 3, 4, 5, 6, 7, 8, 9, 10, 11, 32, 40, 1858, 1859, 1860,1861, 1862, 1863, 1864, 1865, 1866, 1867, 1868, 1869, 1870,1871, 1872, 1873: n = A,T,C or G
nnnnnnnnnnnaaatcacttttttttactggntctaacgntctctgttgggtgttatttcatcccttcatctgtaggaatgccattacactgtgcttggagatgcttttaaggaatgctttgtgagtagaccacatcccaagccaaagcagttttcaagttttgaaaaaagagcaaagatattctgtgcccgacagaactgcagccatgactggggaatccatgtgaagtacaagacatttgagattccagttataaaaattgaaagttttgtggtggaggatattgcaactggagttcagacactgtactcgaagtggaaggactttcattttgagaagataccatttgatccagcagaaatgtccaaatgatatcaggtcctcaatcttcagctacagggaatgagtaactttgagtggagaagaaacaaacatagtgggtataatcatggatcgcttgtacccctgtgaaaatatattttttaaaaatatctttagcagtttgtactatattatatatgcaaagcacaaatgagtgaatcacagcactgagtattttgtaggccaacagagctcatagtacttgggaaaaattaaaaagcctcatttctagccttctttttagagtcaactgccaacaaacacacagtaatcactctgtacacactgggatagatgaatgaatggaatgttgggaatttttatctccctttgtctccttaacctactgtaaactggcttttgcccttaacaatctactgaaattgttcttttgaaggttaccagtgactctggttgccaaatccactgggcacttcttaaccttctatttgacctctgcgcatttggccctgttgagcactcttcttgaagctctccctgggcttctctctcttctagttctattctagtctttttttattgagtcctcctctttgctgatcccttccaagggttcaatatatatacatgtatatactgtacatatgtatatgtaactaatatacatacatacaggtatgtatatgtaatggttatatgtactcatgttcctggtgtagcaacgtgtggtatggctacacagagaacatgagaacataaagccatttttgtgcttactactaaaagctgtccactgtagagttgctgtatgtagcaatgtgtatccactctacggtggtcagcttttagtagagagcataaaaatgataaaatacttcttgaaaacttagtttactatacatcttgccctattaatatgttctcttaacgtgtgccattgttctctttgaccattttcctataatgatgttgatgttcaacacctggactgaatgtctgttctcagatcccttggatgttacagatgaggcagtctgactgtcctttctacttgaaagattagaatatgtatccaaatggcattcacgtgtcacttagcaaggtttgctgatgcttcaaagagcttagtttgcggtttcctggacgtggaaacaagtatctgagttccctggagatcaacgggatgaggtgttacagctgcctccctcttcatgcaatctggtgagcagtggtgcaggcggggagccagagaaacttgccagttatataacttctctttggcttttcttcatctgtaaaacaaggataatactgaactgtaagggttagtggagagtttttaattaaaagaatgtgtgaaaagtacatgacacagtagttgcttgataatagttactagtagtagtattcttactaagacccaatacaaatggattatttaaaccaagtttatgagttggttttttttcatttttccatttgtattttattaagagtgtctttttttatgtgaannnnnnnnnnnnnnnn

SEQ ID NO: 22441 - DNA, 472 bp, Homo sapiens
  misc_feature 1, 2, 3, 4, 5, 6, 7, 8, 22, 51, 472: n = A,T,C or G
nnnnnnnnaagctctattcagnagggatctagcctttgcaataatgtcgancctagccacggagggtgttttcttgttaccttataaaacaggtaataaccaatcattttgtgttcgtatttccatcctttttatgttctggcctttgtgtacgactgatgattaagtaaggcaaactagcttctacttttcaaacgagccgccaagggcattaatagaccccatttgtaaactgagaaatgattctcgttttagtaatcattctataaatgatactgctggattgattgccgagggttgatagctggaggaattgttttggacaatactaacatgtgaatctatgtcttagttttatttgcagccttgctaagtaaaatgagcctttgtatctacttattaattaaagtgaaatttagcgatagtgaatattaggtgacataaataaaacatcccagactagtgagttaan

SEQ ID NO: 22442 - DNA, 1833 bp, Homo sapiens
  misc_feature 1, 137, 221, 243, 310, 1798, 1807, 1808, 1809, 1810, 1811,1812, 1813, 1814, 1815, 1816, 1817, 1818, 1819, 1820, 1821,1822, 1823, 1824, 1825, 1826, 1827, 1828, 1829, 1830, 1831,1832, 1833: n = A,T,C or G
nagagagagaatggagtagatgatggggtaatgcagaaagaagatgacgaaatggggacattgttagaacacccacctgaagctccaggccagaaggtttttttgatataccccagaattagtaggcaccatttgancaggtcttccagacaaccggctggaggctcagtgtcagaagtttggtcggataagcccagagataaggatggcaatactggggncagttctctcagagcaaccagncctgaggctacagttatagaagattctgttggatatagccaagaaataaggatgagaaaatctgggncagtgctcctcagaccaatcggccagaaggtatatttaaaaagaaagtttctctttgaatattgcacaaggaatacgggcggttggaaatctggaacagagtatcctgagaatctgcccaccttgaaggctacaattgaaaataaaaattctgttctgaatacagccaccaaaatgaaagatgtacaaacatccacaccagcagaacaagacttagaaatggcatcagagggagagcaaaagaggcttgaagaatatgaaaataaccagccacaggtgaaaaaccaaatacattctagggatgaccttgatgacataattcagtcatctcaaacagtctcagaggacggtgactcgctttgctgtaattgtaagaatgtcatattactcattgatcaacatgaaatgaagtgtaaagattgtgttcacctattgaaaattaaaaagacattttgtttatgtaaaagattaacagaacttaaagataatcactgtgagcaacttagagtaaaaattcgaaaactgaaaaataaggctagtgtactacaaaagagactatctgaaaaagaagaaataaaatcgcagttaaagcatgaaatacttgaattggaaaaagaactctgtagtttgagatttgccatacagcaagaaaaaaagaaaagaagaaatgttgaagagttgcaccaaaaagttagggaaaagttaagaataacagaagagcaatataggatagaagctgatgtgacaaaaccaattaaaccggctctcaaatcagcagaggtggaattgaagacaggaggaaataattcaaatcaggtttctgaaactgatgaaaaagaagacctgctgcatgaaaaccgcttgatgcaagatgaaattgccaggctcaggctggaaaaagacacaataaaaaaccaaaacctggaaaagaaatacttaaaagactttgaaattgtgaaaagaaagcatgaagaccttcaaaaggctctaaaacggaatggggaaacattagcaaaaacgatagcctgttatagtggacagcttgctgctctgacagatgaaaacacaacgctccgttccaaactggagaagcaaagagagagcaggcaaagactggaaacagaaatgcaatcataccattgtagactgaatgctgctctatgtgatcatgatcaaagtcactcatcaaaaagagaccaagagcttgctttccagggcacagtagataaatgtcgtcatttacaggaaaatttgaattctcatgttctgattctttctctgcaactttctaaagctgagagtaagtccagagtcctcaaaactgagctccattacacaggagagaggctctgaaagaaaacgggcttttggtttttgaaacacatacaaagagagctaaaccaaacggtgtcaaatgaaggacattgaaaaaaatgtacaaaaagtggaatacaaatacaaatggtaaaaaatgcataagaaaaagcanggaaaagannnnnnnnnnnnnnnnnnnnnnnnnnn

SEQ ID NO: 22443 - DNA, 436 bp, Homo sapiens
  misc_feature 41: n = A,T,C or G
gagacagagtctcgctcagtcgcccaggcagagcttgcagnggcagagatcacaccactgcactccagcctgggcgactcagggagcctccgtctcaaaaacaactttttttcatccatggacaattgttgtcttgttttggtcctctttaggaggtggttttataatcagctataaaactccaataggtgctcttgaatgcaggtttctgataactttggagattgtgacaacagaatagaggaagaaccttcaggactcatggagagctaaatgttcatgagtatcaagcaggaattaacaggaattaactgcatggactgaaccaatcttttttactttttgctcaaaatatttgctgggcctttgttttgcgtttccgagtcttatgacttttcttttgagctacctgacagattttaacaatttaagatac

SEQ ID NO: 22444 - DNA, 432 bp, Homo sapiens
acgcgggggcacacagatggcattttaaagtttataaatgaataatgtctgatgaaaacatcaaagctactttctagatttgtggagattgcccagataaacgaagtcacggtaaaaggctagtgtgagaaacaccaacagcaggcccatctcagatcttcactatggcaacttatgcaagaaactgttgaattagacccgtttcctatagatgagaaaccatacaagctgtggtatttatgagcctccatttcttatactactgcagtgaaccaacattggatgtgaaaattgccttttgtcagggattcgataaacaagtggatgtgtcatatattgccaaacattacaacatgagcaaaagcaaagttgacaaccagttctacagtgtggaagtgggagactcaaccttcacagttctcaagcgctacc

SEQ ID NO: 22445 - DNA, 1767 bp, Homo sapiens
caaacggcagtgagggaatctaagtggtcaaattcctagaaatacttgtcctcagcaccactaggtggcagtagttggttgaggctgtgaatgatcggtaacataatcactagtagtgaagccatcacagatgctagcaatgacttaggagtctcccacagctggtcagacaggcattctgtgaagcagatggccagtggacagtgtgagcctatcagacttgaattaattgaggaaataaatgagcggaatgaagtatacagacctttgcttggtaaaagaataatttggagaggggactagcatcttaccacctggagtaaaaaatggtatcataaaagatctattcaagcaatattccaaaagccttctgaattctttctagtgctccttttgtatatcattgatagagaattcatctcatgttttcttagctaaagaagcacacaaaccccctgtgtttattgagaagctccaaaacacaggagttgctgatgggtacccagtgcggctggaatgtcgtgtattgggagtgccaccacctcagatattttggaagaaagaaagtgaatcactcactcacagcactgaccgagtgaggtaagactgcacaatgagaacctgatccttaactgttcagtcctaatgatgtatcaaaagatacattttatatagcatggaaatctatgtgtaaaagccacatagatgttttgatttttgatgaaatcaatcaaagacaaaaaccatgcgttacccaatgtaggattaagcttttagaaggaagctatgggtgtttgatctaatggtgatttcttaaaagtgtttatcattctatctaaaagaaaagatgaattcatttgctttagtgataaaagactattcagtggtttttgtaaaggcagatcctcaactaggaattaagcacacagatgtattcaactcttgacgtctgttctttctcccattaactttaatggagctagtaatctctacagaataagtatgaccctattatcagctacttgcacaattctgtttctaatgatctaattaaaaatgatgcttcatgtccaaagccacttttaaaaaatttagaaccctaatgactttatccttttctccagcatgcaccaggacaaccacggctacatctgcctgctcattcagggagccacaaaagaagatgctgggtggtatactgtgtcagccaagaatgaagcagggattgtgtcctgtactgccaggctggacgtttacacccagtggcatcagcagtcacagagcaccaagccaaaaaaagtacggccctcagccagtcgctatgcagcactttcggaccagggactagacatcaaagcagcgttccaacctgaggccaacccatctcacctgacactgaatactgccttggtagaaagtgaggacctgtaatccagcattcttgttaaagctgaaacactgaaacagccattgccttgaccaacatattcctttgtcacattatgtaaaaggcagaaacatacctttgactataagaaattaaaaaaaaaacaccaaaataatatttttcttacttgatataccaaacttagtttaagtagataatgctaatacaaatatacacattgcacagaaaatacacatttactgtccaatttaaaactttggaattgctgtgattaaagtgatcaaaatgccaaaatactaaaggaaatcaattgttcacaggtaactacaatttgtattatctacaagtgcctttaaaca

SEQ ID NO: 22446 - DNA, 534 bp, Homo sapiens
  misc_feature 1, 2, 3, 4, 38, 532, 533, 534: n = A,T,C or G
nnnnccgaggtactgattccatgggatatgtcaatacnccctccgtgagcttggaccaggcaggagaagagagtggtatcacctgggtaatgaatggaaatatatgtcataatgctcctttttggcagtagagttacattaccagggtgtcaaacccagcaatatgtcacaattgcttatgtggtcggggaacaggcaggagagtcacataacctgggcatagggctcacagacatgtcccaatgccttccgtaggcagtgccaaggcaggggaggagactcaaatcatttaagtgtaaggtccagcgatatgtcacaatgtcccctgtgagcagcaccaatgcagaaaaatagaatcacatcccctcagttctgggttcagctgtgtgtcactattccatctgtgggctggtcttaggcaagacagtcagatcactcaggtgctgggatttcagccaaggtatctcacatatcttccccgagggaaggaaacaagcaggagtgtcatatcacctgggtgctccctgtgccnnn

SEQ ID NO: 22447 - DNA, 3047 bp, Homo sapiens
  misc_feature 3039, 3040, 3041, 3042, 3043, 3044, 3045, 3046, 3047: n = A,T,C or G
agggatcgaccccgcgtgatgctagaacataatgtagcattactttccccagggtttattgttatgtaagttcttgttcagcttcctttgttttctttcacttctgagaatttaactttcgtttctcactcagctcctgtggggaaactcatttgtggagaccagccctctggcttggtgagtgaatctggtttacaccggctcctgccctgccttcactcttctcccctgattcaagactcctctgctttggactgaagcactgcaggagtttgtgaccaagaacttcaagagtcaagacagaaggaagccaagggagcagtgcaatggatttctcagtaaaggtagacatagagaaggaggtgacctgccccatctgcctggagctcctgacagaacctctgagcctagattgtggccacagcttctgccaagcctgcatcactgcaaagatcaaggagtcagtgatcatctcaagaggggaaagcagctgtcctgtgtgtcagaccagattccagcctgggaacctccgacctaatcggcatctggccaacatagttgagagagtcaaagaggtcaagatgagcccacaggaggggcagaagagagatgtctgtgagcaccatggaaaaaaactccagatcttctgtaaggaggatggaaaagtcatttgctgggtttgtgaactgtctcaggaacaccaaggtcaccaaacattccgcataaacgaggtggtcaaggaatgtcaggaaaagctgcaggtagccctgcagaggctgataaaggaggatcaagaggctgagaagctggaagatgacatcagacaagagagaaccgcctggaagaattatatccagatcgagagacagaagattctgaaagggttcaatgaaatgagagtcatcttggacaatgaggagcagagagagctgcaaaagctggaggaaggtgaggtgaatgtgctggataacctggcagcagctacagaccagctggtccagcagaggcaggatgccagcacgctcatctcagatctccagcggaggttgacgggatcgtcagtagagatgctgcaggatgtgattgacgtcatgaaaaggagtgaaagctggacattgaagaagccaaaatctgtttccaagaaactaaagagtgtattccgagtaccagatctgagtgggatgctgcaagttcttaaagagctgacagatgtccagtactactgggtggacgtgatgctgaatccaggcagtgccacttcgaatgttgctatttctgtggatcagagacaagtgaaaactgtacgcacctgcacatttaagaattcaaatccatgtgatttttctgcttttggtgtcttcggctgccaatatttctcttcggggaaatattactgggaagtagatgtgtctggaaagattgcctggatcctgggcgtacacagtaaaataagtagtctgaataaaaggaagagctctgggtttgcttttgatccaagtgtaaattattcaaaagtttactccagatatagacctcaatatggctactgggttataggattacagaatacatgtgaatataatgcttttgaggactcctcctcttctgatcccaaggttttgactctctttatggctgtgcctccctgtcgtattggggttttcctagactatgaggcaggcattgtctcatttttcaatgtcacaaaccacggagcactcatctacaagttctctggatgtcgcttttctcgacctgcttatccgtatttcaatccttggaactgcctagtccccatgactgtgtgcccaccgagctcctgagtgttctcattcctttacccacttctgcatagtagcccttgtgctgagactcagattctgcacctgagttcatctctactgagaccatctcttcctttctttccccttcttttacttagaatgtctttgtattcatttgctagggcttccatagcaaagcatcatagattgctgatttaaactgtaattgtattgccgtactgtgggctggaaatcccaaatctagattccagcagagttggttctttctgaggtctgcaaggaagggctctgttccatgcctctctccttggcttgtagaaggcatcttgtccctatgactcttcacattgtctttatgtacatctctgtgcccaagttttccctttttattaagacaccagtcatactggctcagggcccaccgctaatgccttaatgaaatcattttaacattatattctctacaaagaccttatttccaaataagataatatttggaggtattgggaataaaaactccaacatataaatttgaggaaggcacgatttcactcataacaatcttaccctttcttgcaagagatgcttgtacattattttcctaataccttggtttcactagtagtaaacattattattttttttatatttgcaaaggaaacatatctaatccttcctatagaaagaacagtattgctgtaattccttttcttttcttcctcatttcctctgccccttaaaagattgaagaaagagaaacttgtcaactcatatccacgttatctagcaaagtacataagaatctatcactaagtaatgtatccttcagaatgtgttggtttaccagtgacaccccatattcatcacaaaattaaagcaagaagtccatagtaatttatttgctaatagtggatttttaatgctcagagtttctgaggtcaaattttatcttttcacttacaagctctatgatcttaaataatttacttaatgtattttggtgtattttcctcaaattaatattggtgttcaagactatatctaattcctctgatcactttgagaaacaaacttttattaaatgtaaggcacttttctatgaattttaaatataaaaataaatattgttctgattattactgaaaagatgtcagccatttcaatgtcttgggaaacaattttttgtttttgttctgttttctttttgcttcaataaaacaatagctggctctgnnnnnnnnn

SEQ ID NO: 22448 - DNA, 344 bp, Homo sapiens
  misc_feature 1, 2: n = A,T,C or G
nnaggctatggtgaagttttgctggtcgacttggatgccaggtaggcatgtcttcaggttctagtcacggcagtggtaggccaaatattcctttccttgggacctagggcagtgtataatggcattagtgttggctagtccagagagctgattcttgaacctctaggtggcttgcctggttactggtagtgacagcagtaggccagttgggtgggcaggtttttgggctcctgggcatgaagtatgctatgggcaatatcagtagccgtggcaggacaaacctctggcttccgagttgtctatcccggtattgacagtgacagtgattggcttggcaggccagt

SEQ ID NO: 22449 - DNA, 407 bp, Homo sapiens; identical to SEQ ID NO: 21346
  misc_feature 407: n = A,T,C or G

SEQ ID NO: 22450 - DNA, 2491 bp, Homo sapiens; identical to SEQ ID NO: 20436

SEQ ID NO: 22451 - DNA, 1559 bp, Homo sapiens
gggagtcgacccacgcgtccggacgaatcgcgccagggagcgctcagacaccttcatcaacctccgggaggtgctcaaccgcttcaagctgccgccaggagagtacattctcgtgccttccaccttcgaacccaacaaggatggggatttctgcatccgggtcttttctgaaaagaaagctgactaccaagctgtcgatgatgaaatcgaggccaatcttgaagagttcgacatcagcgaggatgacattgatgatggattcaggagactgtttgcccagttggcaggagaggatgcggagatccctgcctttgagctgcagaccatcctgagaagggttctagcaaagcgccaagatatcaagtcagatggcttcagcatcgagacatgcaaaattatggttgacatgctagattcggacgggagtggcaagctggggctgaaggagttctacattctctggacgaagattcaaaaataccaagtaagatcccagagatgcgggtggatctgtgttgggaaacattctgttcatatgctttaagatgcagcaactcctgcacagagtggagaaacatttccaaggggattgggattttacccataatgaagctcagagtgagtaaagatggggctgaggaaatgcaaacaaaaaaccaaccaggacttcgcaggtgaaatggcctattcccttcctcctgattattgggatcatctaaaggccaccatcaagggtttcctgaaaagggtttttgacagctaaagtacaaaaattatataagacaagaacatggacctatgggcgttggctggctgatttgatgggcatatttacaaaccagctcacagacagaagcaaaatactattagttatttaaggcagaaacataagtgattcttccacggccaaactagaggcacagagctggaaaaacttcatccccactcagcacatactagggaggtaacttgccagctttgctttgggtcatagttcttacagctaacttatgtgttccagaaaatttaccgagaaatcgacgttgacaggtctggtaccatgaattcctatgaaatgcggaaggcattagaagaagcaggtttcaagatgccctgtcaactccaccaagtcatcgttgctcggtttgcagatgaccagctcatcatcgattttgataattttgttcggtgtttggttcggctggaaacgctattcaagatatttaagcagctggatcccgagaatactggaacaatagagctcgaccttatctcttggctctgtttctcagtactttgaagttataactaatctgcctgaagacttctcatgatgggaaaatcagccaaggactaagcttccataggaaatacactttgtatctgggacctcaaaattatggggaaccatttacttaaacgggatgatccataggctggaaaataatggatactgtgcaatttgaggataggcaggaagttttcacacatccaaggtaaaaggtttggcatatccattattactaaatggcaattggggtcggtttaacccttggaca

SEQ ID NO: 22452 - DNA, 1497 bp, Homo sapiens
  misc_feature 1, 2, 3, 4, 5, 6, 7, 8, 9, 10, 11, 12, 1493, 1494, 1495,1496, 1497: n = A,T,C or G
nnnnnnnnnnnncggaagtcttctagaattaattaacgcgggcgctcatttcacagctgtggattttccctttctgtctccccagaaattgcaggtgctgcagtgtctgaaatttccgggcctttctcaacagaggatgtagccagcaactgtgtccccgctcagtctttgagcgagcccattttgtggattgtgtcctatgcgctcatgagcgtctgtggagccatcctccttgtcttaatcgtcctgctgctgctgccgttccggtgtcagcgtcgcccccgtgaccctgaggtcgtcaatgatgagtcctctctggtcagacatcgctggaaatgaatagccaggcctgacctcaagcaaccatgaactcagctattaagaaaatcacatttccagggcagcagccgggatcgatggtggcgctttctcctgtgcccacccgtcttcaatctctgttctgctcccagatgccttctagattcactgtcttttgattcttgattttcaagctttcaaatcctccctacttccaagaaaaataattaaaaaaaaaacttcattctaaaccaaaacagagtggattgggctgcaggctctatggggttcgttatgccaaagtgtctacatgtgccaccaacataaaacaaaaccaagccttggctcgttctcttctctcttcaatctctggaaaaataagtacatatagttgataacccctcttagcttacaggaagctttttgtattaattgcctttgaggttattttccgccagacctcaacctgggtcaaagtggtacaggaaggcttgcagtatgatggcaggagaatcagcctggggcctggggatgtaaccaagctgtacccttgagacctggaaccagagccacaggccccttttgtgggtttctctgtgctctgaatgggagccagaattcactaggaggtcatcaaccgatggtcctcacaagcctcttctgaagatggaaggccttttgcccgttgaggtagaggggaaggaaatctcctcttttgtacccaatacttatgttgtattgttggtgcgaaagtaaaaacactacctcttttgagactttgcccagggtcctgtgcctggatgggggtgcaggcagccttgaccacggctgttcccctcacccaaaagaattatcatcccaacagccaagacccaacaggtgctgaactgtgcatcaaccaggaagagttctatccccaagctggccactatcacatatgcttactcttgcttaaaattaataaatcatgttttgatgagaaaaaactaaaaaaaaaaagaaaaaaggggggggggcaaaagaatccctgagggcaaagtaaggggtacccggtttttgtaaaaggtgcctaaggggtcgtataatagaaaggaggcggtgtttaacgtggctggtaacggtgcgggtttgggggacatttgggtgttggaaactcaggttggtaggataatggnnnnn

SEQ ID NO: 22453 - DNA, 1618 bp, Homo sapiens
actgggtacccgggcccccctcgagagtacttctagaattaattaacgcgggggcagtttgaatcgcggtgcgacgaaggagtaggtggtgggatctcaccgtgggtccgattagccttttctctgccttgcttgcttgagcttcagcggaattcgaaatggctggcggtaaggctggaaaggactccggaaaggccaagacaaaggcggtttcccgctcgcagagagccggcttgcagttcccagtgggccgtattcatcgacacctaaaatctaggacgaccagtcatggacgtgtgggcgcgactgccgctgtgtacagcgcagccatcctggagtacctcaccgcagaggtacttgaactggcaggaaatgcatcaaaagacttaaaggtaaagcgtattacccctcgtcacttgcaacttgctattcgtggagatgaagaattggattctctcatcaaggctacaattgctggtggtggtgtcattccacacatccacaaatctctgattgggaagaaaggacaacagaagactgtctaaaggatgcctggattccttgttatctcaggactctaaatactctaacagctgtccagtgttggtgattccagtggactgtatctctgtgaaaaacacaattttgcctttttgtaattctatttgagcaagttggaagtttaattagctttccaaccaaccaaatttctgcattcgagtcttaaccatatttaagtgttactgtggcttcaaagaagctattgattctgaagtagtgggttttgattgagttgactgtttttaaaaaactgtttggattttaattgtgatgcagaagttatagtaacaaacatttggttttgtacagacattatttccactctggtggataagttcaataaaggtcatatcccaaaaaaaaatgtatgttactataacttctgcatcacaattaaaatccaaacagttttgtaaaaacagtcaactcaatcaaaacccactacttcagaatcaatagcttctttgaagccacagtaacacttaaatatggttaagactcgaatgcagaaatttggttggttgaaaagctaattaaccttccaacttgctcaaatagaatcacaaaaaggcaaaattgtgtcacagagatacagtccactggaatcaccaacactgcacagctgttagagtatttagagtcctgagataacaaggaatccaattcttcatctccacgaatagcaagttgcaagtgacgaggggtaatacgctttacctttaagtcttatgatgcatttcctgccagttcaagtacctctgcggtgaggtactccaggatggctgcgctgtacacagcggcagtcgcgcccacacgtccatgactggtcgtcctagattttaggtgtcgatgaatacggcccactgggaactgcaagccggctctctgcgagcgggaaaccgcctttgtcttggcctttccggagtcctttccagccttaccgccagccatttcgaattccgctgaagctcaagcaagcaaggcagagaaaaggctaatcggacccacggtgagatcccaccacctactccttcgtcgcaccgcgcccacgagtccg

SEQ ID NO: 22454 - DNA, 1290 bp, Homo sapiens
  misc_feature 1289, 1290: n = A,T,C or G
atgtgaacgtacttaatgtcaataatctgtaaactgaaaaagagtggaaattgtaaatgtttatactggccattctatatgaaataatatatatttataatttttaatatttatatgtggtatattttcccataatgaaagattaaaattaaagcagttggatctttaaaaagaaaagaaagaagtgaataatacacaccagctttctcctgattagaggaagagccccaaagcttctatggacactcacttttctcttcttcttcttgcattattatgaggaaatccttaaaggttggggaacttgggcgactttggctaatgaggagctctgtgccttgagccccccaggccatagaatagtaaatagtctgtgcctccagccctgcagtgtgaggttccagtcctgtgggctccacacccatcacctgtatcaggaggctcatgtctcaccctgtcttcttgccagccttgaggacggagtctgagcctccatggtgcaccacacagggaggacagtggacctgttctccgtggtcatggcccagcagaggggaagggcagttcagtgagtgtaggcaaaagaaagagcgatcagactcttactgtgtctatgtagaaaggaaagacataagagactccatttgaaaaaggcctgtactttcaacaatttctttgctgagatgtgttaatctgtagcttgccccagtcactttgaacaaaccactttgacccaacctgaagctcacaaaagcatgtgtgtatgaaatcaaggtttaagggatctagggctgtgcaggacgtgccttgttaacaagttgtttccaagcagtatacttggtaaaagtcatcgccattctctattctcaataaaccagggcacaatacactgtggaaagcctcagggagctctgcccttgaaagcgccgtatgtccaaggtttctccccatgtgatagtctgaaaagtggcctcgtgggaggagaaagacctgaccatccccgagccgacaccagtaaagggtctgtgctgaggtggattagtcaaagaggaaatctcttgcagttgagagagaggacgcggtgtctctgctgcctggactgatgttcggttaaaccgttgtacttgtcatctgaatgggggaaaacgctatgtggagtggaccgttggggatgggctgtttttacctggagtggggggaaataattgtaaacgtggtgacttctgatctggtaagtgcagggggaaccataaggcgaattggaaaaaaaaagggaaggggttgggccnn

SEQ ID NO: 22455 - DNA, 1600 bp, Homo sapiens
  misc_feature 1, 2, 3, 4, 1598, 1599, 1600: n = A,T,C or G
nnnncggtacctgaaacaggctgatcctggtagggggtggatgctgcttttcgagcctctgagtcagcttgggggttccccaaggcaatcgaggtagaagctcgctggtgtcctctgcagtgcatgagccacctttgggggcttccacactgcctctaataattgcaggatctcttgctgatactttatgtcttttctcccagcgttcaacagggctttttccttgtagaatgccccacgcagttggagagttaaaaaggcacaccaagagtcagtgtaaatgtttacagtcttaccttcacttagctcaaaggccagaattaaagcaatgagtttggtcttgcgggctgaagtgccctggggcaacgattgggcttcaatgacagcatccaggattaccatatcctacacacctctcttcttgtgggtcgactaaagctgctcccatccacgtacagctcccagtctactgatgtttaaggatggtctcggtggttaggcccactagaataaactgagtccaatacctctacacagttatgtttaactgggctctctgacaccgggaggaaggtggcggggtttaggtgttgcaaacttcaatggttatgcggggatgttcacagagcaagctttggtatctagctagtctagcattcattagctaatggtgtcctttggtatttattaaaatcaccacagcatagggggactttatgtttaggttttgtctaagagttagcttatctgcttcttgtgctaacagggctattgctgccagggcccttggacatgggggccagcctttggaaaccccatctagttgttttgagagataggccactggccttggccagggccctacagtctgggttaaaactccaactgccattttttctctttctgacacatagagtgtaaagagttttgtcaggtcaggtagcctcagggctggggccgacatgagtttttctttttaactcatgaaaagctcattgctgttggttgtaatagatgtagtttatctaatctacatttttattgactgtcatctaccaaaatattgacttaaatcctgtaactatttgatttcaagctttaaattgatctggtattccttgcggggctccaattgcatctaaatagatgtgagagttgaaagacctataaggggcttctctcgctttatgatgtcttatttttttttccctctggttgatgaaatgccagggtgaaagggatagccaaatggactaaagcacaagtgccactctagttattcagcagagtgcccagtaaaggtccaccacaataccaccacacatccactcggggatgaacaagggctgactgattgataagctcttgaaaattcttaagctcactgcatcccttcaggtctccaaggaatgctaaatctcctccctgccatgagagacaagaagtgaacttagtgttgggagacataagttggatggccctccggggctgaccccccagggacttaggattttgcagaaagagcttggcatgactttttcactccaggctggagaatcccggaaaagagctaccatgcagcccacccctgttcgacnnn

SEQ ID NO: 22456 - DNA, 1194 bp, Homo sapiens
  misc_feature 1193, 1194: n = A,T,C or G
cgggcaggtacaacttagagttcctgaagacacacagtaaccctggggcggtgctgttactgcctttcgttgcgtcctgcattaatctggccgtgccatgcatctactccatgttcaggcttgtggagaggtacgagatgccacggcacgaagtctacgttctcctgatccgaaacatctttttgaaaatatcaatcattggcattctttgttactattggctcaacaccgtggccctgtctggtgaagagtgttgggaaaccctcattggccaggacatctaccggctccttctgatggattttgtgttctctttagtcaattccttcctgggggagtttctgaggagaatcattgggatgcaactgatcacaagtcttggccttcaggagtttgacattgccaggaacgttctagaactgatctatgcacaaactctggtgtggattggcatcttcttctgccccctgctgccctttatccaaatgattatgcttttcatcatgttctactccaaaaatatcagcctgatgatgaatttccagcctccgagcaaagcctggcgggcctcacagatgatgactttcttcatcttcttgctctttttcccatccttcaccggggtcttgtgcaccctggccatcaccatctggagattgaagccttcagctgactgtggcccttttcgaggtctgcctctcttcattcactccatctacagctggatcgacaccctaagtacacggcctggctacctgtgggttgtttggatctatcggaacctcattggaagtgtgcacttctttttcatcctcaccctcattgtgctaatcatcacctatctttactggcagatcacagagggaaggaagattatgataaggctgctccatgagcagatcattaatgagggcaaagataaaatgttcctgatagaaaaattgatcaagctgcaggatatggagaagaaagcaaacccagctcacttgtactggaaaggagagaggtggagcaacaaggcttattgcattagcgggaacatgatggcagtcttgacttgcgatctagacgatcagttcaagaaggtaatccaagggcctgatgactctttcggtaaccagacatcaatcaaataggggacgagatgacatggcatgattcttcatgcacctgtgctttagagctgcagagann

SEQ ID NO: 22457 - DNA, 2991 bp, Homo sapiens
  misc_feature 1, 2, 3, 4, 5, 6: n = A,T,C or G
nnnnnngacttccaggcaactaggctcgtgcccaatttaatccaagtgatgcatgtccttagccttaaaggttgaatccgtaaaccctattaaactggtaccttagaagagttgtagtatcagcaattagtgagcagtgataaaggctcactcttgaatcggttttccagacaattcttggtaaggttcttctagctttgtcccagttatatggtattttacgtattctccttttggcaattaatcacagttttgtatgtctttttctttcttttttaggtgaaaatattctatgccaactgttttccacagtcctgcattatatattaaaacaaaggctgccagctggagacacagccctccgattacaaaggcccagaatgttacttttaactgtgctccaccaggaggtctggccttgggaaaagatggcgaaaggaatattctcagatatgaacattttttattctgcctacaatgctgtgatctagttcaacaactgcagaactgttctcatcttaatcgctgtagtttttctttctttactcttttgtataaaaggttagtgtcacagcttcactatcactaataaaaagatacaaatatgcctttcaagtcagggttggaaaagcaaaactgaggtgtgaggttacactggtctaagaaagtaccaatttgggttctatattttgtcaaacagttgggtttttaaaaaaattcaaaactcatgcatgttacctacttgtcatgtgtgaattatttctcacaattttaattaatctgtgtgtatattagttatataaagcaatggatttccacattcttaaagcaggaacctatattcaccagaaaaggatcctcctgtttctcatcaaattttttttcagctcgaacaatccaagattgggaatagtaagagtggcaaacaaatgttttcttagggacttactgagaaaagaaaaaacttactgggagaacagagacttagtaaaatttctattgctacagacaaatgctaaaaaccagctttataataacagcattataaaggatagaacttaatatagaaccagaaatatggcaagttacctagtgattaacattgtaaaatagtcaaaaactttaaagccacagagaaaggaaaacaattatgaaatggaaaatatataatatttaagtacttttataattctaaaacttcacttttgtccttaaatcaatatattacggatttcattgttcaataaattaccatctttaactaaaaataagtaaatcaaagagcatatttggagaaactaagagctgttaactgtttggagggtaaaagaatacttttctcgaaatttttttgaagaaaaatctaaaagccctctatgttgagttaatacaccttctgacccccatcatcagtggcattattcttccaagggactcttatatctaagcaatggtgaagttctggattcattatggatctcatggcaccaaaccaactggcactgaagttaagttaatatactccagcgagatcacctgtgggtcaaggatggcccagagaatcttggaaaatccatttatattgagcaaagatctgaatcaccttcaatcaggctgtaagatactagaaaatttgaccttgtagtagtatttcccagggtaacttaagcagcaaccttgcaccagaagaagaattaaagagggagcaatctagtattatcaacaacaacaaagttaaccctaagttagtacatcccagaatctgctggatgtataataatttagtaacggggtatatggcagagctttctttgatgttaacaaattttggctgtgattcttagttaccaagttgccaaaaaatggtatattaaatgaactgccaaatggcagattaagaaaattaatgtactccaatggtctgtccatgaaaggaaaatgtacacagacaaattaagaacattttaccaggatctgagatttaaacaatggaacaattgttttaactgttagaatgaccccaactgttaagtttgtctatgagtgtatatgtatatataaattcatacacatatattatttatttccttcttaaaaagactgaggcagttctgctatatatagttagctacaatattcaagataaaacagttcctactcaaaaaattacatgaacacacgagataagttcttatcgtaaatgctatcatgaggctatctagtatagctcatatttcctggttgtaaggctcaaaacacaggaattccactccaagagataatttgcccctcaatccctacaaagtgtagtctaaacaaacaaaatggtaataaaaaattgaaaaggaagatataaaaagaactcaatagcaggattctgactacctctggagaccacacactatcattattctgactgtcttaaatacaacaatccaatatgccccaagatggaaatctggtatcgtagggaaaacattggctgcaactgtcagaaaagttcataatcttaaacataatttatgccatttgccagtcacaaagacatttactgaacagaatttttgagccatttgtaaaattaaaatgattgatcaatttgaatagcaaccttcatgatgaagaaattaggactctaggtatgaaaagcatgttccttttttgttaataagttcaaaggagagaaacattctgatatatgcagataaaaatatggctaggctgggcgcggtggctcatgcctgtaatcccagcactttgggaagccgaggtggacagatcacgaggtcaggagatcgagaccatcctggccaacacggtgaaaccccgtctctactaaaaatacaaaaaattagccgagtgtggtggtgggcgcctgtagtcccagctacttgggaggctgaggcagaagcatggcgtgaacccgggaggcggagcttgcagtgaaccaagatcgcaccactgcactccaggttcggacgcgtgggtcga

SEQ ID NO: 22458 - DNA, 607 bp, Homo sapiens; identical to SEQ ID NO: 21409
  misc_feature 1, 2, 3, 4, 5, 606, 607: n = A,T,C or G

SEQ ID NO: 22459 - DNA, 389 bp, Homo sapiens
  misc_feature 1, 2, 3, 4, 5, 6, 7, 8, 387, 388, 389: n = A,T,C or G
nnnnnnnnacagaagcttctgggtaggggctggagaagggtcggggagatatttccgttaggacatcgctgaaacacagactgggatcaaactgtgctcatagtcctaaggatctccagcaccctgccggtggcactactgaaagacgaggtgccagggtggttcctgaaagtgcctgagccccaacttatcagcacggagctcatcatgctgacagaagtcatggaggtttggcatggcttagtgatcgcggcggggtccctcttcctgcaggcctgcttcctaaccgccatcaactacctgcttagcaggcacatggcccacaagagtgaacagatactgaaagcggccagtctccaggttcccaggcccagacctggccaccannn

SEQ ID NO: 22460 - DNA, 760 bp, Homo sapiens
  misc_feature 1: n = A,T,C or G
nagttttaattactccttttaatttgctcttcttccctatgtttaggcagaaacgagtctttttttaaccatattcatcacctggtgccagcaacagaagtgttccctaaaaattcctagaataaaccaacacgtgctgactagattctccatcttcataaacggtgatacaaactatgcacatcataactaccagcttcatgaggtcaagactaaatcaaaaattctcaaggacttttctaaaaatttttttagcataaactgtttcctctaacttaaacttctcttaagtgaacctgtctttccactgggatgactgtctacatgctcaggaatcctgaattcatgactatgttcaactcccacgaccatttttaaatcatcaaaatggcagcaaatgtcattacctggaccaaaaagctgcaggttttgtggcaaatgggaaatgtgttatagaatatgactgggaaagagggatttcttagtgctgcccagaatgcattcagcaaactctgaacattactacgtgccacatataggatcatagtgcatttcaggtcaccatccaaggtaaattccaagcctgggcgcagtggctcatgcctgtaatcccagcactttgggaggccagggcaggcggatcacctgaggtcaggagttcaagaccagcctggccaacatggcaaaacgataggtgtcttgggagaccaggcaaagagagctggattaggagccgttaagtatatatttttcttctttt

SEQ ID NO: 22461 - DNA, 3291 bp, Homo sapiens
  misc_feature 3271, 3272, 3273, 3274, 3275, 3276, 3277, 3278, 3279, 3280,3281, 3282, 3283, 3284, 3285, 3286, 3287, 3288, 3289, 3290,3291: n = A,T,C or G
tccgccgcccgacccgagcagccggttccctcctctccaggccccctcctcattccacccccgccgcctggcccagcgacccgtcccttcgtctccccgcggaatggggccggcactgctcagggtcgcgcgccctggacccagctcgctctcggtctcgcgctgtcaggactgcccggctcgcgccgcctcgcgctctgcctcagtcagtggcgccgaaggctccgttaagcggcggcggcggttcctgtttccgtttcttcctctccgttcggtcgggagtagcatcctccactcagccacccttcccactcccccatcgtggggcagctgcggctgagggctgtggctttggcagctgcgacggggagcggcggagaccgcctctgctcccgcctggggttgctgcttttgctcagaggacatccatgaccctaatggtctttttgttcaagataaagtgattttttgcctttgttgattaactggacaaattcagcatgtagagcgcatgaagtacaggacaataaagcttcctacacatatcaccaggaggatctctttgaaagattcactgcaggactaccagagagaataatttgtctgaagcatcatgtgttgaaacaacagaagtctattcacctgtgcactaactagaaacagagttacaatgttttcaattctttgagctccaggactccagggaagtgagttgaaaatctgaaaatgcggccatggactggttcctggcgttggattatgctcattctttttgcctgggggaccttgctgttttatataggtggtcacttggtacgagataatgaccatcctgatcactctagccgagaactgtccaagattctggcaaagcttgaacgcttaaaacagcagaatgaagacttgaggcgaatggccgaatctctccggataccagaaggccctattgatcaggggccagctataggaagagtacgcgttttagaagagcagcttgttaaggccaaagaacagattgaaaattacaagaaacagaccagaaatggtctggggaaggatcatgaaatcctgaggaggaggattgaaaatggagctaaagagctctggtttttcctacagagtgaattgaagaaattaaagaacttagaaggaaatgaactccaaagacatgcagatgaatttcttttggatttaggacatcatgaaaggtctataatgacggatctatactacctcagtcagacagatggagcaggtgattggcgggaaaaagaggccaaagatctgacagaactggttcagcggagaataacatatcttcagaatcccaaggactgcagcaaagccaaaaagctggtgtgtaatatcaacaaaggctgtggctatggctgtcagctccatcatgtggtctactgcttcatgattgcatatggcacccagcgaacactcatcttggaatctcagaattggcgctatgctactggtggatgggagactgtatttaggcctgtaagtgagacatgcacagacagatctggcatctccactggacactggtcaggtgaagtgaaggacaaaaatgttcaagtggtcgagcttcccattgtagacagtcttcatccccgtcctccatatttacccttggctgtaccagaagacctcgcagatcgacttgtacgagtgcatggtgaccctgcagtgtggtgggtgtctcagtttgtcaaatacttgatccgcccacagccttggctagaaaaagaaatagaagaagccaccaagaagcttggcttcaaacatccagttattggagtccatgtcagacgcacagacaaagtgggaacagaagctgccttccatcccattgaagagtacatggtgcatgttgaagaacattttcagcttcttgcacgcagaatgcaagtggacaaaaaaagagtgtatttggccacagatgacccttctttattaaaggaggcaaaaacaaagtaccccaattatgaatttattagtgataactctatttcctggtcagctggactgcacaatcgatacacagaaaattcacttcgtggagtgatcctggatatacattttctctctcaggcagacttcctagtgtgtactttttcatcccaggtctgtcgagttgcttatgaaattatgcaaacactacatcctgatgcctctgcaaacttccattctttagatgacatctactattttgggggccagaatgcccacaatcaaattgccatttatgctcaccaaccccgaactgcagatgaaattcccatggaacctggagatatcattggtgtggctggaaatcattgggatggctattctaaaggtgtcaacaggaaattgggaaggacgggcctatatccctcctacaaagttcgagagaagatagaaacggtcaagtaccccacatatcctgaggctgagaaataaagctcagatggaagagataaacgaccaaactcagttcgaccaaactcagttcaaaccatttcagccaaactgtagatgaagagggctctgatctaacaaaataaggttatatgagtagatactctcagcaccaagagcagctgggaactgacataggcttcaattggtggaattcctctttaacaagggctgcaatgccctcatacccatgcacagtacaataatgtactcacatataacatgcaaacaggttgttttctactttgcccctttcagtatgtccccataagacaaacactgccatattgtgtaatttaagtgacacagacattttgtgtgagacttaaaacatggtgcctatatctgagagacctgtgtgaactattgagaagatcggaacagctccttactctgaggaagttgattcttatttgatggtggtattgtgaccactgaattcactccagtcaacagattcagaatgagaatggacgtttggtttttttttgtttttgtttttgttttttcctttataaggttgtctgtttttttttttttaaataattgcatcagttcattgacctcatcattaataagtgaagaatacatcagaaaataaaatattcactctccattagaaaattttgtaaaacaatgccatgaacaaattctttagtactcaatgtttctggacattctctttgataacaaaaaataaattttaaaaaggaattttgtaaaagtttctagaattttatatcattggatgatatgttgatcagccttatgtggaagaactgtgataaaaagaggagcnnnnnnnnnnnnnnnnnnnnn

SEQ ID NO: 22462 - DNA, 1086 bp, Homo sapiens
  misc_feature 1, 2, 3, 4, 5, 6, 7, 8, 9, 10, 11, 12, 13, 14, 15, 16, 17,1083, 1084, 1085, 1086: n = A,T,C or G
nnnnnnnnnnnnnnnnnccgtacttcattgagaacagatttatttttagtgcatttttatagcaccttgcctactacaaatttctggaatgtactcaatataaagagtgaaaaagaaaatataagcaattcaaatatatactttgacataaatgtaggacagttctatgtcccattcaacgtcatgaaaggtatagtagttggtgggtaaatagaaaccctgttgtactctgttgctgactaattgtggttaccttacttatcaataatattagaagtattatgctcacatttttcacctgtgggtacaaggaagcctggttgaagtcttttccttgagaggcctggatttgttcacatattcagatttcaactggctttataacaggtttccttatgtgcctcatattggctccaggttcactgggtttaaaaggagccaaagcaccataaggttttggcaaaggaagagtggcatctgcttctgggatgtaggcattcggacgctgctctgcagttgtgtaaacaccattgggcagctggcgattatctgcttccaagaactcctgagacttttcagcgatggccaaggcgtgcatttcttcatctcgaaggactttcaaccattctttctcaatttccttattgagtggcagacctttttctatcctggaattgcaagtgaagatgaagtcttctttctccctgacttccttttggagttcaatggttagggcttgtttcatggacagctcagcaacaagagccatcattttctcagttgcatttttgatccttctttgatagccattcatcttcttggctaagagcagtgtgtcctgcttgcagccctgagttttgctgcagagcctgtctgtgagcctggagacctgctcatagatgaaatccttctccagcagcttctcctccttcttggccagttgtagttccagcttgtctaatttttggatcatttctttttcggtcagatctttccctggaaggaagcgagctctattctcaccatcaggctttacgaactgtttctccaggtctttaattctgtctgtacactgtgaaaacnnnn

SEQ ID NO: 22463 - DNA, 3595 bp, Homo sapiens
  misc_feature 1, 2, 3, 4, 5, 6, 7, 8, 9, 10, 11, 3592, 3593, 3594, 3595: n = A,T,C or G
nnnnnnnnnnncggggtacttctagcatttcggttccgcctccgggggcttacacagtatggccggcgacattagctagcgctcgctctactctctctaacgggaaagcagcggaatacaagagactgaactgtatctgcctctatttccaaaagactcacgttcaactttcgctcacacaaagccgggaaaattttattagtcctttttttaaaaaaagttaatataaaattatagcaaaaaaaaaaaggaacctgaactttagtaacacagctggaacaatccgcagcggcggcggcagcggcgggagaagaggtttaatttagttgattttctgtggttgttggttgttcgctagtctcacggtgatggaagctgcacattttttcgaagggaccgagaagctgctggaggtttggttctcccggcagcagcccgacgcaaaccaaggatctggggatcttcgcactatcccaagatctgagtgggacatacttttgaaggatgtgcaatgttcaatcataagtgtgacaaaaactgacaagcaggaagcttatgtactcagtgagagtagcatgtttgtctccaagagacgtttcattttgaagacatgtggtaccaccctcttgctgaaagcactggttcccctgttgaagcttgctagggattacagtgggtttgactcaattcaaagcttcttttattctcgtaagaatttcatgaagccttctcaccaagggtacccacaccggaatttccaggaagaaatagagtttcttaatgcaattttcccaaatggagcagcatattgtatgggacgtatgaattctgactgttggtacttatatactctggatttcccagagagtcgggtaatcagtcagccagatcaaaccttggaaattctgatgagtgagcttgacccagcagttatggaccagttctacatgaaagatggtgttactgcaaaggatgtcactcgtgagagtggaattcgtgacctgataccaggttctgtcattgatgccacaatgttcaatccttgtgggtattcgatgaatggaatgaaatcggatggaacttattggactattcacatcactccagaaccagaattttcttatgttagctttgaaacaaacttaagtcagacctcctatgatgacctgatcaggaaagttgtagaagtcttcaagccaggaaaatttgtgaccaccttgtttgttaatcagagttctaaatgtcgcacagtgcttgcttcgccccagaagattgaaggttttaagcgtcttgattgccagagtgctatgttcaatgattacaattttgtttttaccagttttgctaagaagcagcaacaacagcagagttgattaagaaaaatgaagaaaaaacgcaaaaagagaacacatgtagaaggtggtggatgctttctagatgtcgatgctgggggcagtgctttccataaccaccactgtgtagttgcagaaagccctagatgtaatgatagtgtaatcattttgaattgtatgcattattatatcaaggagttagatatcttgcatgaatgctctcttctgtgtttaggtattctctgccactcttgctgtgaaattgaagtgcatgtagaaaaaaccttttactatatgaaactttacaacacttgtgaaagcaactcaatttggtttatgcacagtgtaatatttctccaagtatcatccaaaattccccacagacaaggctttcgtcctcattaggtgttggcctcagcctaaccctctaggactgttctattaaattgctgccagaattttacatccagttacctccactttctagaacatattctttactaatgttattgaaaccaatttctacttcatactgatgtttttggaaacagcaattaaagtttttcttccatgagttgagtccttaagaaaatgattccagttactcattttgcatatttgctattttaacattattggaccctgcatttatagtcctttgatttcttccctctccctggtgtctcccccaagaccccaaataaagcaatacactgttaacactgtgggtttatatactaattctataccccagatggggaatgggggagatggtccctgggcttaatattctttaaagggcatgggaatttagcctctcttttattgtaatgtgctcttttggaaaatagttggttagcagggaagacccagagttgtagattgagattagggtgtactggctgaactgtggaaaacatacaattctgtgttcctcagtaaatgagattagcgtctaatgagtagcacccctttactaacttagtagtagtataaaatcatttttatttagttaattaccagagagatttagcataattttgttctggattcagtaaatcaagtcagcttggatcattcaccttaacttttcctttagcagccatttccactagtttccattaagtagtgttctataaactttgatccaaagcagaatcaatgtcttttccatctcgtgacttaaagttctgtgactgtgatgcatgtgagtgttccgacttcatctgttcctcttaactacggtgtttcccttaccatggcattcataggatgaaatgaatgactgcccagaatgagaatttgtccagattattcagataaacatcataaagcagaatacattataaataagtagaatatgaataaatagaataataaaattccaaaatactcaatgggaaatgactagtaatataggctttcaagagttggtaccttttagctatatttgcagattctctgggattttaaggaactgagaaaacagcaaagttgactaaattttatatttcttgtcctctaaatattttgataatttctggattgatgcagtgatgtttttgttccttccgtatttataaatgaaacacctttttttagtgtttctaaacctaaaatctacttggtttgaaatcaagtggttggaacactgtttgacttttatttgaagcatgttgttgattgaaaatttcattgaggaagttttcaatcagtgtgatcagtttgattctgtaatgagcacagcacctaatattttgaggagctctgttttgaggaccaatgcttaaggtggactttgttcgtaaacaatatcccaatagatttgttgacttgaggtctggtttggttttgtttttgttttgttttgttttgttttgtttccaatagaattaagaattctaatgttgaaaaactgcacaaatttttatgggacaaagcctagaaaagagaaatgtagtttgaatcataatctaaatcatcgtatgatagaagagggaaagttttggtgccataatttctcctttcactggtgttggacttaaatcagttgaaatgtatttctgtaccacaatttacgcttcaataaaagtttaattgtctagtgacattcaaaaaaaaaaaaaaaaaaatcgacggaccggggccaatagcaccctttgaaaggccaaagagcacaaagagagggggaccccgggaagcgggctggagacactctgggcgggaccacaagcgaaaannnn

SEQ ID NO: 22464 - DNA, 681 bp, Homo sapiens; identical to SEQ ID NO: 20120
  misc_feature 1, 2, 12: n = A,T,C or G

SEQ ID NO: 22465 - DNA, 442 bp, Homo sapiens
  misc_feature 1, 436, 437, 438, 439, 440, 441, 442: n = A,T,C or G
ncgtgtcacttttatgatctttattgttggtagccatgtgcatagctaaaaatggttttagtgagtgggtaactaatgagatagaaagggagaaaggatattgggaggaatcgtagtctttgctacaaggtaataccgtataattttttaaatgataaagttgtataagtaagggtcaaaagtcacttgtagctaactttcattagttccaccttttccttgcctagcacagttagcatggtcttggtatctagtgtaaatctgatcttatccaaacatgaatttgttactttttatattacttggttaactgttgatttcaagtctcttttcagacttgtctcccaagttcacatgaatagggccaggctttaagttctttttaatgcgttcattattaccaagcagtgctttttaacactagtgttcagtaagnnnnnnn

SEQ ID NO: 22466 - DNA, 3073 bp, Homo sapiens; identical to SEQ ID NO: 20293
  misc_feature 1, 2, 3, 3070, 3071, 3072, 3073: n = A,T,C or G

SEQ ID NO: 22467 - DNA, 368 bp, Homo sapiens
  misc_feature 1: n = A,T,C or G
nagatacccaaggaaagaacaggaaagaggtgtatttttaatcctgccttttgtatttagtgtgccccatgactagctgttcatctaacatgcttcttggttctcggcaggtgaatggctatgtggtgaaccttttctgggcatttgacacccacaagcaagagaggagaactttgaacttccgaggaagcatattgtcacacaaagttggcaatctgacagctcatacatcctatgagatttctgcctgggccaagactgacttgggggatagccctctggcatttgagcatgttatgaccagagggattcgcccacctgcacctagcctcaaggccaaagccatcaaccagactgcagtggaatgt

SEQ ID NO: 22468 - DNA, 1072 bp, Homo sapiens
  misc_feature 1071, 1072: n = A,T,C or G
cccttttttcccccggggggggattttccccccccttaaaagggaaaaaaaagggggggccgggccccccccccggggggggggggttaaaaaaaggttttaatttaatttcccccgcccccggggggccccctttttttaaggggccgggggggccctttttttttttttttttttttttgtcttccttttcttcagcctcatcatcgcttacttctttatcacgttccttctccaccttcaaaagaaaacacgaaatcacatcactgctgcactccagaactaagcgacagcgctgcaccactattttcaacctaaggcccaagtctaaattagccaacttgagaagcacccagcttttcatcaatatttgatacatccacttaatagcccgaggaacttttacagagttaggtagtagagcttaggttccccaggcttcagactagttgaacagatctagggactaaggatgtagtacagtcaccccaatcacctacagacagaaattcactctgcaattacataaaaacttacaaaaagagtaatgggatatccaataaactgagaatgtttcttcacaatctcctttattcttcgttcctccaagtactcagtttggtcttctttcaggtgtaggataacttttgttccacgacccataggttcacctgcaagagaagaaagaaaaattgacttaataatacattcaatttagtgctcaacgccatgcctaacacccttataacgtgtctataaagcaaggtttgccgttactacagatgcaaaggccaccacagcagaaccttttgggcaaggtgcctcgcccaaaagaaccgcccaccaagtcatgccattacactaattaagtgctctagcttgttcctgatcgttgggcaaacacaaattctgtaggcttcaccgcatccccaggggtccaagggttgcagcaccccacccttccaccgctcacttaaccagtgaatgttcaggtgcctacctgtgtctgtcctcactgtgaatgatccccctgctgaggactcccaagcgtacctcggccgctctagaacnn

SEQ ID NO: 22469 - DNA, 610 bp, Homo sapiens; identical to SEQ ID NO: 20783

SEQ ID NO: 22470 - DNA, 2649 bp, Homo sapiens
  misc_feature 1, 2, 3, 4, 5, 6, 7, 8, 9, 10, 11: n = A,T,C or G
nnnnnnnnnnncagaatcttttttttacttggcctgctacctccattaaaaaaccattctcttacagtttaaaaaaaaaaaaaaaaaaaaagccttcccctacccaacctccgcccattgttctcttccaaagggcaatttagtaggatctactttgtacatctcaagtaagagttaagtccctgatacagggaccagtttcttagtgtaagacatacacatcctgcttgtccagctgttcctccaaaatctactttggcttcagctccgggtcctgtaccagatggaaaatgtttttggtgatctggctgctgcttaaagccagttttccctaagaactccaaaggctaaagtctactaggggcagagtgtgaggatagatttctaatcagagaaaagtggcctccaggagctttcatttatgtcttctccagaccaggttttcctgttatcttcctttaatcccctttcaaccaacaggtgaagttcttccagcccacagaggtagtaatatcatcttttctatctcctcctctcctttggccatgtaatgaagcaaaatattatttatttagcccaggcttgagagccactgtttgtggacagtcttcatctagattccataccctggcctaggcgaggtaaggctctctggttattgccaggatggagcccctctaccccagtctgctgtagggaataccctaattagttgaggcatgcttttggaatcctggcatgttggcatatggctggtctatcctttttaagatctctggttgggggtatctggatatggattaggagggacaaggagcctttttcttggctaatgttttccaatacttttttgaatggtgccagcccctccaggcatcccacccccaaatcatcatctttagtactaacagggtgtctggtcttagaagcctcccttcagatcccagctgaccctggtgactgcctggccttgatgttggctgcagccttctgatagaaccacatggattccacccacagctggccaggcttgttacatgggtcagggaatacaaatggcccccccccagggagcaggtgttggcctcagttttcagggacccttggtgttgctccttacctagagcccattaatctaccccatcaactctctgccatgaaagccatcttccaggagccctgttttttggagctgaactgcacagattatagctgctattgtacttaaataagggagaggaaaagaaggttctcaggcacagactttctatttttctcaagccaaaccagtttaaaatgtctagcagaatgaactgtatttccatttcttcatgtctacctgccttccccccacaccctaaagttgtacttgtttctagcaaactagaaggaaaagataggaaagcctggcactactaacctcacctctcatacacctctttgaaggccccagctcttttgttcaggcctctcttctcccctagactcactcagcttggtatccatcatcttgagcattcttcagtagattcatctagggttcagattccagactctcagctgaagacagggagccaatttcccccaggtccctgcaggtaatccagggaccccatagggagaacaggctgactggggcattaggaatgtttgtacctctctgcttccctggcagcctggggaagggtgcagggctcagtgcgctaaaccatggtaaacatcttcaatagaactaccctagaatttagtgagtgtgagactgagatattgctcagaataaatttattccatagccatttaggattgcatgttctggaccaaccttgtccagtatgttttctgtttgagctttttcattcttttgttaagccaacaagttgagaatttggccctgctgggatccatgtagtgggcactagctgctctttggccaaggccttcataaatgattcagtctctcattatctgtcctctagccccacaccctgatttagaccgtggcaaaggaagaacttgaggtcaagaccaaccaaatctgtgaattaaagctgttatttttttctctgcaagggcgctttgcttcaggtctgggctatgtgcagaacctaagcaggctgtgagagttagaagaggcagtattacatgttaggcccagaacaccatgggaaaaggtttatgtagtgtatcttagtggcctgcctagctgcctctgggccaggctgacttctgatgtccacattagctcgtacctgaaccctgttgctgaatgccagcctgttctcctgtaactattatatacgccatgggcctggggggcattgaaggaagtaagctctcagagaatcctaacacatgggtgagaaccctctggacgtcaagagcatgtcttctacacgacgtcccacatcggggcagggcgcggggggacaatgccgtgaaaatccccgacactggggcaggccaagcggattgaaacaacaggcacggaactgacgaacaagcgtgggacaaatcataacgccagtcgtcaatacaaatacacaacaccgccgcggcgcgaacgcacgaaacaccccacacagaggaagccgcacgcaaactgtaaccaagcagcgaggacagagacagacacaacgactgcaaggaaca

SEQ ID NO: 22471 - DNA, 620 bp, Homo sapiens
  misc_feature 1: n = A,T,C or G
natgtgccccattttcttcattcattcatttgttggtggacatttaggttgattccataatattgctgctgtgaataacactgcaatggccatggccgtacacttggaagagggccaagtgggcaacttgagaggttaaactgcatggtttgagttttgatttgaggttttacgtgttggcatgcattcaggggcttgtgtcccttctcccctgattcttccctccgggtaggagggaagaatccacctgagcagtggcctgccagcacttgagaggctccgcaagcacaagtgtgtttatgggagttgtgcacatgctcagttgaggcattcttcccttaccagtcgagtgtttctagaggaaggtcatagactaatagtctaatagtctatgacctttagtcatactagtgcacatgcctgagcccactcacctgtgaacccccaaaatttgagacaggtctcaattaatttagaaagtttattttgccaaggttgaagacatgcccagtgacatagcctcaagaagtcctgatgacatgtgcccaaggtggtccggccacagcttggttttatacattttagggagacatgagacatcaatcactatgtaagaagta

SEQ ID NO: 22472 - DNA, 2111 bp, Homo sapiens
  misc_feature 2101, 2102, 2103, 2104, 2105, 2106, 2107, 2108, 2109, 2110,2111: n = A,T,C or G
cgacccacgcgtccggaagcgccgggaaagatggcggcgtctgtggtttgaattccagcggcgccgccagagtctgaacaagagctggggtggagggggcggggacctggggagcccggcgggtcgctatcgcggggggtactagtggcgccgccgccacagacaccaacgccgtcgccacctctgtatccatgatggacttggtgttggaagaggacgtcaccgtccctgggacgctcagcggctgcagtggccttgttcccagtgtaccagatgacctggatggcatcaaccccaatgctgggttgggaaatggtctgctcccaaatgtgtcagaagaaacagtgtctcccaccagagcacggaacatgaaggactttgaaaatcaaatcactgaattgaagaaagaaaactttaacctaaagctccgcatctatttccttgaggaaagaatgcaacaggaatttcatggccccactgaacatatctacaaaactaacattgagctcaaggtggaagtagaaagtctgaagcgggaactccaggagagagagcagctgctcatcaaagcctccaaagcagttgagagcttagctgaagcaggtggctctgaaatccagcgggtgaaagaagatgctcgaaagaaggtgcagcaggtggaagatctcctaactaaaagaatactccttttggaaaaggatgtgacagccgcccaggcagaactggaaaaggcctttgcagggacagagacggagaaggctcttcggttgcgtttggaaagcaagctttcagagatgaagaagatgcacgagggggacttggcgatggctctggtcctggatgagaaagacagactgattgaggagttgaagctgtctttgaagagcaaagaagctttaattcagtgccttaaagaggagaaatctcagatggcatgtcctgatgagaatgtgtcatctggagagctccgaggactttgtgctgctccaagggaagaaaaggagagagaaactgaggctgcacaaatggagcatcagaaggagagaaacagctttgaagagaggatccaggcacttgaagaggacctgagagagaaggaaagagaaattgctacagagaagaaaaatagtctaaagagggataaagccattcagggtttaaccatggcattaaaatcaaaggaaaaaaaggttgaagaacttaactctgaaattgaaaagctcagtgctgcctttgctaaagccagagaggccctacagaaagcacagacccaggaatttcaggggtctgaagactatgagactgctctatcaggaaaggaagccctttcggctgcgctgcgctcacaaaacctcaccaagagtacagagaaccacagactgcgtagaagcattaagaagatcacccaggagctgagtgacttgcagcaggagagggagagactggagaaggacctggaggaagcccatcgagagaagagcaaaggagactgcaccatccgtgatcttagaaatgaagttgaaaaattacgcaatgaagtgaatgaaagagagaaagcaatggaaaatcgttacaagagtcttctgagtgaaagcaataaaaaattgcacaatcaagagcaagtgatcaaacatctaacagaaagtaccaatcagaaggacgtgttgcttcagaaattcaatgaaaaagatttggaagtaatacagcagaactgctatttaatggctgcagaggatcttgagctcaggagtgaaggcttaataacagaaaagtgctcttctcaacagccaccaggcagcaaaaccatcttctctaaggaaaagaaacaatcatcagactatgaagagctgattcaggtcttaaagaaagagcaggacatctatacccatctggtcaaatctctgcaggaatcagacagtatcaacaacctgcaggctgagttaaacaagatttttgccctgcggaagcaactggagcaggatgtgctttcatatcagaatttgcggaagaccttggaggagcagatcagcgaaattcggaggcgggaagaagaatcattttcactttatagtgatcaaacatcttatctaagtatttgccnnnnnnnnnnn

SEQ ID NO: 22473 - DNA, 1001 bp, Homo sapiens; identical to SEQ ID NO: 21314
  misc_feature 681, 682, 683, 684, 685, 686, 687, 688, 689, 690, 691, 692,693, 694, 695, 696, 697, 698, 699, 700, 701, 702, 703, 704,705, 706, 707, 708, 709, 710, 711, 712, 713, 714, 715, 716,717, 718: n = A,T,C or G

SEQ ID NO: 22474 - DNA, 1648 bp, Homo sapiens
  misc_feature 1, 1636, 1637, 1638, 1639, 1640, 1641, 1642, 1643, 1644,1645, 1646, 1647, 1648: n = A,T,C or G
ngtggaagggaaggaagtccccagagtcatctacttggcccagaggtgaacgccaatacttagatctggatggcagagcccagggtcctgtaaacaccaaatcacaatctgaggtggaacttggtgctccaggcttcccacctcagctcctgagctctttcatcaaacggcagccactggttatagccagactggcttccttccttggtaggtagcatctcaccgtcaagatggtgctgctgagatgcaggcccaggctgctcaagagagacactgtggcagctccttgttactttccataccacagtgcaggaaaagctgatgctacctgctgtggccgattggggcagacagcactggcccagggatgctagcaaagcccagtcagtacttggtcacagctggcaccagtgcagagcaaacggcctgagctcctggcccagactatccagagtgaatgcagctccgctcaccttttggatttctcacctttctttcctgtttctgggactctgcggcagacaggacacttaaggaccaggactgggcacagccagcagagccggggactgcagtgctttggcaaggtgcttccgcaggctggtagggaagcaggcagccactggccaagactctgctctgaatctacctcctctagcattcagctctactgtgtgatgggacgttaaaaataccaaaacagaaagagggtttaagaaacagctgcacaaaccagaacaccgattcagaatcttttctccctcttgagtttttgcaaaatactttattattgatttttgctttttttctccctttccctcccaggagaagacatttgggtcttggcctgaggcaggggtgttgagcgatgatgctctgatatggagctgtcactctagagctcggtcagatggaagacactatagaaccaggttggacagatttggggtcagggttggaggctgagttcttttgaggactggttggagtggcagccagatggtggctgctgacaaggcaagaggaatttcagagattaaacattgtcctttgaggaagggagaggaggtgaatgaactcccagaggaggtgagtggcttgttgggaggaagctcagttccagaacttacctcagtgcacttgggaggggtggagtcctgagcattccatgatttctgccctggccccacctatcctaggatggggtgggatggagagtgggttcagttttcttgtactttagcctggctgaacatgaactttgtgtttacctggaagtggtaggggtgggagagattctcatctttagttctggtgcccaaaatctttggtagatggagggaactggggattcagaagatgtggtaaaggtctatttctgtagtgtggcagagatgtgtttttctaaagtgtttgcagggcatttttccctcttacctcagattaagttatttatatattgttgattgaaggttttttaaaattgcttttaaacttctatttctcgggtaaattttttggtgacatgatatatttaacaccctatttatatactcctacctcttttcatataaatctcttactaagactactgaccaaaaaagaacattttaaaattaaaagtcctctgggtacnnnnnnnnnnnnn

SEQ ID NO: 22475 - DNA, 705 bp, Homo sapiens
  misc_feature 1, 2, 3, 4, 5, 6, 7, 8, 9, 10, 11, 12, 13, 14, 15, 16, 17: n = A,T,C or G
nnnnnnnnnnnnnnnnnaaatttaatttcctcagcaaggccattttttaactttctgcagaaagggtacactcgccagcggttttgccacaagagtatacggaacaaaggagacaggctcatttataatctgacgcggccaccctcctgctgcgttcggtttccattggctgggacgggacctcaccttctgtatttgtcccgactggctagcacttagaactttttaaaagaggcaaaggcataggagaacaaaggaaggaggaagtaacttgtggaatattgagaaaggtaaaaacacctttaaataaggaagaggaacaggctatgacctaatgcttgtttggatcagtataagcatgttagggcaaatatttaggctaaattgtgggagctaagaacataaagtatattgattttttattatggctagcagatatttaagaatgttagcacaggtctttgaataaattttgcttctaagagaagttactattgggccctaattatatggggagtaaagtctttgaagaggaacctctatttactttttacaattccccctttttattttataattcctcttcaaacttctttaatatgttttgacttaattgctttgtttgcccttctaagagaagtaattttttccaaatggggtggaggaaaagttagagttaactctttaagaatggtagagacaagt

SEQ ID NO: 22476 - DNA, 936 bp, Homo sapiens
  misc_feature 1, 2, 933, 934, 935, 936: n = A,T,C or G
nnatggtttgctttgaaggccaaaaggaactggtttctaattcttattcctctcctgactagttttgtgacctagggaaattttgcaatcttcctgagtttcgtttctcatcaggaacaggatgctacctaagtcacaggatagttgccagatttaaatatgatcgcatggcggtggacatgagccgtaattagtggctaagaatatattgacactgagctctcctttatccatgttaaaattgtagataaacaacaattgacaaagaatagacaaaatgttctaacataaatattcttcccttgtttctagaaagaagtcacacatacagtaaaaataattagagaggacctagttcatattgagcaatcttccccaaaccctgaaacaggtcttctttctaacaccagaggtatcttgagtgagtccaacccctgcagtcccctctgtctggaatagatggaggaagtttgctccagccttagaacagcatgggctggcaagcgttctcagagaggtctcgacttcaactctaaagggcctgaggaatatgtgcaactgggtcgggttaaggccaagctgaatcacatgaccagggctctcaccagcgccaaagtcagtggaaggatatcagtccccagagctctgtcacaggccatggatgctccatggaggggtggtgagcatatgaataacaatcaggagaaacatcggtaatggacaggaggcatcaataaacaatgtccaccctcctctaaaacccaggaaagttctcattcaaaagacgatgtcttgaaggaaacctaggtaccaaatctttgtgatctttggattaaacattttttaagtagcacaaacaacccaaaaaaaagaaaaaatgacttcattaaaattaaaaacttatttgcttcaaagggacactggtcaaggagnnnn

SEQ ID NO: 22477 - DNA, 466 bp, Homo sapiens
  misc_feature 1, 2: n = A,T,C or G
nnccgaggtacgttcctggagactgggtgtgtctgtagactaatccttattctccaattattgagtataatatctcttgtttaacatgaggaaagggtcaaatttgaggaaaaatggcctcttgtttgatgtgttttagttcattattctcttctattaagagaaattcactgttaaaaaattgtttcccatttccgtatctgaaataatgactgtagttgaggtgatcttgccctgggtctgaaatcatacttccaaaccaaaaaggactttgaatacaaaacttttaagaaatcttgtatgaatacaagctatatctgaaaaattgtgttttataatattgaagcctagttttgccccaggccatttgcagtgtggttactatgcaaaaaaagctggggttgctgttttttttttttctttgttggctattaacccagcggagacaatatgtggctatggtagt

SEQ ID NO: 22478 - DNA, 670 bp, Homo sapiens; identical to SEQ ID NO: 21478
  misc_feature 623, 625, 670: n = A,T,C or G

SEQ ID NO: 22479 - DNA, 2069 bp, Homo sapiens
  misc_feature 1: n = A,T,C or G
ngcggccgcggtggtccgggccgccgtgtctgcttccatagccaaatctgccgaggctggaattgccggggaggcccaaagcaagaagccagtgtccaggccggccaccgctgccgctgccgctgccggctccagggagccccgtgtcaagcaaggtggtaattaataacaaactagagcaaagaattattggagtgatcaatgagcataaaaagcaaaataatgacaaaggaatgatttctggaagacttactgccaaaaaattgcaggatttatacatggctttacaagcattttcatttaagacaaaggacattgaagatgccatgaccaatacactcttatatggaggtgaccttcattctgccttggattggctctgttttaaacctttcagatgatgcacttcctgaaggattcagtcaggaatttgaagagcagcaacctaaaagtaggcctaaatttcagtctcctcaaatacaagccactatttcacctccattgcaacctaaaacaaaaacatatgaagaggaccctaagagtaagccaaaaaaggaagaaaaaaatatggaagtaaatatgaaagagtggattttacgatatgctgaacaacaaaatgaagaagaaaagaatgagaattctaaaagtttagaagaggaggaaaaatttgaccctaatgaaaggtacttacatcttgcagcaaaactgctggatgcaaaagaacaagcagctacctttaaactagaaaaaaacaagcaaggccaaaaagaggctcaggaaaaaataaggaaatttcaaagagaaatggaaactttagaagaccatccagtatttaacccagccatgaagatttcacatcaacaaaatgaaaggaaaaagcctcctgtagccacagaaggagaaagtgcattgaattttaatttatttgaaaaatctgcagctgctactgaagaagagaaagataaaaagaaagaacctcatgatgtaagaaattttgactatactgctcgaagttggactggaaaatctcccaaacaatttctgattgattgggtcaggaagaatcttcccaagagtccaaatccttcctttgaaaaagttccagtaggtagatactggaaatgtagggttagggtaatcaagtctgaagatgatgtcctggtagtatgccctacaatcttaacagaagatggcatgcaagctcagcacctgggagctactttagccctttaccgtttagttaaagggcagtcagttcatcagttacttcctcccacttaccgagatgtttggctggagtggagtgatgcagaaaagaaaagggaagaattaaataaaatggaaaccaataaaccacgtgatctttttattgccaaacttctgaataaactgaaacagcagcaacagcagcaacaacagcattctgaaaataagagagaaaactctgaagatcccgaggaatcttgggaaaatttagtttcggatgaggatttttctgcactgtccttggaatcagcaaatgtggaagatttggaacctgttagaaacctctttagaaagttgcaaagcacacctaagtatcagaaacttctaaaggaaagacaacagctacctgtatttaaacatcgggactcaattgttgaaactcttaaaaggcatcgggtagtggttgtggcaggtgaaacagggagtggtaaaagtactcagaattccttgtgtggatatcagatccggatggaatctcgagcttgtgaatctaccaggttactctattgtacaacaggggttttgctaaggaaacttcaagaagatggtcttctaagtaatgtgtctcatgttattgtagatgaggttcatgaaagaagtgtccagtcagacttcctactaattatcttgaaggaaattttacagaaacgttctgatctacacttgattctaatgagtgccactgtggacagcgaaaaattttctacatatttcacacactgccccattctcagaatttcaggaagaagttatcctgttgaggtttttcatcttgaagatataatagaagaaacaggctttgt

SEQ ID NO: 22480 - DNA, 2582 bp, Homo sapiens
  misc_feature 1, 2, 3, 4, 5, 6, 7, 8, 9, 10, 11, 12, 13, 14, 15, 16, 17,18, 19, 20, 21, 22, 23, 24, 26, 27, 28, 29, 30, 31, 32,33, 34, 35, 36, 37, 38, 39, 40, 41, 42, 43, 44, 45, 46,47, 48, 49, 50, 51, 52, 53, 54, 56, 57, 58, 60, 61, 62,63: n = A,T,C or G
  misc_feature 64, 65, 66, 67, 68, 69, 70, 71, 72, 73, 74, 75, 76, 77, 78,79, 80, 81, 82, 83, 84, 85, 86, 87, 88, 89, 90, 91, 92,93, 94, 95, 96, 97, 98, 99, 100, 101, 102, 109, 2546, 2562,2577, 2578, 2579, 2580, 2581, 2582: n = A,T,C or G
nnnnnnnnnnnnnnnnnnnnnnnnannnnnnnnnnnnnnnnnnnnnnnnnnnnnannngnnnnnnnnnnnnnnnnnnnnnnnnnnnnnnnnnnnnnnnnnnnatcgacncccttggaattgggcagccgcccgggttcggctacaaaagaggacggctgcggcgcgccgggcggaactttccggaacgctcggtgagaggcggaggagcggtaactaccccggctgcgcacagctcggcgctccttcccgctccctcacacaccggcctcagcccgcaccggcagtagaagatggtgaaagaaacaacttactacgatgttttgggggtcaaacccaatgctactcaggaagaattgaaaaaggcttataggaaactggctttgaagtaccatcctgataagaacccaaatgaaggagagaagtttaaacagatttctcaagcttacgaagttctctctgatgcaaagaaaagggaattatatgacaaaggaggagaacaggcaattaaagagggtggagcaggtggcggttttggctcccccatggacatctttgatatgttttttggaggaggaggaaggatgcagagagaaaggagaggtaaaaatgttgtacatcagctctcagtaaccctagaagacttatataatggtgcaacaagaaaactggctctgcaaaagaatgtgatttgtgacaaatgtgaaggtagaggaggtaagaaaggagcagtagagtgctgtcccaattgccgaggtactggaatgcaaataagaattcatcagataggacctggaatggttcagcaaattcagtctgtgtgcatggagtgccagggccatggggagcggatcagtcctaaagatagatgtaaaagctgcaacggaaggaagatagttcgagagaagaaaattttagaagttcatattgacaaaggcatgaaagatggccagaagataacattccatggtgaaggagaccaagaaccaggactggagccaggcgatattatcattgtgttagatcagaaggaccatgctgtttttactcgacgaggagaagaccttttcatgtgtatggacatacagctcgttgaagcactgtgtggcttccagaagccaatatctactcttgacaaccgaaccatcgtcatcacctctcatccaggtcagattgtcaagcatggagatatcaagtgtgtactaaatgaaggcatgccaatttatcgtagaccatatgaaaagggtcgcctaatcatcgaatttaaggtaaactttcctgagaatggctttctctctcctgataaactgtctttgctggaaaaactcctacccgagaggaaggaagtggaagagactgatgagatggaccaagtagaactggtggactttgatccaaatcaggaaagacggcgccactacaatggagaagcatatgaggatgatgaacatcatcccagaggtggtgttcagtgtcagacctcttaatgggccagtgaataacactcactgctggcatttaatgtgcagtagtgaatgagtgaaggactgtaatcataatatgctcactacttgctcttgtttttgttttaataaactatagtagtgttttaaaaagttaaatgaagaataaacgcaaatataaaagctctgattttgccctgtatgtatgatgacttcagtgtgcaagatgaagtttaatacctgtaaaaactacaaagaagttcccctagcatttctaggccaaaccttgtaattgacttcagctatgtacgtggacaagcttagactgaaatgctaggtatatgtattggcttcagtgtatgacccttcattgttaagctatgaaagtaaaactctgtatttaactggcaatgaggaaaaaaaaattttgtagagaagtgttggtctgtatagttctttatattaagtgggattcattgtaatgcctctgcatttattctgttgcctcagctgttacttgaagatggcgtaatatataatttatcctgtggtatcagtgataaaaatgatacctttctgtaggaggggtttatcataatatgctgcttcttgaaggcttgcacttccagaattgtgtttccttctgctgtgccattcatatatatatacatatatatatataatcttgaccagtcctggtcatttgctcccctccttgtctgtggaccatgataagcccaagtagtgacttcagagctgggtaacagaaattaaagtgaaaagacctttacgtggagaatttgcatgcgtaatataggaaggtgttctttaggtatgttacaggattactttaaaccatttgactttcgctccaaagttatgttggtagtatagcaaattatgatgaatagctttaattgtatgtttaaaagtctcatatgttcacatgcttaaatctgggtatcagaatttaagcaattcttgaaatgtattgtctccttaatatactaattacaaagcatctccaaaaaaaaaaacatcgaccgaggtggaatggattctaggaaacatcttaaagctgtgtngtgcctgtggtggttntttgtttgggggtgnnnnnn

SEQ ID NO: 22481 - DNA, 1023 bp, Homo sapiens
  misc_feature 880: n = A,T,C or G
accgggttaaaaagtattgttaactctcttttccggctggaaccatggagggtgttgaagagaagaagaaggttcctgctgtgccagaaacccttaagaaaaagtgaaggaatttcacagagctgaagatcaagcgcctgagaaataagtttgcccaaaagatgcttctaaaggcagggaggaagcttatctatgaaaaagcaaagcactatcacaaggaatatatgcagatgtacagaactgaaattcaaatatcgaggatggcaagaaaagctggcaacttctatgtatctgcagaacccaaattggcgtttgtcatcaggatcggaggttatcaattgggtgagcccaaaggtctgaaaggtgttgcaacttctttgccttcatcaaatcttcaatagaaactttgtgaagctcagcagggcttcaataatgtgctgaggtttgtagaaccatatattgcatgggcatacccaaatctgaagtcagtaaataaactaatctacaaatgtggttatagcaaaatgaataagaagctacttgctccaacagataatactttgattgctcgatctcttggtaaatatggcctcatctgcatggaggatctgattcatgagatctatactgttggaaaatgcttaaagaagcaaataacttcctgtggcccttcaaattatcctctcgacaagttagaatgaagaaaaagaccaccaattttgtagaaggtggagatgctgacaacagggaagaccagatcaacaggcttattagaagaataaacatgcctaccacaattattttttgtaatctagccagttaataaacagtacctgcccgggcggccgcccgggcaggtacgcgggacatgagaataatnaacggagttgatcaagaaattatctttcctccaataaagacagatgtcatcacaatggatcccaaagacaattgttcaaaagatgcaaatgatacactaaagctgcagctcacaaacacatatgcatattacacgtacctcgg

SEQ ID NO: 22482 - DNA, 618 bp, Homo sapiens
  misc_feature 1, 2, 3, 4, 5, 6, 615, 616, 617, 618: n = A,T,C or G
nnnnnnaacgcttggatgacttttattggaataattacatctgtataacaaagttgagcttactatgtttgacattgtttttctccaaagagaagtacgaatattagttttaaatccacatatcaagataagcactaaaacctaacagtctgtttatcactgattccacttcaaccttactttatttgtgaatcctgatacaataaaagaaatagtactttttcccctagataaaataggtccttgaaaatagtatttgtacaatctagttattcttacaagcagtcaaattctaaaaagggaataaacgaattttcagggtatcaagccaagtttaccaagtgggcttattatatgtatttataattcttcctagtatagccaataataaaatgaaaataagtgaagagaaataaaaatgaagggttaatttcagggtagcaatgtaatagttttttatgcagtttataagcaaatgacataggcatcaccatgaagctgacttgataaaatgaagaccacttatagaagacagtgattttcaaacccactcctcagatccaaacaactaaggctctagccaccactaactttaaacagagcagttccacttgnnnn

SEQ ID NO: 22483 - DNA, 353 bp, Homo sapiens
acctcatcaatatgtgcatttattatttgccaattaaaataatataaaactctttaaaaattaaaaaccatatatttccctagtatttctgggatgatttttttttctcaatgacttttgagaatgcttttgctttgttctcaaacctttgataatctccatcattactggttgggtatcccttatctgaaatgcatgggaccagaagtgtttcagatctcagattatttcatatttgaaaatatttccatacagataatgaaatatcttaataatggaaaccaagtataaacaggaattcatttatgtttcatacacaccttatgcatgtagcctgaaggtaattttattat

SEQ ID NO: 22484 - DNA, 414 bp, Homo sapiens
  misc_feature 1: n = A,T,C or G
nagcataatgtatctagatgcataaatacagcctcaaaggcacccttttaataaggaacatatttaaaatgcagttgttcttaacaaggaaatcctatcctgcacaatccttcaccaaacaaaaccccacatacctgaataaaactgaattctctccagtttaaagcattgctcactgaagggatagaagtgactgccaggagggaaagtaagccaaggctcattatgccaaaggagatatacatttcaattctccaaacttcttcctcattccaagagttttcaatatttgcatgaacctaacaagaaagcgaatgtgaatttcctttatttagtagaacattaactgattcagcacagagttcactcttggcataagaagaacctggtcatatatggacgtatttaagttgt

SEQ ID NO: 22485 - DNA, 408 bp, Homo sapiens; identical to SEQ ID NO: 21570
  misc_feature 1: n = A,T,C or G

SEQ ID NO: 22486 - DNA, 7639 bp, Homo sapiens
  misc_feature 1, 7612, 7613, 7614, 7615, 7616, 7617, 7618, 7619, 7620,7621, 7622, 7623, 7624, 7625, 7626, 7627, 7628, 7629, 7630,7631, 7632, 7633, 7634, 7635, 7636, 7637, 7638, 7639: n = A,T,C or G
nagacagtaaggagccaggggaacagagagaattgtggggcagcaccgctccttgggtccccactccccatttctcattgcttggaaatccatgccaagatgcctgccttccttggtctaaagtgtctggggaaattgtgcagctctgagaaaagcaaagtcacctcatctgagagaaccagtgccaggggctcgaacagaaagagactgattgttgaggaccggagggtctctgggacctccttcaccgctcataggcgtgccactatcactcatttgctgtatctctgtcccaaggactactgcccacgtgggcgtgtatgtaacagcgttgatccttttgtggcccaccctcaggaccctcaccacccatcagagaagcctgtcattcactgccataaatgtggggagccttgcaagggtgaagtgcttcgggtccagaccaaacatttccacatcaagtgtttcacctgcaaagtgtgtggctgtgacctggcacaagggggcttcttcataaagaacggagagtatctctgcaccctggactaccagcggatgtacgggacacgctgccatggctgtggggagttcgtggagggcgaagtggtgactgctctgggcaagacctaccatcccaattgctttgcttgtactatctgcaagcgcccgtttccacccggagaccgagtcacattcaatgggagagactgcctttgtcaactctgtgcacagccgatgtcgtccagtccgaaagaaaccaccttctccagcaattgtgccggctgcggaagagatatcaagaacgggcaggcgctgctggcgctggataagcagtggcacttggggtgctttaaatgcaagtcctgcgggaaggtcctcaccggggagtacatcagcaaggatggtgctccgtactgtgaaaaggactaccagggactctttggggtgaaatgtgaggcgtgtcaccagtttatcacagggaaagtcctggaggcaggtgacaaacattaccaccccagctgtgcacgatgcagcagatgcaaccagatgttcacagaaggagaggaaatgtatcttcaaggctccaccgtttggcatcccgactgtaagcaatctacgaagaccgaggaaaagctgcggcctaccaggacatcctcggaaagtatttattctaggccaggctccagtattcctggctcaccaggtcatactatctatgcaaaagtagacaatgagatcctggattacaaggatttagcagccattccgaaggtcaaggcaatttatgacattgaacgtccagatcttattacctatgagcctttctacacttcgggctatgatgacaaacaggagagacagagccttggagagtctccgaggactttgtctcctactccatcagcagaagggtaccaggatgttcgggatcggatgatccatcggtccacgagccagggctccatcaactcccctgtgtacagccgccacagctacactccaaccacgtcccgctctccccagcatttccacagacctggcaatgagccgtccagcggccggaactcccctctcccttaccggccagacagcctccctctaactccaacttacgctcaggcccctaaacatttccatgttccagatcaaggaatcaacatttaccgaaagccacccatctacaaacagcatcgtgccttggcagcccagagcaagtcctcagaagatatcatcaagttttccaagttcccagcagcccaggcaccagaccccagcgagacaccaaagattgagacggaccactggcctggtcccccctcatttgctgtcgtaggacctgacatgaaacgcagatctagtggcagagaggaagatgatgaggaacttctgagacgtcggcagcttcaagaagagcaattaatgaagcttaactcaggcctgggacagttgatcttgaaagaagagatggagaaagagagccgggaaaggtcatctctgttagccagtcgctacgattctcccatcaactcagcttcacatattccatcatctaaaactgcatctctccctggctatggaagaaatgggcttcaccggcctgtttctaccgacttcgctcagtataacagctatggggatgtcagcgggggagtgcgagattaccagacactcccagatggccacatgcctgcaatgagaatggaccgaggagtgtctatgcccaacatgttggaaccaaagatatttccatatgaaatgctcatggtgaccaacagagggcgaaacaaaatcctcagagaggtggacagaaccaggctggagcgccacttagcccctgaagtgtttcgggaaatctttggaatgtccatacaggagtttgacaggttacctctttggagacgcaacgacatgaagaaaaaagcaaaactcttctaagtcccactcgtgaatggcaattagagaaaggactgacagtggcggtgccccataggatgtcatattgaggcccaaacttgattggagaatttgcaaactaccgtcgctcagcaacaccaaaaagagaaagtctggttaaaacaccatgagtcaaatgtcgggccagccaacagtaacacttgccaagaagcatggcgtagaaatttctatgttccgaaacacagagtagtgtccacatgtgaccttttcacattaccttatgtatacaacaggagctgcgttgttttcttctttttcttttcctttatctgttgtccaacaacagtgctgactgtccggataagagctggcaagtgcccttaggatgccgcatgggaaaaatcggttatcataatttcaaagtataaatatatttattatgtagcgctgcggctaagaaggaagagtgaggggtctgtccatggggtggcagtgatttcacacccgcctttcttgaatggcttcgtgttactcagccgtgccctggcaggaatggaactccatcagggaacagggcagctctgtttgaatggggtgaaaaacagcaaaattaattcttagcaagctccttgttctctactgttcaccgggacctggctggcaaatgacttagctattagtatatttaaaaactgttcaaaagcaaaagagaaggaacaggaatgaaaggaaaccttcccttaactctttctgcttcccatagcaggtctggttcctgctccccgcctaggacaggagctgtctggagctccacctttgcaaagaaaggaaaaacacaaattgcccccagattggcccagtggcatgccattaggtgattttgcgtaggggccatatcattcatggccaaaaaaaaccaaaaagcaaaaaacaaaaacaagtcccatgtcctactgactctagttcttccagtcgttatcctctgctgtctctctggcatcctatgaatcagatcaagcccatgctgttgttggtttttaaggtttctttcaataataggctaaggaaagacatgtttttctcttttaaatctctgcaactccaaagtagactccttcgaacgtatttaatttggccttttcagctttcttcttgcccagctctgtcgaattcatgggtgtgtgtgcacatgttggtttcactcacccagagtaattttgtgagcatgcatgtgctttttaatttctgcttgaatgtttgtcctgctgtgttgcagcttctaaagacattgtcaccgagtgtgtgtgactcaaagatcaagagtgaggctaaactgcgaccccaacatcacttccttcatggaaaggtgttggcgctgatgtagctcatggaaggatcagactgggaaccacagaggaaggatgaggtgggatgtggaggtcagagcatctcacgagagtccctcaggctctgcaacactagattcgaatatgagcctagggtttccccaacacgtgcgtgcatatgaaaccacatcatgattcccgacgtgagttagatgagggagagtttgtgtaactccacacccaggagggtaagccactttattatcatgctttggggctgtgcttaagaatttaagctctgttttaaagccgaagaagaaaacatttgaatttaccttcatatgccactaagaacaaaagctctgaagttcttcctgctggcaccaaatattaggattacaagctgtctctctgacaccagtggtaaaaaagcaagtagaatagtttctgagtctgtgttgcagcctctgacacgtggctcactgctgtcatttgggggatggaatgaacagtcactgttctatagcatcctcctgtgctcttacctaaggaatctaaattgtcctagccttccattgctatgcactgaatgaggactactctcgtgtgtgtgtgtgtgtgtgtgtgtgtgtgtgtgtgtgtgtgtgtgtgttggatctactaacatgtttagcaaatggctctgacagggtggccatgagcagatgagaccagctcttgcttggttggaagccacactgcagtttgcagtttagcctttggtgtctcagtggcctcttgcttattccatgctttttctatcccatcctctctctgtgccctcctgcaatggcagccttggcacaatgcctgggtgtcctcatccttgctttactctggaaagtgtggggatggagaggatggtgcatttccagtgcttccttacctgtcaataacaatggtggccacctgggtcccagcacttggctggtggagagatttttttcattatggagctaataaagggtccctacgttttacattgattaatgaattatcacccagacatgtgcagatgaaatgtcaatataagaaaaatcaaggtatttgggaaacatgggcataatcaggtagttttgctaaaattcctcttccttggtctacataaagaagacatgggtctgtcatagaatggggacattagactgaaaactgggacaacccccttccttattttatagagactaggagttaaggggcctgcctaagattgcagtgataaagaactgaaccctaaatcagctcccactaatgaaaccctgctttccttgtatcttttaaactcagttctgcatccaacttgagaagaaaaaaagcttctttccatatcaagtaccatatgagttcatttaaactgcaccttgcagaaatgcattgccagaaagcaccagtagcctcctatctgcaagcagagtagtgctctgctctggggaggggtcattggaaaccataatgcagagtgggccccctactccatttcccagcaaaaggctccagctggagggatgggttgtggggcaacctggttcctgctaactgccagattgaatgtgtgggctagaatgcctgcacatttagttaaactgggctcagcatgcttgtcctcaaaatgtccatcctggtcacagcacacaagatggctattggtctgcttttaccctaccctgtactatacatgaaaattccagttattaacacactcaaactggtggagcttgttcaccctaggaaggggattgtatatatggcaggcttccctggtgccgatgtaaagggctacatttgggaacatttgacttccttgggactcttaagtgcatactgatggcatgaagtaaaaggggcctcaatgatgataggaaaatcagttcttttaaaatttcttcaagaaaatccaggctatcacatagtctttctgtgtgacttattaggagataggaagagcattgggaaacttgcacagctagctatgcatctacattttggtttggggttagttatgaaatgttcttaatatgacgtgttcaataacttcacataaacttcctgttctccaaaacctcaaagagatagagttaatgagttgttgtttttttttaaatgggggtagttttctatctgtcatgggctctagcatctactccgctacccaattctgtcatctccaagctgagtttcctcttctgaggcagaggctggagcagttctttttcagttctcatcctctccatcccaatccagtatatcaatcaactctaactcggagacgtctagctggcaatgtttctaaaactttcactggatttctttagacattgaagcaaacatttttttctaagaattgcttctcagatgatgatatcaaatgtatatgcttttgcaagtttgaaaagttcaaattaaccacttttgactaggtaagtctttctaaaaaccatttaaagctaactgggtcttagcatcctcctgtgtatggaagagacaggtgaccgctccaggttgggtgctcacagaacccttttcctgactctcatggaagatggtggaaggaaaatagactgtctcatcaaccctcctgtgtcctctgaagcaatctcagtttttattaaccacctcttctgtgtttctggtagctatttaacctgtatttaatctgtacttcctatgccagcctcaattttatttgatttttaaaattattctcttctaaccaatgaagtgtttgtcagtatgccccaaagcttgctcttttgtgctcccttttgaataactttctatccagaaaaagagattatttgggacttgagatttgcagtgataccaacttatagcaatgatgtactttaagggaactacccaactatgttgtgatagaagaaagagaaaccttcactttggcattttttttaatcactgtttatttttctgtttgcggcccaggaagcagtgggaggtggtggcagatatgctttgcatatggattgttatgtttttatttgggcaagtttaatcatggaaaactcaaaaagaaggggggaaatggtcagtttaagccaaaagaaactttctaaacaatgtataggtacacagcaaaattaaacaaatccaacaatttctgaagcttagtgtaattgagtggtggttgttattcaataaaattattcccaaaagtgtttctcctaagagtgcagttcccatgagtcacttcctgaacccattgaccaaaggtggacagagacaatcctgtagaccttgacattcagaaagatgtgagctgcttactgatcatatatgcatacgtttctttacagcagaggaaaccattgtccacaaaactgatgttcttttggggttttatgtacagacttgtccaatcatgtgtgtggttcctgcgagttgctgatgactccgcattgaagctctctgagttctttgattttaagttgggtttatggaattttttcaaatgttggaaggcgtgtggttcttcctgccctccctccccttttggaaatatgaaagcaaatgtttagaagaattccttttgaaaagctgtgtcgtgttccctgtgaaactgagcaggtgtgtgttggcgcgctaagtgccacatgcttgtgtgtagaggaggaggtggccctgccggctccgcgctgctgtgcctgtgatccctacctgctccccgctcctgttgccagcagcactcactgcactcctttgtcatatactctgcatcactgtcatactcacaacttcgtgaataaagttgtgtgctttattcgaaaaaaaaaaaaaaaaaaaaaggttcctgcccnnnnnnnnnnnnnnnnnnnnnnnnnnnn

SEQ ID NO: 22487 - DNA, 1147 bp, Homo sapiens
  misc_feature 1, 2: n = A,T,C or G
nnctgaagcacgttgggtgagagaaagaaagaaatcacatcctttatcctcccacacagccaaagattcctgaagacagagctgatgccatgtactcaagtgggtctctgcctctcagaggtggccttggtcttcaagtttcagcaattctgggaagccaaggacacctccatctcctcctccctgatctgcaactcatctaagagcagctttctcattggaatgtcttgtgtttaaggaacaagaatccctgtttccggtttgggtgcccaagtgcacctactggatccaacccaggattggagatactttgcagaacacaacatcatctggcacatgaccagccatggtgtttcactttcacaatttcagcttccttcactgattgcagcataatcgtggttcagcagcctccaagaccagggctgatgtgggcggctacagggagaaattgaagaggaagttcttggtggtgccctccatgagtacaaagaagcctcagtccccaggacacccttccgtgcatggtgtcactgacatctttatttcttttgtcacgttctgtaaatcacaatgaatggggtattcttcttctattatatatttgttaagtcttttttggcatctttaaaaaaaagtggtaactttatcctatgtaatatccctgttaagtcctaaaagtcttttctgatgtctattttgtctgaaatttgcacagctactatagcttcatttcggttcatattttcataatccatgttttctcatccttttatatttgtgaatgtgtaaagtaactttcttgtgcatagctaagagtttggtcttgcttttttaaatcgactataagttctatttttaaactaatattttctcttattttttgtttaagatagcatttcataatgatgtttatttctccattaacatattacctaattcactttttataaatattatatttgttaccataaggtttgcaaaaggagcgattcttcattttggaaccctttcttattttctgggtacgacataatgtaaagcaggcttcggatagtggatctggggaccaagtttgaggtagtggaaatgagacattgctgaacaaaagagaactgggtttacctgaccctctaaagcgctaagt

SEQ ID NO: 22488 - DNA, 350 bp, Homo sapiens
acactggaggctggagcctgcagatggcatggctctgcggctcaccttgctgcagttggtggtggtgacagagactgcagcttgactgtagtgtccatgttctccagagaagcagaacgagttggatgtatgttttggaagagattatgaggaaccggctcatgtgatgaaggaggttgagaggtcctgtgctctgccatctgcaagctgaagacctggaaagctgagggtgtggctccagtctgagtctgaaggcccaagaaccaggggaaccaacggtgtagattccaggttgaaggcaggagaagatggatgtcccagctcagcaggcaggcaggaagcaaatgagg

SEQ ID NO: 22489 - DNA, 2019 bp, Homo sapiens
  misc_feature 2005, 2006, 2007, 2008, 2009, 2010, 2011, 2012, 2013, 2014,2015, 2016, 2017, 2018, 2019: n = A,T,C or G
caagggtgtcgccccgcgtccgcactggacttgtaaacgaaaagcttcataagtccctctttgcttagtacttttctcgtcctttccccagggtgcacgtaaccctcaagcactaggaccgtgcggaatccaggctgcgatggcaccttcatttaccgcccgcattcagttgttcctcttgcgggcgctaggctttctcataggcttagtaggccgagcagctttagtcttagggggtccaaagtttgcctcaaagacccctcggccggtgactgaaccattgcttctgctttcggggatgcagctggccaagctgatccgacagagaaaggtgaaatgtatagatgttgttcaggcttatatcaacagaatcaaggacgtgaacccaatgatcaatggaattgtcaagtacaggtttgaggaagcgatgaaggaggctcatgctgtagatcaaaagcttgcagagaagcaggaagatgaagccaccctggaaaataaatggcccttccttggggttcctttgacagtcaaggaagctttccagctacaaggaatgcccaattcttctggactcatgaaccgtcgtgatgccattgccaaaacagatgccactgtggtggcattactgaagggagctggtgccattcctcttggcataaccaactgtagtgagttgtgtatgtggtatgaatccagtaacaagatctatggccgatcaaacaacccatatgatttacagcatattgtaggtggaagttctggtggtgagggctgcacactggcagctgcctgctcagttattggtgtgggctctgatattggtggtagcattcgaatgcctgctttcttcaatggtatatttggacacaagccttctccaggtgtggttcccaacaaaggtcagtttcccttggctgtgggagcccaggagttgtttctgtgcactggtcctatgtgccgctatgctgaagacctggcccccatgttgaaggtcatggcaggacctgggatcaaaaggttaaaactagacacaaaggtacatttaaaagacttaaaattttactggatggaacatgatggaggctcatttttaatgtccaaagtggaccaagatctcattatgactcagaaaaaggttgtggttcaccttgaaactattctaggagcctcagttcaacatgttaaactgaagaaaatgaagtactcttttcagttgtggatcgcaatgatgtcagcaaagggacatgatgggaaggaacctgtgaaatttgtagatttgcttggtgaccatgggaaacatgtcagtcctctgtgggagttgatcaaatggtgcctgggtctgtcagtgtacaccatcccttccattggactggctttgttggaagaaaagctcagatatagcaatgagaaataccaaaagtttaaggcagtggaagaaagcctgcgtaaagagctggtggatatgctaggtgatgatggtgtgttcttatatccctcacatcccacagtggcacctaagcatcatgtccctctaacacggcccttcaactttgcttacacaggtgtcttcagtgccctgggtttgcctgtgacccaatgcccactgggactgaatgccaaaggactccctttaggcatccaggttgtggctggaccctttaatgatcatctgaccctggctgtggcccagtacttggagaaaacttttgggggctgggtctgtccaggaaagttttaggaggaccttctgcaaggttaatgtgtgtgtgtgtttgtgttcgtgtggtggtgtttctattaattgggtgaaaccaagcaccagcagacaagcagagaaacaactggggaatttattgactcatttagttattctttctacttttatttccttctctaactgttggtcttactaaaatggtaatatttgcttcttgcttttatgttactggaaaattaggacatgtaaatggataagtgcaataaagtttcctaaatgcttgaaaannnnnnnnnnnnnnn

SEQ ID NO: 22490 - DNA, 3075 bp, Homo sapiens
  misc_feature 1, 2, 3074, 3075: n = A,T,C or G
nnacccacgcgtccggctcctgaacggcaggcattctctttccttttccttctctcctgagcgctcctgcagttcctggggcgtagtaggggatccacaagcgtttgtgaccagtgaagttctttacaagggtgagatctgcacgggaggacccgagcgagggtctcggcttgccaggaagccggggttccccgggaagcgtggagttcacccgcgcactcgaagtgcctttgcaaaattatatctgggtgttggcacccagccactattctgccaatgaagtacatcctggtcacgggtggggtcatctcaggcattggtaaagggatcattgccagcagcattggaacgattctaaaatcatgtggactccgagttactgccataaaaatcgacccctatattaacatcgatgctggcactttttcaccttatgaacacggtgaagtcttcgtcttaaatgatggtggagaagttgatttagaccttggaaattatgaaagatttttggatattaatctttataaagacaacaatatcaccacggggaagatatatcagcatgtgatcaataaagagaggcgtggtgattacctggggaaaacagtgcaagttgtccctcacattactgatgctgtccaggagtgggttatgaatcaagccaaggtgccggtggatggtaataaggaagagccccaaatatgcgttattgagctgggaggcaccattggagacatcgaaggaatgccgtttgtggaggcgtttagacaattccagtttaaggcgaaaagagagaatttctgtaatatccacgttagccttgtcccacagctcagtgctaccggagaacaaaaaaccaaacccacccaaaacagcgtccgcgcactgaggggtttaggcctgtctccagatctgattgtctgccgaagttcaacgcccattgagatggccgtgaaggagaagatttctatgttttgtcacgtgaaccctgaacaggtcatatgtatccatgatgtttcttccacataccgagttcctgtgcttttagaggaacaaagcattgtgaaatattttaaggagagattgcacctgcccatcggtgattctgcaagtaatttgctttttaagtggagaaatatggctgacaggtatgaaaggttacagaaaatatgctccatagccctggttggcaaatacaccaagctcagagactgctacgcctctgtgttcaaagccctggaacactcagccctggccatcaaccacaagttgaatctgatgtacatagactccattgatctggagaagatcactgaaaccgaggaccctgtgaaatttcatgaagcttggcagaagctatgcaaagctgatggtattcttgtgcctggaggctttggaatcagaggaacattgggaaaactccaggcgatttcttgggcaaggacaaagaagattccttttctgggagtttgtcttgggatgcaactagcagtgatagagtttgcaagaaactgccttaacttgaaagatgctgattccacagagtttaggccaaatgccccagttcctctggtgattgatatgcccgagcacaaccctggcaatttgggaggaacaatgagactgggaataagaagaactgttttcaaaactgaaaattcaatattaaggaaactttatggtgatgttccttttatagaagaaagacacagacatcggttcgaggtaaaccctaacctgatcaaacaatttgagcagaatgacttaagttttgtaggtcaggatgttgatggagacaggatggaaatcattgaactggcaaatcatccttattttgttggtgtccagttccatcctgagttttcttctaggccgatgaagccttcccctccgtatctggggctgttacttgcagcaactgggaacctgaatgcctacttgcaacagggttgcaaactgtcttccagtgatagatacagtgatgccagtgatgacagcttttcagagccaaggatagctgagttggaaataagctgaaatgaatacatgactgggaataatggggactgcctgtgaggcctctgaaataattgaaggcaagatgaaggaactatctgaagaaatcactacactcttagagaatccctctgttctccagcaaacatgggatgtaaagcctcacagggaatctgataatacatacttctgtcaaccagaaccagaggggtagttttcttttccctccagaggcagcctttggtacttaaaatatctgtagctgattaaatttttcccaacaacctcactggggagaaagtgtgttcatgttttgtccagcggatcaggatgttaggatgacgagcaagagtccaggtcactgtgcctttgctgtgttgtatggaaaggatggcagggaacatgctgtaagtaattttgagtaagaaaatgagtcactgtgttacctggaactcagccacagatttgtgtgtggtccaagatcattgcagtttctcaccctgtttatttcctggtaaaagtaaaattgaataggtccaagacttgggggtggcaagtaaggctttgcctcaggacaaaatttaagggggctccaaaaaactcaggaatcaagatcagcaatacagtctgagtatcccttatgtgaaatgttggggctagaagtgtttgaatttcagatttggaatatttgcatatacatgcgatatcttggggatgagaatcaagactaaacatgaaattcatttatgcttcatatacacttatatacatagcctaaaggtaattgataccatattttaaataatttgtgcatgaaacaagtttcgaatgatttgactgtgattctggcatgaatcagtatgaattccactttagcgtatgtggtcagaatttgaattgggcttgattcgataggatgaactgtttttttaacagggattcgtataataccttgaggacatggggtcggtgtgggacccttattcaatttcccaaaggtaagagattatcctggggaactttggttgtataaaacgtgtggcaggggccccatccgnn

SEQ ID NO: 22491 - DNA, 2375 bp, Homo sapiens
  misc_feature 2358, 2360, 2361, 2362, 2363, 2364, 2365, 2366, 2367, 2368,2369, 2370, 2371, 2372, 2373, 2374, 2375: n = A,T,C or G
gtcccccaggttcatgctttaaatatccttagagcattgttcagggatacgcgcctgggagaaaatattattccttatgttgctgatggagctaaggctgcaattctgggttttacatcaccggtctgggcagtgcgaaattcatccacacttctctttagtgccttgatcacaagaatttttggagttaaaagggcaaaggatgaacattccaaaacaaatagaatgacagggagagagtttttctctcgtttcccagaactctatccttttcttctcaaacagttggaaactgtagccaatacagtagacagtgatatgggagaaccaaatcgtcatccaagcatgtttctcttacttttggtgttggagagactctacgcttccccgatggatggtacttcttctgctctcagcatgggaccttttgttcccttcattatgaggtgtggtcactcacctgtctaccactcccgtgaaatggcagctcgtgccttggtcccatttgttatgatagatcacattcctaataccattcgaactctgttgtccacactccccagctgcactgaccagtgtttccggcaaaaccacattcatgggacacttctccaggtttttcatttgttgcaagcctactcagactccaaacacggaacgaattcagacttccagcacgagctgactgacatcactgtttgtaccaaagccaaactctggctggccaagaggcaaaatccatgtttggtgaccagagctgtatatattgatattctcttcctattgacttgctgcctcaacagatctgcaaaggacaaccagccagttctggagagtcttggcttctgggaggaagtcagagggattatctcaggatcagagctgataacgggattcccttgggccttcaaggtgccaggcctgccccagtacctccagagcctcaccagactagccattgctgcagtgtgggccgcggcagccaagagtggagagcgggagacgaatgtccccatctctttctctcagctgttagaatctgccttccctgaagtgcgctcactaacactggaagccctcttggaaaagttcttagcagcagcctctggacttggagagaagggcgtgccacccttgctgtgcaacatgggagagaagttcttattgttggccatgaaggaaaatcacccagaatgcttctgcaagatactgaaaattctccactgcatggaccctggtgagtggcttccccagacggagcactgtgtccatctgaccccaaaggagttcttgatctggacgatggatattgcttccaatgaaagatctgaaattcagagtgtagctctgagacttgcttccaaagtcatttcccaccacatgcagacatgtgtggagaacagggaattgatagctgctgagctgaagcagtgggttcagctggtcatcttgtcatgtgaagaccatcttcctacagagtctaggctggccgtcgttgaagtcctcaccagtactacaccacttttcctcaccaacccccatcctattcttgagttgcaggatacacttgctctctggaagtgtgtccttacccttctgcagagtgaggagcaagctgttagagatgcagccacggaaaccgtgacaactgccatgtcacaagaaaatacctgccagtcaacagagtttgccttctgccaggtggatgcctccatcgctctggccctggccctggccgtcctgtgtgatctgctccagcagtgggaccagttggcccctggactgcccatcctgctgggatggctgttgggagagagtgatgacctcgtggcctgtgtggagagcatgcatcaggtggaagaagactacctgtttgaaaaagcagaagtcaacttttgggccgagaccctgatctttgtgaaatacctctgcaagcacctcttctgtctcctctcaaagtccggctggcgtcccccaagccctgagatgctctgtcaccttcaaaggatggtgtcagagcagtgccacctcctgtctcagttcttcagagagcttccaccagctgctgagtttgtgaagacagtggagttcacaagactacgcattcaagaggaaaggactttggcttgcttgaggctgctggcctttttggaaggaaaggaaggggaagacaccctagttctcagtgtttgggactcttatgcagaatcgaggcagttaactcttccaagaacagaagcggcatgttgaagaaaatctgggggattgggatgggggtatgtgtggatttttcctccactaaatctgcaggaaacatgttgaacataaattcaaaaattttatcccaacccaaaacanannnnnnnnnnnnnnnn

SEQ ID NO: 22492 - DNA, 369 bp, Homo sapiens; identical to SEQ ID NO: 21651
  misc_feature 1, 2, 3, 4, 5, 6, 7, 8: n = A,T,C or G

SEQ ID NO: 22493 - DNA, 2060 bp, Homo sapiens
  misc_feature 2045, 2046, 2047, 2048, 2049, 2050, 2051, 2052, 2053, 2054,2055, 2056, 2057, 2058, 2059, 2060: n = A,T,C or G
cgtccgctctcattaagaaaatttttccccacaattgtctgatgtatgagtcctctcagaagcacaagtgcatactaggaaggctttgtaaactggttttgtaggcaggctgtacctgcaaataggcattctgagcaaggatcctaaatttccctttggctcatgtcccccccgccccaccccaccttctcctttttggcatgtctggtgaaaagctacaaggttcacagggccaaatattctcccttttgttctctaaacatgttgcacacataaactcaagggagtgatttcggttcctaagtcctagggagttctattccatttattctgatgtcccttttaaggaggagttggtgttgaagtgtgacatgctttaatgataactgctttggcaattccccagacaggtatacttcttcatccaaaattgcacctaaggtgttcatttagacaaaattgttcgcttagtgatccactgatctctaatcagaaatatttttaaaaaatacaatttagatctctgaaaattggaaccactcaagagtatcatcttgatagtgttacttcagcatatgactgactgattttatgaagggagtttagctgacttttccctgtagccctatcatattaaaaacaaaaagtggtccacttgaagcagcaaggacaaagggcagtttagggagaggcagggtgaaggggatagctcgattgggcatccagagtggaaaaggattattattgtacataatagcagttctggctggaattccaatccactttctggggatcattttgatgttgaatgttcccccaaagcattctgacaagtttggtccacttggctctttaccccgggtaataagacccttattgactttgaaaaactggcataaatgagcttaaggaaatccattgtatacagtcctagtgtttgccttcttggtaaaattacatttaaggatgtcatttcatgagtcaaattgtatctgctgacactgaagtgtattgagatgttgttctttagtttaagtatgtaacaaagtaatattcaaaggggatgtttgggggtggggctgggaccgggtggctttatattgataatgaaatattccagggcaaaacacattgtcctaatgaagttgttgcagctctcttcgttttcttgtgccgctggaattggcttgtgggtcacttgttgtgcaaaagtgaattaatttcaaataggaatcatattgcttttgtgaaacaaagaaaatttaccaccttgtctgatacatagattggaaggcgctcttggtaaagaataacccacaaacacctgatcttgattggaaagcattgtaggtcattagggaaaactgatgatgctgactgttgctccagctgtgttggcaattcaagatgaccttgttactaactgaaagttgctgtcaaccttagcaaacaaaccagctaacaccattacagcactggttaagtagatttttactggcactggctggcgttcagctgaggaaggctaggatacagactttaatgaccaagagccagactagctcgagctagaaatcagcaacaaatacctccttgtgctatttgaatgctaaggtattagttgcaataggcttacgccttcgctcctctagtgaggggaatgagcctgatgacactattactgtttacctgtcaaaccagggtggaaatttagagggatgcaagtacagtatgtctcattaagcagtctctgttgctgattatatgaagataaaattgttgtatatgctgatctgtatgttatgtacattttcacagtgattgaatcattgtaaaaagaaaaaagacaaaaaagaatcaccactgtctattttatgaagatgataaagcagctttattaaattattacagttatgtttcaaatggtgttatctgccacattgtttccttttatctggtggttctctgtttccccctttaaatgtgttttctctgcttcaaaaatttaatgcattttagtattaaaggctattataaaaaaaaannnnnnnnnnnnnnnn

SEQ ID NO: 22494 - DNA, 5301 bp, Homo sapiens; identical to SEQ ID NO: 21447
  misc_feature 1, 2, 3, 4, 5, 5179, 5180, 5181, 5182, 5183, 5184, 5185,5186, 5187, 5188, 5189, 5190, 5191, 5192, 5193, 5194, 5195,5196, 5197, 5198, 5199, 5200, 5201, 5202, 5203, 5204, 5205,5206, 5207, 5208, 5209, 5210, 5211, 5212, 5213, 5214: n = A,T,C or G
  misc_feature 5295, 5296, 5297, 5298, 5299, 5300, 5301: n = A,T,C or G

SEQ ID NO: 22495 - DNA, 798 bp, Homo sapiens
  misc_feature 788, 789, 790, 791, 792, 793, 794, 795, 796, 797, 798: n = A,T,C or G
acatatatccaccatttctggtgctcttcatttcatcctgtggattcaggttaccatcggggtgtcatttattttcggtgtgaaggatttagtatctcttgtaaggcagacgtccataggcaacaaattgtcttagtatttgtctgggaatgtctttaatttcactttttttccaactttcaacaaaagcttcatatcctggtgatgtctttgttataaggaaaaaaaaaaatccctaaatccagccttcaaattgaagtaactatctttaatgtgagagcaatcctattcacaaagcccctccccagagtcaatcaagggtttggggaccacatctcatcatttttccagttctcttgtaagccaagttttcacccccaggagactaacaaatgtgctgacccaaaggcaacagagatcacctgtagacaggtccatcatgccccaatggaagacccacacccctaagcatgtggagaaaagcccccaggcacagagacacacctgcagacaggagggcactccccgaacacgctataatattgtaacttgcactaggcagggttagaaaacttctaaagactcttgtaactcaaaggttctagttgccatctacagcaactacatatggcatgactcattccaacgtatacactttattttaaaaatgtaatttatttgcactgcttccattcttctactgtagtgttaggacttaacataagcatcactcttctatttcctatttacattccttttggaatattaccaccaattccattttccannnnnnnnnnn

SEQ ID NO: 22496 - DNA, 564 bp, Homo sapiens
  misc_feature 564: n = A,T,C or G
ggcaggtacaacaggcttcagatgttactatagataatcacaaggaacactgcgcttggggcatgactgccctcagcaacccttctggcggcagacacagttgttagttttccaacatcctgctttcatgagaacagttttctgtttgctcatatagccttcagtggtatactgagttggtcacgaccttcattctttcggcctgtaacatctccccatttttgtttttgcattaattgaataaaggtaattgcaggttgtgcagctctcaattgccgtttggtggtccagctgattttgcagacttatatcagctgtcagcagactcgtcgcagggtttctcattctcgttcttcttgtcagtgtcagtttctctgctccagcagaccttcactcacgtccctgtcctaggtgccagttgtcgctgttggttgttatgggagtgaacgaagggggatgaatgcagaaacgaagacaaagacaaaaagtatttttggaagaaggggtcagggggctccttctagtgagcaagggcccccgcgtacctgcccgggcggccgctcn

SEQ ID NO: 22497 - DNA, 322 bp, Homo sapiens
acgcggggagaggaaagaaaacaagaggtgagtgaggcaactgaaaactgttcttggacctgcggtgctatagagcagggtgaccctaagaatgactcctggatctttgccctggctgtgctcctgtgcagcacctttgtctacaacagcatgagcaccatcaaccaccaggccctggagcagctgcattatgtgacggagctcacagaactaattaaggcaaagtcctccccaaggcctgatggagtagaagattccacagagtttgtgagtttcttcccagactttctttggacagtacctcggccgctctagaactagc

SEQ ID NO: 22498 - DNA, 1929 bp, Homo sapiens
  misc_feature 1, 2, 3, 1928, 1929: n = A,T,C or G
nnncgaattggagctcaccgcggtggcggccgaggtacttctttttttttttttagatagccagtgtgtagactttattacataggcacatattaaaaaaaaaaaacataaactggttttacataaaattaaccacaatagtgcaagaggttacactgaatgagaatggatgatgaatgatggaaaatgtaaggcttggaacagctgaatcattcactggatcttgggttcatccatcctgacgcactgaaatttattacagacattacaagaatggagggtgaggaatggtgcttctctgtcatcgcctggctaaaacactgattttgattaatctcttgaatacggtagttttctccaggttctcttgttaagtagacataaaagttaaatgaatgctggcttaaggtcagaggagttcatatccttctcttccctcacccctatactttagaactctcacacccaacaatttgctgttgggacctgactatacatctgctttcccacaatgctctggtagaataccactggggttgctgatccaaagcacatggaggcgcaacagtgcttaaggcttcagtcatggtgtggggctagacagcatccccaactagaattgagggtttgatctgtggggtaacacgagcaagcaggaagaggatgctggaattccttactctgtccagttggaatcaatccaacacatctgactaccacaaatacaaccagaaaagaaactaaaattacacactcaaacataccatgaaagagatgctattttgtagcttgtacatagtttaaaatttttttaactacaatttgatgttactaagagacaacgaggatacagaggggactgtcccttttctctcatctggttttgccataacttacaaatagtcccaggatgtttactgagtgtcctccttcaattttcacaatattttatacaaaatgacaaatatatatatacctcattgattatcctatcatccccagtacttggagggttagacctacttctgtgtcaggtagcacccaaatcctaacatctattttggagacctgtctgtgcctcttcatgctcacaccattgttctgatagatgatgccagtggaacttccaaagaagcattccacctgatcttcaccaccctctttgatcctctttttaaatctgtgtgtggaaggcaactgcaatatagaggatttggaaggttgtctgtttctgttgtctggggaaatgataaaaaaaaaaaaaaaaaagagagagatgtgaaaaggaaaaagatggaccaggtgatttttccaatcttcaaaatttaaatttcttggttcttataaacataggaagagtcactgaaaggtggcaccaatggatattttgtaaaataacccacaactttagagctggaaaggacttgaagaaacaattaatccaacttcctcacttttttgtctcaggaaactgaagcccaattgggaaaacagcaacttacttaacatagtgattgtctccatggctatgtcctgtaaagattcacagaaaccccaatttccccttaataaatccattatggcatgcctatgagtgactttaaataaacaatcctcaatgtcctcgtgtctagcctttcctccctttagggaagctggctgctaacacagcacctgaccagagtagacatttgataaatatttgttgagttgaattaatcctgccatctatccctttttactatgcaatctttatttttcctggagcttcttacttttaactttaagagatggcttctagttcaagtattttgaggcttggtaccccggccgcgaccacgcccagggtgaattgcggttgtttctcctcacaggaaacaccgtatggccctgattactggccgtcgttttacacacaggaaacagcnn

SEQ ID NO: 22499 - DNA, 2841 bp, Homo sapiens; identical to SEQ ID NO: 21617
